United States Patent Application Publication US 2018/0126003 A1 - sequence listing, part 146

SEQ ID NO: 256883 - DNA, 2331 bp, Artificial Sequence
  derived and/or modified sequence
atgagcgaggctgttagagtcccctcaccggccacacccctagtggtcgccgccccagcgccagaagagcgcaagggaaaggagtccgagagggaaaagctgccaccaatcgttagtgctggcgccggtgcaaccgccggtctggaccgcggtgccaagggccagatttcgacattcagctccttcatcagcgccgtatctccaaaaaaggaggcagccgagaatagaagctctcccgcgcatcttgtgtttcctaacattaaaaacgtccgggagcccccgcctatctgtctcgacgtgcggcaaaagcagcggaccagcatggacgctagcagttcagaaatgaaggctcctgtgctcccggaacccatcttacccatccagcctaaaaccgtgaaggacttccaggaggatgtagaaaaagtgaagtcttccggcgactggaaagccgtccatgatttttatcttacaacattcgactcatttccagagcttaatgccgcctttaagaaggacgctacggccagtttcaatactatagaagatagtggaatcaatgcaaagtttgtgaatgccgtgtatgacactcttctgaacacaccacaggatgttcagaaaaccgtacttaaaggaattatcaatagtctacttcgcgaatggaaaggaccgcgcacaaaagacgacctccgcgcctactttatcttactgcagaatccacagtttaataacaccagtacatatgtgatctatgcccacctgttgcggcagatcgccacacttgtggaagctgaccaccattttctggtgcattggttcaagaagttgagccagaagcgctttaaacaactcgtggagcggctgcttcaattcatttctctgagactcttccctgctaagcctgaggaattccccccgattacaaagtgttcatggtggattccttccgctgccaaggttcttgccttgttgaacactgccaataatttagtacaccccccccttattccatacacggatttctacaattccaccctcgatcatatcgacctgatggaggaataccatacatggcagaactttgggaactcccatcgcttctccttctgtcaatatcccttcgttatcagcgttgccgcaaaaaaaattatcatacaacgggattccgaacagcagatgataaacattgctcggcagagcctcgtcgataaagtctcccggagacaaagaccggacatgaacatcctcttccttaatatgaaagtgcgcagaacgcatctcgtaagcgatagcctagacgaactgaccaggaagcgggcagatctgaagaaaaaactgaaagtcacttttgttggagaagcaggcctggacatgggcggattgaccaaagagtggtttttgctgctgatacgccaaattttccatcctgattatggtatgttcacataccacaaggactcccattgccactggttttcgtcttttaagtgcgacaattattccgagttccgtctagtcggtatattgatgggactcgctgtatacaactctatcactttagatatccgcttcccaccatgctgctacaagaaacttctttccccccccataattccctcagaccagaacattccagtggggatctgtaatgttacagtggacgacctatgtcaaattatgccagagctggcccacggattatcagagttgcttagtcacgagggtaatgtggaagaagacttttacagtacattccaggtattccaagaggagttcggtattattaagtcttataacctcaagcctggcggggacaagattagcgtgaccaaccagaaccgaaaagagtatgtgcagttgtacaccgattttctgctcaataaatccatttataagcagttcgccgctttttactacggcttccattccgtgtgtgctagtaatgcactgatgctactgcggcctgaggaggtggagatcttggtgtgtggatcgcccgatttggacatgcacgccctgcagcgatctacccaatacgacgggtatgccaagactgatctcacgattaaatacttctgggacgtggtcctcggatttcctctggatcttcaaaagaagctgctgcacttcacgacagggtccgacagggtccctgtggggggcatggcagacctcaacttcaaaatcagcaagaatgagacatctacgaattgtcttcccgtggcgcacacttgcttcaaccagctctgtcttcccccctataagtccaaaaaggacttgaaacagaaactcatcatagggattagcaactcagaggggtttggtctggagtag

SEQ ID NO: 256884 - DNA, 444 bp, Artificial Sequence
  derived and/or modified sequence
ttgagccagaagaggttcaagcagctggttgaaagattattgcaattcatctccctccggttatttccagctaagcccgaggaatttcctcctataacaaaatgctcttggtggataccatccgctgctaaggttcttgccctgttaaacactgcaaataacctggtccacccacctctgattccatacactgatttctacaatagcacactggatcatatagacctcatggaggaataccatacctggcagaatttcgggaactcccatcgaatggcagtgcgtatcaaaagaaactacactcatactataattctttacatggtcaaacataatcctaaggtgatgttctacattgcaacaagaggaaccttagactcactttcaattatcttactcaaaattcatcacttcgcctttagcttctttcacctcctttcatag

SEQ ID NO: 256885 - DNA, 2331 bp, Artificial Sequence
  derived and/or modified sequence
atgtctgaggccgtgcgggtgcccagccctgccacccccctggtggtggccgccccagcccctgaggagaggaagggcaaggagagcgagcgggagaagctgccccccatcgtgtctgctggggccggggccacagctggcctggacagaggagccaagggccagatcagcaccttcagcagcttcatctctgctgtgagccccaagaaggaggccgctgagaacagaagcagccctgcccacctggtgttccccaacatcaagaatgtgcgggagcccccacccatctgcctggatgtgcggcagaagcagaggacctccatggatgccagcagcagcgagatgaaggcccctgtgctgcctgagcccatcctgcccatccagcccaagacagtgaaggacttccaggaggatgtggagaaggtgaagagcagcggggactggaaggctgtgcatgacttctacctgaccacctttgacagcttccctgagctgaatgctgccttcaagaaggatgccacagccagcttcaacaccattgaagattctggcatcaatgccaagtttgtgaatgctgtgtatgacaccctgctgaacaccccccaggatgtgcagaagacagtgctgaagggcatcatcaacagcctgctgcgggagtggaagggccccaggaccaaggatgacctgcgggcctacttcatcctgctgcagaacccccagttcaacaacaccagcacctacgtgatctatgcccacctgctgcggcagatcgccaccctggtggaggccgaccaccacttcctggtgcactggttcaagaagctgagccagaagcgcttcaagcagctggtggagcggctgctgcagttcatcagcctgcggctcttccctgccaagccagaggagttcccccccatcaccaagtgctcctggtggatccccagcgctgccaaggtgctggccctgctgaacacagccaacaacctggtgcaccccccactcatcccctacacagacttctacaacagcaccctggaccacatcgacctgatggaggagtaccacacctggcagaactttggaaacagccaccgcttctccttctgccagtacccctttgtgatctctgtggccgccaagaagatcatcatccagagggacagcgagcagcagatgatcaacatcgcccggcagagcctggtggacaaggtgtcccggcggcagaggccagacatgaacatcctcttcctgaacatgaaggtgcggaggacccacctggtgtctgacagcctggatgagctgaccaggaagagagctgacctgaagaagaagctgaaggtgacctttgtgggggaggccggcctggacatgggcggcctgaccaaggagtggttcctgctgctgatccggcagatcttccacccagactatggcatgttcacctaccacaaggacagccactgccactggttcagcagcttcaagtgtgacaactacagcgagttccggctggtgggcatcctgatgggcctggccgtgtacaacagcatcaccctggacatccgcttccccccctgctgctacaagaagctgctgagcccccccatcatccccagcgaccagaacatccctgtgggcatctgcaatgtgacagtggatgacctgtgccagatcatgcctgagctggcccacggcctgtctgagctgctgagccatgagggcaatgtggaggaggacttctacagcaccttccaggtgttccaggaggagtttggcatcatcaagagctacaacctgaagccaggaggagacaagatctctgtgaccaaccagaacaggaaggagtatgtgcagctgtacacagacttcctgctgaacaagagcatctacaagcagtttgctgccttctactacggcttccacagcgtgtgtgccagcaatgccctgatgctgctgcggcctgaggaggtggagatcctggtgtgtggcagcccagacctggacatgcacgccctgcagaggagcacccagtatgatggctacgccaagacagacctgaccatcaagtacttctgggatgtggtgctgggcttccccctggacctgcagaagaagctgctgcacttcaccactggaagtgacagagtgcctgtgggcggcatggctgacctgaacttcaagatcagcaagaatgagaccagcaccaactgcctgcctgtggcccacacctgcttcaaccagctgtgcctgcccccctacaagagcaagaaggacctgaagcagaagctgatcatcggcatcagcaacagcgagggcttcggcctggagtag

SEQ ID NO: 256886 - DNA, 444 bp, Artificial Sequence
  derived and/or modified sequence
ctgagccagaagcgcttcaagcagctggtggagcggctgctgcagttcatcagcctgcggctcttccctgccaagccagaggagttcccccccatcaccaagtgctcctggtggatccccagcgctgccaaggtgctggccctgctgaacacagccaacaacctggtgcaccccccactcatcccctacacagacttctacaacagcaccctggaccacatcgacctgatggaggagtaccacacctggcagaactttggaaacagccacaggatggctgtgcgcatcaagaggaactacacccacaccatcatcctgtacatggtgaagcacaaccccaaggtgatgttctacatcgccacccggggcaccctggacagcctgagcatcatcctgctgaagatccaccactttgccttctccttcttccacctgctgtcctag

SEQ ID NO: 256887 - DNA, 4802 bp, Artificial Sequence
  derived and/or modified sequence
gagccctctcgcggccgcggcggcagcagcagcgccagccccagcaacactgaggccgccgccgccgcctggcgctcccgccgcccggcccgacatgagtgaggcggttcgggtaccctcgcccgccactccgctggtggtggcggcgcccgcgcctgaggagaggaaagggaaggagtcagagcgcgagaagctgccgcccatcgtatcggcgggcgccggcgcgaccgcgggtttggacagaggagccaaaggccaaatttccactttcagcagttttatttcagctgttagcccgaagaaagaagctgctgaaaacagaagttcacctgcacatcttgttttccctaacatcaagaatgtgagagaaccaccaccaatttgccttgatgttagacaaaaacagcgtacatctatggatgcatcatcatccgaaatgaaggccccagtccttccagaacctattcttcctatccagcccaaaactgtgaaagactttcaggaagatgtagaaaaagttaagtcatcaggagattggaaagcagtacatgatttttatctaacaacgtttgattctttcccagaattaaatgctgcatttaagaaagatgccactgcctcatttaacaccattgaagactctgggattaatgctaaatttgtgaatgctgtgtatgataccttacttaatactcctcaagacgttcagaagacagtattaaagggaatcattaacagcctgttacgagaatggaaaggtccacgaacaaaagatgatcttagagcatattttatacttttacagaatcctcagtttaataacacatctacgtatgtcatctatgctcacttgctacgacagatagctaccttagtggaagctgaccatcatttcctagttcactggtttaaaaaattgtcccagaagaggttcaaacaattggtagagagattgctgcaatttatttctttacgcctgtttcctgcaaagcctgaagaatttccacctataacaaagtgttcctggtggattccatcagccgctaaagtgttggctttacttaatactgcaaacaatttagttcaccctccccttattccttatactgatttctataattctacattggatcacattgatctcatggaagaatatcatacttggcaaaactttggaaactctcacaggttttccttctgtcagtacccattcgttatttctgtagctgcaaaaaaaatcattattcagagagactcagagcaacagatgataaacatcgcaaggcaaagtctggtggataaagtatctcgaagacagagacctgatatgaatatattatttctaaatatgaaagtaagacggacacatctggttagcgattcacttgatgagctaacccggaaaagagccgatttgaaaaagaagttaaaagttacatttgtaggggaagctggtttggatatgggtggtttgactaaagaatggttccttcttctaattcgccaaatttttcatccagattatggcatgtttacatatcacaaggattcacactgccattggtttagcagctttaaatgtgataactattctgaattccgattggttggaattcttatgggactagctgtttataacagcatcaccttggatattcgtttccctccctgctgttacaagaaattattgagccctcccatcattcctagtgatcaaaatataccagtaggcatctgcaatgttaccgtggacgacttatgtcaaattatgcctgagttggcccatggattaagtgaactcttatcacatgaaggcaatgttgaagaagatttctattcaacatttcaggtttttcaagaagaatttggaataatcaagtcctataatttaaagcccggtggtgataaaatttcagttaccaatcaaaatagaaaagaatatgtacagctttatactgacttccttctgaacaaatccatctataagcagtttgctgcattttattatggatttcatagtgtgtgtgcttcaaatgccctaatgctgcttcgtccagaagaggttgaaattttggtctgtggaagtcctgacctggatatgcatgctctgcagagaagtactcagtatgatggctatgcaaaaacggacttaactataaaatacttttgggatgttgtgcttggatttcctcttgatcttcaaaagaagttgctacattttactacagggagtgacagagtacctgtaggagggatggctgatttgaactttaaaatctcaaagaatgaaacttctactaactgcttacctgtggcccatacctgcttcaatcaactttgccttcccccctacaagagcaaaaaggatctgaaacagaaattgatcattggaatttcaaattcagaaggttttggacttgagtaacctagaagacttgaaatataatcttttatatgtagcattcacttccctcttactgtgcctttagccttttcatgtttctgtctcaaaacactttgacaaagctcaccaactttaaaatattaagtttttaaaaaatcaaatatgaagtatgttcagcaaaggcataattttctaaaaacacacacagaaatcgcttgagtgaggaaaagtccacatggcagagacaggtatggtccagttcctcttttatatagcactttatcattctccacaagtagtttgtcacaggcattccactgggaaagcaaagtacagtgaagaatgaatttatggtatagttgaacccagtggcagattgtacactgctagcactgctagcacacagtagcaaagcaaacagctacattatctttaacataaggcatgtagccatattttcatatagtggtatacaacacagtatcattgcaaatgcagtttacagggatttttgatatactggcttgggacctataagattcttctcagcagttgctgaaaagcatgtaaataactacataatagcctgagaataatgggattttgatagtgccatttattgttaaagatttatttttacaaagtaaattcagggttttagatgtgtacacagcttttacaaatcaataaagatgattgtacaagagtattttcagactaattggattcaaggttatattcttttaagtgttgttagtctgcatgcacattggcagtaaactagttacttgtgtactctgtaatatttgtataatgatcatttcttcttaaggctcaagatattagaaaagaaatcagacctaaataatcattgatgaagtatgtcagttacaagcacaaaagaatataactgcttttataaatcttttgaatcatgtacaagacttatatctacattttttgatcaccagttgtaccaaaacactaatttttgaaaaagataggttaaagtatttgacaaaagtgaatacaataataacacttgtgtcaaaatgatatagcttagtataaaaataaaattcaacgttttggccaaaatgtttgtttttcactggattctgaatataataaattcaaagtaccctttttttagagtttctaataaagtagtatgtaaaaagaaactgcattttaagtcagacagtaaatgttttttttaatttacagcaaatgaagcagttttattagcatgttacaaatattgccaaaccaagacttctctaccatactttaacagctttccttcagaaaactctgaagttatatttgcaataataatgaaaccagcatttagtaccagcatatggttcatatgcaaataatactttccccaaaatctttctgggctaggctattttcttgctatgcttcctgcacccaaccagcagaattcttccagggtggaggaactaatcagcttgttctccaacagttctgaagccaacccacaaatctttgaggaaaaggggtcactttgtttactattctcttggagatggaagtgattctgctcttccatttgggtatattatttcaagggtatttcttcttaaaaatcttggaaagcctaagagagttaaaggcatcctggttttgtttcattttgctctgttttaaatccatatgcaaataaaactgcttctctcttacactgcttgaactagaaaatcagctttttaatgtaggttaccacttataagcacaaaagaaacatgtataagaaaccagatttaagtgttttaaataaaatgtaaacagtttttatttggtagagatgactcatggaaaaattgtgttggcttggtctgcatgtttaatgatgtgcttgtatatcgattagctgtgtcacttttaaataagaagtccacacaagcaagccaaatttttagatgacgaagtccataaataactagagaatttttgttatctgttgttaagttgaaatgtataatcatttatcactaaattgcacattgcctttatttatttgtgctctgtttttggtttacagtgtaataatacctcatttaaaaaataaaaaccactactgttacattttattaatttaaaaagctagaaaattcatgtagttactttttttacatatataatctgttaatgaattattgatttttgtatctgccacagtaaattaaagcattacacagtatttatcagtattttttaaacatcctgtccttttttaaaatctttgcttagtcagtcatatttttgtctgtatgattagaagtttttacgtccttccttttttgtacaaatctgtattgtattaatttctggatgcaatttttcaaatattaaaattatacagtcagtc

SEQ ID NO: 256888 - DNA, 2331 bp, Artificial Sequence
  derived and/or modified sequence
atgagcgaggccgtgcgggtgcccagccccgccacccccctggtggttgccgctcctgcgcccgaggaacgtaaaggtaaagagagtgagcgcgagaagttgccgcccattgtgtcagcaggcgctggggccaccgcagggcttgacaggggcgccaagggtcagattagcacttttagtagttttattagtgcagtgtcccccaagaaggaagcggctgagaatcggagctcacctgcacatcttgtattccccaatataaagaacgtgcgggagccaccgccaatttgtcttgacgtccggcaaaaacagagaacctcaatggatgcatcctccagcgaaatgaaggcgccagtcctcccggagccaatccttcctattcagccgaaaacagtgaaagacttccaggaagacgtggagaaagtgaaatcaagcggggactggaaggcagtccacgacttctatctgaccacttttgactccttcccagagctgaacgcagcgttcaagaaggacgccacagcctcttttaacacaatcgaggactccggaatcaatgctaagtttgtcaatgcagtgtatgacacattgctaaacacacctcaagacgtgcagaagacggtgctgaaagggatcatcaatagcttgctgcgggaatggaaggggcctagaactaaggacgacctgagggcatactttatcctgttgcaaaacccacagttcaataatacctctacgtacgtcatttacgcccacctgctccgccagattgccacgcttgttgaggccgatcaccacttcctggttcactggttcaaaaaactcagccagaagcgctttaagcagcttgtagagagactgctgcagtttatatcactgagactgttcccggcaaaacccgaggaattcccccctattaccaagtgttcctggtggataccctccgccgctaaggtgctggccctgctcaacactgcaaacaacctggtacatcctcctctaataccctacaccgatttttataatagcactctcgatcatatcgatctgatggaagagtatcatacctggcagaatttcggaaacagccataggttttcattctgtcaatacccttttgttatctctgtagcagccaagaaaatcatcatccagcgcgactccgagcagcagatgataaatattgctagacagagcctcgtggataaggtgtcaagacggcagagaccagacatgaatattctgtttctgaatatgaaagtgcggaggactcacttagtgtccgactcactcgacgagctaacgcggaaaagggctgatttaaagaagaagctcaaagtgacctttgtgggtgaagccggcctagatatggggggtttgacaaaggaatggtttctcctactgatccgccagatcttccatccggattatggaatgtttacttaccataaagactcccactgccattggttctccagcttcaaatgtgacaactactctgagttccggctagtgggcattctgatgggactggccgtgtacaactccattacactggacatccgcttccctccctgttgctacaagaaactgctgagtcctccaattattccaagcgaccagaatataccagtggggatttgcaacgtaaccgttgacgacctgtgccagataatgccagagctggctcacggcttgtcagaactactttcacatgaaggcaacgtagaggaagacttttactcaactttccaagtcttccaggaggaattcggcattataaaaagctacaatcttaaacctgggggggacaaaataagtgtgacaaatcagaatcggaaggaatatgttcagctgtacaccgacttccttctcaataagtccatctacaaacagtttgcagccttttattacggatttcactctgtatgtgctagtaatgcacttatgctgctgcgtccagaagaagttgagattctggtgtgtggcagtccagacttagacatgcacgcacttcagaggtctactcaatatgacgggtatgccaaaactgaccttacaatcaagtacttctgggacgtcgtgctgggctttcccctcgacttgcagaagaaattactgcacttcacaaccgggtcagatcgcgtgcctgtgggggggatggcggacctaaatttcaaaatcagcaagaatgaaacatcaaccaactgcctgcctgttgctcacacatgctttaaccagttgtgtcttcccccttacaaaagtaaaaaggacctcaaacaaaaactcatcatcggcataagtaattctgaggggtttggattggagtag

SEQ ID NO: 256889 - DNA, 444 bp, Artificial Sequence
  derived and/or modified sequence
ctgagccagaagcggttcaagcagctggtggagcggctgctgcagtttatcagtttgcggctgtttccagccaaaccagaagaattccccccaattacgaaatgcagctggtggattccaagtgcggctaaggtgctggcactcctgaatactgccaataatctggtccatccacccctaattccatacaccgacttttacaatagcacactcgaccacatcgatctcatggaagagtatcacacgtggcagaacttcgggaactcccacagaatggccgtgcgcatcaaacgcaattacacgcataccatcatactatacatggtaaagcacaatcctaaggttatgttctacatcgccacccggggaacgctggactcactgagcataatccttctcaaaatacaccactttgctttctcttttttccaccttttatcatag

SEQ ID NO: 256890 - DNA, 2331 bp, Artificial Sequence
  derived and/or modified sequence
atgtcagaggcggtgagagtgccttctccagcaacacctctggtagttgccgcacctgcgccagaagaaaggaagggaaaggaatccgagagggagaaactgcctccaattgtctccgcaggcgctggagcaaccgcgggactggatcgcggtgctaaggggcagatatcaacatttagcagcttcatttctgcagtcagccctaaaaaagaagcagccgaaaaccggtcatctccagctcatttggtttttcctaacataaagaatgtccgcgagccaccacccatctgcctggacgtccggcaaaaacaacggaccagcatggacgcaagctcttccgagatgaaagctccagtactgcctgaacccatcctgcccatacagcccaagacagtaaaggactttcaggaagatgtggagaaagtgaaaagctctggtgattggaaggccgtccacgatttctacctgaccaccttcgattcctttcctgagctgaatgccgctttcaaaaaggacgcaaccgcctcgtttaatacgatcgaggacagcgggattaatgctaagtttgtaaacgctgtgtacgatactctgctgaatactccacaggacgtccaaaagacggttctcaagggcattatcaattccctattgcgtgaatggaaaggacccagaacaaaggatgatctgcgggcatacttcatactcctgcaaaaccctcagttcaataatacttcaacatatgtcatctacgctcacctgctgcgccaaatcgccactttggtggaggccgaccaccacttcctggtgcattggtttaaaaagctatcccagaagcggttcaaacaattagtcgagaggctactccagttcatcagtctgcggctcttccccgctaagcctgaagagtttccaccgattactaaatgttcctggtggattccttctgctgcaaaagtgctggctttgctgaataccgccaataaccttgtgcatcccccactgataccctacactgacttctacaatagtaccctggaccatatcgatctgatggaggagtaccacacttggcagaatttcggcaactctcaccgcttcagtttctgccagtacccttttgtgatatctgtcgctgccaaaaagataatcattcagagggatagcgagcagcagatgatcaacattgctcgccagtcattagtggataaagtctcccggcgacagagaccggatatgaatatcctgttcctgaacatgaaagtgcgcaggactcatctggtcagtgattctctagacgaactcactagaaaacgcgcagacctgaaaaaaaaactcaaggtcaccttcgttggtgaagcaggcctggatatgggcggactcacgaaggagtggttcctcctcctgattagacagatcttccatcctgattacggcatgttcacataccataaagactctcattgtcactggttctcttcattcaagtgtgataattactcagagtttaggctggtgggcatcctgatggggttggctgtatataactccataaccctggatatacggttccctccttgctgttataaaaagcttctgtcccccccaattataccatcagatcagaatattccagtcggcatttgcaacgtgacggtggacgatctgtgccaaattatgcccgagttagcccatggtctgtccgagcttctcagtcacgagggtaacgtagaggaggacttctacagcacttttcaggtgtttcaggaagagttcggcatcattaagtcctacaatctgaagcccggaggggataaaatcagtgtgacaaaccagaaccgcaaagagtatgttcagctctacactgacttcctgctgaacaagagcatctacaagcagttcgcggctttctattacggctttcacagtgtctgtgcatcaaacgcgcttatgctgctgcggcctgaagaggtggaaatactcgtttgcggaagcccagatttggatatgcacgccctccagagatcgacccagtacgacggttatgccaaaactgacctaacaattaagtacttctgggatgtagtgcttggatttcccctggatctgcagaaaaagctgctccattttacaactgggtccgatagggtccctgtgggcggaatggcggatcttaactttaagattagtaaaaatgagacatctacaaattgcctaccagtagctcatacatgctttaaccagttatgccttcccccatataaatccaaaaaagatctcaaacagaaattgatcataggcattagtaacagcgaaggctttgggctggaatag

SEQ ID NO: 256891 - DNA, 444 bp, Artificial Sequence
  derived and/or modified sequence
ttgtctcaaaagcgctttaaacagttggtcgaaaggctgctccaatttatttctcttcgtcttttccccgctaagcctgaggagttcccaccaataactaaatgttcctggtggatacccagcgcggcaaaggtactggccttactgaacaccgctaataatctggttcatcccccattaatcccatacacagatttttacaattcaacacttgaccatattgatctaatggaggaatatcatacatggcagaacttcggcaacagccacagaatggcagtgagaattaaacgcaactacactcacaccatcatactgtacatggtgaagcacaaccctaaagtgatgttctatatcgccactagggggacgctagattctcttagtatcattctgctgaagatacatcatttcgctttctccttttttcacctgctttcttag

SEQ ID NO: 256892 - DNA, 738 bp, Artificial Sequence
  derived and/or modified sequence
atggtggcagccattgcggagacagacgaaagcgcagaatctgaaggtgtgatcgatagccacaagcggcgcgagatcctgtctaggcgacccagctaccgcaagatattgaatgagctttctagtgacgttccgggtgtgccaaaaattgaagaagagcggtcagaggaggaagggactcctccgagcatcgccactatggccgttccaacgagtatttaccagactagtaccggtcagtacattgccatcgcgcagggcgggacgatccagatcagtaatccaggaagtgacggagtccaggggctgcaggctcttacaatgactaacagcggcgccccccctcccggtgctaccattgtgcaatacgccgcccagagcgcagacgggacacaacagtttttcgtgccaggatctcaggtggtcgtgcaggccgcaaccggtgacatgcctacctaccagatccgcgctcccaccgctgcgctgccgcaaggggtggtgatggctgcttcgcctggctctttacattcaccacaacagctagctgaagaagcaactcggaagagggagctgagactgatgaagaaccgggaagccgctaaggagtgcagaaggagaaaaaaggaatatgtgaaatgtctagagtcaagggtggcagtgctggaggtgcagaataaaaagctcattgaagaactggagaccctgaaggacatttgctcacctaagaccgactactag

SEQ ID NO: 256893 - DNA, 738 bp, Artificial Sequence
  derived and/or modified sequence
atggtggccgccatcgccgagacagatgaatctgctgagagcgagggcgtcatcgacagccacaagagaagagagatcctgagcagaagacccagctacaggaagatcctgaatgagctgagcagtgatgtgcctggggtgcccaagattgaggaggagaggtctgaggaggagggcaccccacccagcatcgccaccatggctgtgcccaccagcatctaccagaccagcacaggccagtacatcgccatcgcccagggcggcaccatccagatcagcaaccctggcagtgatggagtgcagggcctgcaggccctgaccatgaccaacagcggggcccctcctcctggggccaccatcgtgcagtatgctgcccagagcgcagatggcacccagcagttctttgtgcccggcagccaggtggtggtgcaggccgccactggagacatgcccacctaccagatccgggcccccacagctgccctgccccagggcgtggtgatggccgccagccctggcagcctgcacagcccccagcagctggccgaggaggccaccaggaagcgggagctgcggctgatgaagaaccgggaggccgccaaggagtgcagaagaaggaagaaggagtatgtgaagtgcctggagagccgggtggccgtgctggaggtgcagaacaagaagctgattgaggagctggagaccctgaaggacatctgcagccccaagacagactactag

SEQ ID NO: 256894 - DNA, 738 bp, Artificial Sequence
  derived and/or modified sequence
atggtggccgccatcgccgagaccgacgagagcgccgagagcgagggtgtgatagatagtcacaaaagacgggagattttaagcagacgaccaagttacaggaagatcctgaatgagctttccagcgacgtgcccggagttcctaaaatagaggaagaaagatctgaggaggagggcactccaccgagtatagctacaatggctgtgccgaccagcatataccagacttctaccggacagtatatagccatagcacagggggggaccatccagatcagtaatccaggaagtgatggcgtgcagggtttacaagccctgactatgacaaactcaggggctcctcctccaggtgctacgatcgtacagtacgctgcacagtcagcagatggcactcagcagtttttcgttcccggaagccaggtggtcgtgcaggctgctacgggggacatgcccacctaccagatcagggctcctactgccgctctcccacaaggggtcgtgatggcagccagtcctggctctctgcatagtcctcagcaacttgcggaggaagctaccaggaaaagggaactcagacttatgaagaatcgggaggccgcgaaggagtgccgccggcggaagaaggagtacgttaaatgcctggagtctcgagtggccgttctagaggtacagaacaagaagctcattgaagagctggaaaccctgaaagatatctgctcaccgaagaccgactattag

SEQ ID NO: 256895 - DNA, 738 bp, Artificial Sequence
  derived and/or modified sequence
atggtggcagccatcgccgaaacagatgaatccgcagagtctgaaggagtcattgactctcacaagaggcgcgagattctctctcggagaccatcatatcgcaagattttgaacgagctgtcttccgatgtgccaggcgtgccgaaaatagaggaggaacgctcagaagaagaaggaacccctccatcaattgctactatggctgtccctaccagcatttatcagacttctaccggtcagtacatcgcgatcgcacagggcggaactattcagatctccaatcccggatctgatggggtgcagggactccaagccctgaccatgacaaacagtggcgcacccccaccaggagccacaattgttcagtacgctgcccagtccgccgatggcacgcagcagttcttcgtgcctggttctcaggtcgtagtgcaggctgcaacgggggacatgcccacatatcagatcagagcccctaccgctgcactgcctcagggcgtcgtgatggccgcatctccagggagcctgcactctccacagcagctggctgaagaagccacaagaaagagggaactgcgcttaatgaaaaatcgcgaggccgcaaaagaatgtcgcaggagaaaaaaggaatatgtgaagtgtctcgagagccgtgtggccgtgctggaggtacagaacaaaaaattgattgaagaactggaaacattaaaggatatctgcagcccaaaaacagattactag

SEQ ID NO: 256896 - DNA, 1541 bp, Artificial Sequence
  derived and/or modified sequence
ggaacattcttagccaccgaagtatgggcaccaaaagcgataaggagcatgtgttccttaataaatgtcacatcagaaaatgactgttccaggacagtaaccacctcccgatggtagcagcaattgcagagacagatgaatctgcagaatcagaaggtgtaattgattctcataaacgtagagaaatcctttcacgaagaccctcttataggaaaatactgaatgaactgtcctctgatgtgcctggtgttcccaagattgaagaagagagatcagaggaagaaggaacaccacctagtattgctaccatggcagtaccaactagcatatatcagactagcacggggcaatacattgctatagcccaaggtggaacaatccagatttctaacccaggatctgatggtgttcagggactgcaggcattaacaatgacaaattcaggagctcctccaccaggtgctacaattgtacagtacgcagcacaatcagctgatggcacacagcagttctttgtcccaggcagccaggttgttgttcaagctgccactggtgacatgccaacttaccagatccgagctcctactgctgctttgccacagggagtggtgatggctgcatcgcccggaagtttgcacagtccccagcagctggcagaagaagcaacacgcaaacgagagctgaggctaatgaaaaacagggaagctgccaaagaatgtcgacgtcgaaagaaagaatatgtaaaatgtctggagagccgagttgcagtgctggaagtccagaacaagaagcttatagaggaacttgaaaccttgaaagacatttgttctcccaaaacagattactagaaatatttaactatgaactgaaggcagcatgtatagttgcttttgaaggaatacaatatatagctggcaagaatggtggcttcttttctttgtatcattcatcttcttctttaatcacttaacattcctaaaatgcttcactgtacgtagttaagtcgtagctataacttcaaattttttaaaagagacaaactgtaaaaaatgtgtgtattcttaaaatgcaatatttgtaaggcttgttccaatgccacatacttgcagctcccattctatgtgtcatcaatagtgtcctatgcaataaaattatttgcaggtctttaaatcattttaggaaaggatgatcaaaaataatgcatccagcagtacaataaaagtaaaccacaaaaaaatacctcaggaaagaatagaaagaaagtctatctaatgacatgcctatatgagaagaatagcctagatatgaatatatggcatttgcagatttttatattagttgctttgttaaaaaaaaaaagattgtattgctgtccttgaatgccatagtcaaagagagtttttaatagaaccatgttggttgcactttgtagtgtttggtgctcatttaaatatctgaacatttactacagtttttaactctactgtgtaatataaaagatcttgcagaagttcttagtgttggtttaatattacctaatg

SEQ ID NO: 256897 - DNA, 738 bp, Artificial Sequence
  derived and/or modified sequence
atggtggccgccatcgccgagaccgacgagagcgccgagagcgagggcgtgatcgacagccacaagagaagagagatcctgagcagaagacccagctacagaaagatcctgaacgagctgagcagcgacgtgcccggcgtgcccaagatcgaggaggagagaagcgaggaggagggcaccccccccagcatcgccaccatggccgtgcccaccagcatctaccagaccagcaccggccagtacatcgccatcgcccagggcggcaccatccagatcagcaaccccggcagcgacggcgtgcagggcctgcaggccctgaccatgaccaacagcggcgcccccccccccggcgccaccatcgtgcagtacgccgcccagagcgccgacggcacccagcagttcttcgtgcccggcagccaggtggtggtgcaggccgccaccggcgacatgcccacctaccagatcagagcccccaccgccgccctgccccagggcgtggtgatggccgccagccccggcagcctgcacagcccccagcagctggccgaggaggccaccagaaagagagagctgagactgatgaagaacagagaggccgccaaggagtgcagaagaagaaagaaggagtacgtgaagtgcctggagagcagagtggccgtgctggaggtgcagaacaagaagctgatcgaggagctggagaccctgaaggacatctgcagccccaagaccgactactag

SEQ ID NO: 256898 - protein, 270 aa, Artificial Sequence
  derived and/or modified sequence
MWWHQHNLCFRRPIEEDYSSGDVEEKVAAIAETDESAESEGVIDSHKRREILSRRPSYRKILNELSSDVPGVPKIEEERSEEEGTPPSIATMAVPTSIYQTSTGQYIAIAQGGTIQISNPGSDGVQGLQALTMTNSGAPPPGATIVQYAAQSADGTQQFFVPGSQVVVQAATGDMPTYQIRAPTAALPQGVVMAASPGSLHSPQQLAEEATRKRELRLMKNREAAKECRRRKKEYVKCLESRVAVLEVQNKKLIEELETLKDICSPKTDY

SEQ ID NO: 256899 - DNA, 813 bp, Artificial Sequence
  derived and/or modified sequence
atgtggtggcaccagcacaacttgtgctttcgccgacctattgaggaagattacagcagcggcgatgttgaggaaaaagtggctgccattgctgagactgatgagtctgcagagagtgaaggggttatcgactcacacaagagaagggagatactcagtagaaggccctcttatcgcaagattctaaatgagctatcgtcagacgttccgggggtacctaagatcgaggaggagcggagcgaagaggaaggaaccccacctagcatcgccacgatggctgtccccacctccatttatcagactagcacgggacagtatattgccatcgcccagggtggtacaattcaaatttctaacccgggaagtgacggagttcagggtttgcaggcattgacaatgactaacagcggcgcaccgccaccaggtgcaaccatcgtgcagtatgctgcccagtccgcggatgggacacagcagtttttcgtccctggctcacaggtggtcgtgcaggcagctacaggcgacatgcccacctaccagattagagcgcccactgccgccttacctcagggagttgtaatggctgcatctcctggcagtctacacagtcctcagcagctcgcggaggaggccacacgtaaacgcgaactcaggctcatgaagaaccgcgaggcagccaaggaatgccgccgccgaaagaaggagtatgttaaatgcctcgaatctcgcgtggctgtcctggaggtgcaaaacaagaagttgatcgaggaactggagactctgaaggatatctgttcccctaaaaccgactactag

SEQ ID NO: 256900 - DNA, 813 bp, Artificial Sequence
  derived and/or modified sequence
atgtggtggcaccagcacaacctgtgcttcagaagacccatcgaggaggactacagcagtggagatgtggaggagaaggtggccgccatcgccgagacagatgagagcgctgagagcgagggcgtgattgacagccacaagaggcgggagatcctgagccggcggcccagctacaggaagatcctgaatgagctgagcagtgatgtgcctggggtgcccaagattgaggaggagaggtctgaggaggagggcaccccacccagcatcgccaccatggctgtgcccaccagcatctaccagaccagcacaggccagtacatcgccatcgcccagggcggcaccatccagatcagcaaccctggcagtgatggagtgcagggcctgcaggccctgaccatgaccaacagcggggcccctcctcctggggccaccatcgtgcagtatgctgcccagagcgcagatggcacccagcagttctttgtgcccggcagccaggtggtggtgcaggccgccaccggggacatgcccacctaccagatccgggcccccacagctgccctgccccagggcgtggtgatggccgccagccctggcagcctgcacagcccccagcagctggccgaggaggccaccaggaagcgggagctgcggctgatgaagaaccgggaggccgccaaggaatgtagaagaaggaagaaggagtatgtgaagtgcctggagagccgggtggccgtgctggaggtgcagaacaagaagctgattgaggagctggagaccctgaaggacatctgcagccccaagacagactactag

SEQ ID NO: 256901 - DNA, 813 bp, Artificial Sequence
  derived and/or modified sequence
atgtggtggcaccagcacaacctgtgcttccggcggcccatcgaggaggactattcgagcggggacgtagaggaaaaggtggccgccatcgccgagacagacgaaagcgctgaaagcgagggcgtgatcgattcacataagcgacgcgaaatactctcgaggcgccccagttatcggaagatcctgaacgagttaagcagtgatgtgccaggggtgcccaaaattgaggaagaaaggtccgaggaggaagggacacctccgtctatcgccactatggccgtaccaacctctatctaccaaaccagcaccggacagtacattgcgatagctcagggcggaacaatccagatatcaaaccccgggagcgacggggtacaagggcttcaggccctgactatgactaactcaggggccccgcccccgggagccaccatcgtgcagtacgccgctcagtctgcggatgggactcagcagttttttgtaccaggcagccaggtggttgtgcaagccgcaacgggagatatgccaacgtaccagatccgagcccctacagctgccttaccccagggggtggtgatggcagcatcccccggctccttacatagtccccagcagctggctgaggaggcgactcggaaacgtgagctgaggctcatgaagaaccgcgaggccgccaaagagtgcagacgtcggaagaaggaatatgtcaagtgtctggaatcaagggttgcagtcctcgaagtgcagaataaaaaactgatcgaagagctcgagaccttgaaagatatttgctcacccaagacagactactag

SEQ ID NO: 256902 - DNA, 813 bp, Artificial Sequence
  derived and/or modified sequence
atgtggtggcatcagcacaatctgtgctttcggaggccaatcgaagaagactatagttccggcgacgtggaagaaaaagtcgcggcaatagccgaaactgatgagtcggccgagagtgaaggggtcatcgatagccacaagcgtcgcgagatcctgtccaggaggccttcttataggaagattcttaacgagctcagctccgatgtgcccggagtgcctaaaatagaagaagagcgcagcgaggaggaaggaaccccccctagcatcgctaccatggctgtccctacctccatttatcagaccagcacaggccagtatatcgctatcgcccagggaggcaccatccaaatatcaaacccaggatcagacggtgtgcagggcctccaagctctgacaatgaccaatagcggtgccccaccgccaggtgccactattgtgcagtacgccgcacagtcagccgacggcacccagcagttttttgtgcccggtagccaggtggtagtgcaggctgctacaggggatatgccaacctatcaaattagggctccgaccgcagccttgcctcagggggtagtgatggccgcatcaccaggcagtctacatagtccccagcaacttgcggaggaagccacccgaaaaagggaactcaggctgatgaagaaccgcgaagcggctaaagaatgccgtcgcagaaaaaaagagtacgtgaagtgtttggagagccgagttgcggtgctggaggtgcagaataagaaactgattgaagaactcgaaactctgaaagacatttgttctccaaaaactgattattag

SEQ ID NO: 256903 - DNA, 2170 bp, Artificial Sequence
  derived and/or modified sequence
taaaccccatcgtgagggaacctagctacgggtcagagctagtccactaggtgctaatcaaatgctgtgttacaacactgtgaggttttcccagttataagtgtcactattagggttttttttaattgcaaagccaaataaggctgtcaattgcatcatcttaccttatttcttcagattaagtactgtttatagtgggatttttggtggatgtggtggcatcagcataatctatgtttcaggcgtcctatagaagaggattattcttcaggggatgtggaagaaaaggtagcagcaattgcagagacagatgaatctgcagaatcagaaggtgtaattgattctcataaacgtagagaaatcctttcacgaagaccctcttataggaaaatactgaatgaactgtcctctgatgtgcctggtgttcccaagattgaagaagagagatcagaggaagaaggaacaccacctagtattgctaccatggcagtaccaactagcatatatcagactagcacggggcaatacattgctatagcccaaggtggaacaatccagatttctaacccaggatctgatggtgttcagggactgcaggcattaacaatgacaaattcaggagctcctccaccaggtgctacaattgtacagtacgcagcacaatcagctgatggcacacagcagttctttgtcccaggcagccaggttgttgttcaagctgccactggtgacatgccaacttaccagatccgagctcctactgctgctttgccacagggagtggtgatggctgcatcgcccggaagtttgcacagtccccagcagctggcagaagaagcaacacgcaaacgagagctgaggctaatgaaaaacagggaagctgccaaagaatgtcgacgtcgaaagaaagaatatgtaaaatgtctggagagccgagttgcagtgctggaagtccagaacaagaagcttatagaggaacttgaaaccttgaaagacatttgttctcccaaaacagattactagaaatatttaactatgaactgaaggcagcatgtatagttgcttttgaaggaatacaatatatagctggcaagaatggtggcttcttttctttgtatcattcatcttcttctttaatcacttaacattcctaaaatgcttcactgtacgtagttaagtcgtagctataacttcaaattttttaaaagagacaaactgtaaaaaatgtgtgtattcttaaaatgcaatatttgtaaggcttgttccaatgccacatacttgcagctcccattctatgtgtcatcaatagtgtcctatgcaataaaattatttgcaggtctttaaatcattttaggaaaggatgatcaaaaataatgcatccagcagtacaataaaagtaaaccacaaaaaaatacctcaggaaagaatagaaagaaagtctatctaatgacatgcctatatgagaagaatagcctagatatgaatatatggcatttgcagatttttatattagttgctttgttaaaaaaaaaaagattgtattgctgtccttgaatgccatagtcaaagagagtttttaatagaaccatgttggttgcactttgtagtgtttggtgctcatttaaatatctgaacatttactacagtttttaactctactgtgtaatataaaagatcttgcagaagttcttagtgttggtttaatattacctaatgaaagtgatgacatattttttatatctggaatgagcctgttgggatcgcattgcataccttcggggtacaagtcagtttctacactgggtgctgatccttgcacgcgccctttctaccatctcacggtggggatggccgcagggctgtgcacccagaagaagatggctgttagcgtttcggccttcataatggcctgagactttctttctgtaggtggtctggagctgtccggctggtggccccctattttgccatttagcgaacaaccacaggaattttaaaaacaaaaacatcccaagattttttcatttcaaaatgcttcaaagtccacattagatcagatactccgctgtcggcacattcagctgaggttcattacaatcgagactgcaatgtgatctatgtttcatcttgtttttataataaaaagcttcagggaacaagcccaaagccc

SEQ ID NO: 256904 - DNA, 813 bp, Artificial Sequence
  derived and/or modified sequence
atgtggtggcaccagcacaacctgtgcttcagaagacccatcgaggaggactacagcagcggcgacgtggaggagaaggtggccgccatcgccgagaccgacgagagcgccgagagcgagggcgtgatcgacagccacaagagaagagagatcctgagcagaagacccagctacagaaagatcctgaacgagctgagcagcgacgtgcccggcgtgcccaagatcgaggaggagagaagcgaggaggagggcaccccccccagcatcgccaccatggccgtgcccaccagcatctaccagaccagcaccggccagtacatcgccatcgcccagggcggcaccatccagatcagcaaccccggcagcgacggcgtgcagggcctgcaggccctgaccatgaccaacagcggcgcccccccccccggcgccaccatcgtgcagtacgccgcccagagcgccgacggcacccagcagttcttcgtgcccggcagccaggtggtggtgcaggccgccaccggcgacatgcccacctaccagatcagagcccccaccgccgccctgccccagggcgtggtgatggccgccagccccggcagcctgcacagcccccagcagctggccgaggaggccaccagaaagagagagctgagactgatgaagaacagagaggccgccaaggagtgcagaagaagaaagaaggagtacgtgaagtgcctggagagcagagtggccgtgctggaggtgcagaacaagaagctgatcgaggagctggagaccctgaaggacatctgcagccccaagaccgactactag

SEQ ID NO: 256905 - protein, 219 aa, Artificial Sequence
  derived and/or modified sequence
MWWHQHNLCFRRPIEEDYSSGDVEEKVAAIAETDESAESEGVIDSHKRREILSRRPSYRKILNELSSDVPGVPKIEEERSEEEGTPPSIATMAVPTSIYQTSTGQYNEETELAPSHMAAATGDMPTYQIRAPTAALPQGVVMAASPGSLHSPQQLAEEATRKRELRLMKNREAAKECRRRKKEYVKCLESRVAVLEVQNKKLIEELETLKDICSPKTDY

SEQ ID NO: 256906 - DNA, 660 bp, Artificial Sequence
  derived and/or modified sequence
atgtggtggcatcagcacaacctatgttttagaaggcctatcgaggaggattattcgagcggtgacgtcgaggagaaggtagctgccatcgccgaaactgatgagagcgccgagagtgaaggcgtaatagattcacacaagcgtcgtgagattctcagtaggagaccaagctatcgcaagatcctgaacgagcttagtagcgatgttcctggggtccctaagatcgaagaggaacgatccgaggaggaagggaccccccctagcatcgctacaatggcggtgcccacctcaatttatcagacttccacaggtcagtacaacgaggaaaccgaactggccccgtctcacatggcagccgccacgggggatatgccaacttaccagatccgggcccccaccgccgcgttgccgcagggtgtcgtcatggcagcatccccagggtctctccactcacctcagcagctcgccgaggaggctaccaggaagcgagaactacgtctgatgaaaaatcgggaggctgccaaggaatgtcgccgcaggaagaaggagtacgtcaagtgtcttgagtcaagagtcgccgtactcgaggtgcagaacaagaagttaattgaggagctggagacgttgaaggatatatgttctccgaaaacggactactag

SEQ ID NO: 256907 - DNA, 660 bp, Artificial Sequence
  derived and/or modified sequence
atgtggtggcaccagcacaacctgtgcttcagaagacccatcgaggaggactacagcagtggagatgtggaggagaaggtggccgccatcgccgagacagatgagagcgctgagagcgagggcgtgattgacagccacaagaggcgggagatcctgagccggcggcccagctacaggaagatcctgaatgagctgagcagtgatgtgcctggggtgcccaagattgaggaggagaggtctgaggaggagggcaccccacccagcatcgccaccatggctgtgcccaccagcatctaccagaccagcacaggccagtacaatgaggagacagagctggcccccagccacatggctgctgccactggagacatgcccacctaccagatccgggcccccacagctgccctgccccagggcgtggtgatggccgccagccctggcagcctgcacagcccccagcagctggccgaggaggccaccaggaagcgggagctgcggctgatgaagaaccgggaggccgccaaggagtgcagaagaaggaagaaggagtatgtgaagtgcctggagagccgggtggccgtgctggaggtgcagaacaagaagctgattgaggagctggagaccctgaaggacatctgcagccccaagacagactactag

SEQ ID NO: 256908 - DNA, 660 bp, Artificial Sequence
  derived and/or modified sequence
atgtggtggcaccagcacaacctgtgcttccggcggcccatcgaggaggattactcatccggcgacgtggaggagaaagtggccgccatcgccgagaccgatgaatctgccgaaagcgaaggggtgatcgattcccacaagagaagggaaatattgagcaggagaccctcgtaccgcaagatactgaatgagttatcctcagacgtgccaggggtcccaaagatagaggaagagcgctccgaggaggaaggaacccccccttccatcgccacgatggcagtgcctaccagtatctaccagacgtccaccgggcagtataatgaagagacagagctggcaccctcccatatggccgctgccaccggtgatatgccaacgtaccagatccgagctcctactgccgctctaccccagggtgtggtcatggcagcctctcctgggtctctgcattcgcctcagcagttagctgaggaagctaccaggaagagggagttgagactcatgaagaaccgtgaggcagctaaggaatgtcgacggagaaagaaagaatacgtgaagtgcctggagtcaagagtcgctgtccttgaagtacaaaataaaaagcttattgaagagttggaaacactgaaagatatctgcagtcccaagactgattattag

SEQ ID NO: 256909 - DNA, 660 bp, Artificial Sequence
  derived and/or modified sequence
atgtggtggcaccagcacaatctatgctttagaagaccgattgaagaagattacagttccggagacgtcgaggaaaaggtagctgcaattgcggaaaccgacgaatctgccgaaagcgagggggtgatcgattcacacaaacggagggagattcttagtcggcgtccgtcctaccgcaagatactcaacgagctctccagcgacgtacctggagtgccaaaaatcgaggaagaaagaagtgaggaggaaggcactcctccatccatcgctacaatggccgtgcctactagtatataccaaacctctacaggtcagtataatgaagaaactgaactcgcgccttcgcacatggctgcggctacaggggatatgcccacctaccagattcgcgctccaaccgctgcccttcctcagggggtcgtgatggccgcatcccccggaagcctgcactctccacagcagctcgccgaggaagctacccgtaagcgagagctgaggctgatgaagaatagggaggctgccaaggagtgcagacgtaggaagaaagaatacgtgaaatgtctggagtctagagtagccgtattagaggttcagaataagaaacttattgaggagctggagactctaaaggatatctgctccccaaagacggattattag

SEQ ID NO: 256910 - DNA, 660 bp, Artificial Sequence
  derived and/or modified sequence
atgtggtggcatcagcataatctatgtttcaggcgtcctatagaagaggattattcttcaggggatgtggaagaaaaggtagcagcaattgcagagacagatgaatctgcagaatcagaaggtgtaattgattctcataaacgtagagaaatcctttcacgaagaccctcttataggaaaatactgaatgaactgtcctctgatgtgcctggtgttcccaagattgaagaagagagatcagaggaagaaggaacaccacctagtattgctaccatggcagtaccaactagcatatatcagactagcacggggcaatacaatgaggaaactgaacttgccccaagtcacatggctgctgccactggtgacatgccaacttaccagatccgagctcctactgctgctttgccacagggagtggtgatggctgcatcgcccggaagtttgcacagtccccagcagctggcagaagaagcaacacgcaaacgagagctgaggctaatgaaaaacagggaagctgccaaagaatgtcgacgtcgaaagaaagaatatgtaaaatgtctggagagccgagttgcagtgctggaagtccagaacaagaagcttatagaggaacttgaaaccttgaaagacatttgttctcccaaaacagattactag

SEQ ID NO: 256911 - DNA, 660 bp, Artificial Sequence
  derived and/or modified sequence
atgtggtggcaccagcacaacctgtgcttcagaagacccatcgaggaggactacagcagcggcgacgtggaggagaaggtggccgccatcgccgagaccgacgagagcgccgagagcgagggcgtgatcgacagccacaagagaagagagatcctgagcagaagacccagctacagaaagatcctgaacgagctgagcagcgacgtgcccggcgtgcccaagatcgaggaggagagaagcgaggaggagggcaccccccccagcatcgccaccatggccgtgcccaccagcatctaccagaccagcaccggccagtacaacgaggagaccgagctggcccccagccacatggccgccgccaccggcgacatgcccacctaccagatcagagcccccaccgccgccctgccccagggcgtggtgatggccgccagccccggcagcctgcacagcccccagcagctggccgaggaggccaccagaaagagagagctgagactgatgaagaacagagaggccgccaaggagtgcagaagaagaaagaaggagtacgtgaagtgcctggagagcagagtggccgtgctggaggtgcagaacaagaagctgatcgaggagctggagaccctgaaggacatctgcagccccaagaccgactactag

SEQ ID NO: 256912 - DNA, 903 bp, Artificial Sequence
  derived and/or modified sequence
atggaagacatcctggaagagctgctgcagcaccgcgagcccaaggcactgcaactttaccttcgaaaggcactctccaatagtcttcaccccctgggtaagctgctccggacactcatgctgacctttcaggcaacttacgccggagttggagccaacaagcatttacaggagcttgcccaagaagaagtgaagcaacacgcccaggaactatgggcggcataccggggactgctaagggtcgccctggaaaggaaggggcaggctctggaggaagacgaggataccgagactcgagatctacaagtccacggtctcgtgcttccactgatgcttcctagcttctacagcgaattgtttactctctacctgctgctgcacgaacgagaggacagcttctattcacaggggatcgccaatctttctctctttccagatactcagctcctggaattccttgatgtgcagaaacacctgtggccgttaaaagatctcacactgacaagcaatcaacgatatagcttagtgagagataaatgttttcttagtgcaaccgagtgcctccaaaaaattatgaccacggtggatccaagagagaaactagaggtcttagaacggacatatggcgaaattgaaggaactgtaagccgcgttctgggacgggaatataagcttccaatggatgatcttctccccctcctgatttatgtcgtatcgcgcgctaggatccagcatctgggagcagaaattcacctgatccgtgatatgatggaccctaatcacaccggcggcctttatgactttctgctgactgccttggaatcctgttacgagcacattcagaaagaggacatgcgcctgcaccgccttccgggccactggcactcacgcgagctttggtag

SEQ ID NO: 256913 - DNA, 903 bp, Artificial Sequence
  derived and/or modified sequence
atggaggacatcctggaggagctgctgcagcaccgggagcccaaggccctgcagctgtacctgaggaaggccctgagcaacagcctgcaccccctgggcaagctgctgcggaccctgatgctgaccttccaggccacctacgccggcgtgggcgccaacaagcacctgcaggagctggcccaggaggaggtgaagcagcacgcccaggagctgtgggccgcctaccggggcctgctgcgggtggccctggagaggaagggccaggccctggaggaggatgaggacacagagacccgggacctgcaggtgcacggcctggtgctgcccctgatgctgcccagcttctacagcgagctgttcaccctgtacctgctgctgcacgagcgggaggacagcttctacagccagggcatcgccaacctgagcctcttcccagacacccagctgctggagttcctggatgtgcagaagcacctgtggcccctgaaggacctgaccctgaccagcaaccagcgctacagcctggtgcgggacaagtgcttcctgagcgccacagagtgcctgcagaagatcatgaccaccgtggacccccgggagaagctggaggtgctggagaggacctacggggagattgagggcaccgtgtcccgggtgctgggccgggagtacaagctgcccatggatgacctgctgcccctgctgatctacgtggtgtcccgggcccgcatccagcacctgggcgctgagatccacctgatccgggacatgatggaccccaaccacactggaggcctgtatgacttcctgctgacagccctggagagctgctatgagcacatccagaaggaggacatgaggctgcaccggctgcccggccactggcacagccgggagctgtggtag

SEQ ID NO: 256914 - DNA, 903 bp, Artificial Sequence
  derived and/or modified sequence
atggaggacatcctggaggagctgctgcagcaccgggagcccaaggcgcttcagttgtacctcaggaaggcattgtccaattcacttcatcctctggggaagctgttacggacccttatgcttaccttccaggccacgtacgctggtgtgggagccaataaacatcttcaggagctcgctcaagaagaagtgaagcagcatgcccaagagctctgggccgcgtaccgaggcctcctgagagtagccctggaacgcaaaggacaggcattggaggaagacgaggatacagaaactagagacttgcaggtgcacggcttggtgttgccgctgatgctgcctagtttctacagtgagctctttacgctgtatctgctcctgcacgagcgtgaagattcgttctattcacaggggattgccaatttgtccctgtttcctgatactcagctgttagagttcctggatgtccaaaagcacctttggcctctgaaagatttaactttaacctcgaatcagcggtattcacttgtgagggataaatgcttcctgtccgctacggaatgtctgcagaaaattatgactaccgttgatccgagagaaaagctagaagtgttggagcggacatacggcgagatcgagggcaccgtgtccagggtcttgggcagggaatacaaactgccgatggatgacctgctgcccttgttgatatatgtggtctccagagccaggattcagcatctcggcgcagagattcacctgattcgtgatatgatggatcccaatcacaccgggggcctctatgatttcctgctgacagccctcgagagctgttatgagcacattcaaaaagaggatatgcgccttcaccgtctccccggccactggcactcccgcgagctatggtag

SEQ ID NO: 256915 - DNA, 903 bp, Artificial Sequence
  derived and/or modified sequence
atggaggacatcctggaggaactgctacagcaccgggagccaaaggctcttcaactgtatctgaggaaggctttgtccaatagtttgcacccgctgggcaaacttttgagaactttgatgctgacttttcaggccacatatgccggagtgggggcaaacaagcatctgcaagagctggcacaggaagaggtgaagcagcatgcacaggagttgtgggcagcatacagagggctgttgcgggtggctctggagcggaaaggccaagccctcgaggaggatgaggatacagaaactcgagacttgcaggtgcacggcctggtgctgccactcatgctgccctccttttactccgagctgtttacgctgtacctgctgttacacgagagagaagattctttttacagccagggcatcgcaaacctgtctctcttccctgacacacagttactcgagtttttggatgtccaaaagcacctgtggccactgaaggatcttaccctgactagtaaccagagatattcactggtcagagacaagtgttttttgtctgccacagaatgtttacagaagattatgaccactgtggatccccgagagaagctggaagtgctcgaacgaacctatggggaaatagaggggacagttagtcgcgtgctcggtcgtgaatataaattacccatggacgacttgctacccttgctgatttatgtggtgtcacgagctcggattcaacatttaggagcagagatccacctcatcagagatatgatggaccctaatcacacagggggattatatgacttcctcctgacagctcttgaatcctgctacgaacacatccagaaagaggacatgagactccaccgtttaccagggcattggcatagccgggaactatggtag

SEQ ID NO: 256916 - DNA, 903 bp, Artificial Sequence
  derived and/or modified sequence
atggaggacatcctggaggagctgctgcagcacagagagcccaaggccctgcagctgtacctgagaaaggccctgagcaacagcctgcaccccctgggcaagctgctgagaaccctgatgctgaccttccaggccacctacgccggcgtgggcgccaacaagcacctgcaggagctggcccaggaggaggtgaagcagcacgcccaggagctgtgggccgcctacagaggcctgctgagagtggccctggagagaaagggccaggccctggaggaggacgaggacaccgagaccagagacctgcaggtgcacggcctggtgctgcccctgatgctgcccagcttctacagcgagctgttcaccctgtacctgctgctgcacgagagagaggacagcttctacagccagggcatcgccaacctgagcctgttccccgacacccagctgctggagttcctggacgtgcagaagcacctgtggcccctgaaggacctgaccctgaccagcaaccagagatacagcctggtgagagacaagtgcttcctgagcgccaccgagtgcctgcagaagatcatgaccaccgtggaccccagagagaagctggaggtgctggagagaacctacggcgagatcgagggcaccgtgagcagagtgctgggcagagagtacaagctgcccatggacgacctgctgcccctgctgatctacgtggtgagcagagccagaatccagcacctgggcgccgagatccacctgatcagagacatgatggaccccaaccacaccggcggcctgtacgacttcctgctgaccgccctggagagctgctacgagcacatccagaaggaggacatgagactgcacagactgcccggccactggcacagcagagagctgtggtag

SEQ ID NO: 256917 - protein, 367 aa, Artificial Sequence
  derived and/or modified sequence
MAKPQVVVAPVLMSKLSVNAPEFYPSGYSSSYTESYEDGCEDYPTLSEYVQDFLNHLTEQPGSFETEIEQFAETLNGCVTTDDALQELVELIYQQATSIPNFSYMGARLCNYLSHHLTISPQSGNFRQLLLQRCRTEYEVKDQAAKGDEVTRKRFHAFVLFLGELYLNLEIKGTNGQVTRADILQVGLRELLNALFSNPMDDNLICAVKLLKLTGSVLEDAWKEKGKMDMEEIIQRIENVVLDANCSRDVKQMLLKLVELRSSNWGRVHATSTYREATPENDPNYFMNEPTFYTSDGVPFTAADPDYQEKYQELLEREDFFPDYEENGTDLSGAGDPYLDDIDDEMDPEIEEAYEKFCLESERKRKQ

SEQ ID NO: 256918 - protein, 400 aa, Artificial Sequence
  derived and/or modified sequence
MSDGFDRAPEQTRPLRAPPSSQDKIPQQNSESAMAKPQVVVAPVLMSKLSVNAPEFYPSGYSSSYTESYEDGCEDYPTLSEYVQDFLNHLTEQPGSFETEIEQFAETLNGCVTTDDALQELVELIYQQATSIPNFSYMGARLCNYLSHHLTISPQSGNFRQLLLQRCRTEYEVKDQAAKGDEVTRKRFHAFVLFLGELYLNLEIKGTNGQVTRADILQVGLRELLNALFSNPMDDNLICAVKLLKLTGSVLEDAWKEKGKMDMEEIIQRIENVVLDANCSRDVKQMLLKLVELRSSNWGRVHATSTYREATPENDPNYFMNEPTFYTSDGVPFTAADPDYQEKYQELLEREDFFPDYEENGTDLSGAGDPYLDDIDDEMDPEIEEAYEKFCLESERKRKQ

SEQ ID NO: 256919 - protein, 351 aa, Artificial Sequence
  derived and/or modified sequence
MSDGFDRAPEQTRPLRAPPSSQDKIPQQNSESAMAKPQVVVAPVLMSKLSVNAPEFYPSGYSSSYTESYEDGCEDYPTLSEYVQDFLNHLTEQPGSFETEIEQFAETLNGCVTTDDALQELVELIYQQATSIPNFSYMGARLCNYLSHHLTISPQSGNFRQLLLQRCRTEYEVKDQAAKGDEVTRKRFHAFVLFLGELYLNLEIKGTNGQVTRADILQVGLRELLNALFSNPMDDNLICAVKLLKLTGSVLEDAWKEKGKMDMEEIIQRIENVVLDANCSRDVKQMLLKLVELRSSNWGRVHATSTYREATPENDPNYFMNEPTFYTSDGVPFTAADPDTWMILMMRWTQR

SEQ ID NO: 256920 - DNA, 1203 bp, Artificial Sequence
  derived and/or modified sequence
atgtctgacggttttgacagagcaccagagcagacacgcccactgagggcacctcctagttcacaggataagatcccccagcagaacagcgagtccgctatggccaagccccaggtcgttgtggctcccgtactgatgagcaagctgtccgttaatgctcccgaattctatccctccggctactcgtcttcatatactgaaagctacgaagacggctgcgaagactaccctaccttgtcagagtacgttcaggactttctcaatcatcttactgagcagcctggcagtttcgagacagagattgaacaatttgctgagaccctgaatggttgtgtgaccacagatgacgcacttcaggagttggtggagcttatttatcaacaggcaactagcattcccaacttctcttatatgggcgcccggttatgcaattacctgtcgcaccacctcacaatctccccccagtcaggcaacttcagacagttacttttgcagcggtgtcgaactgaatatgaggtcaaggatcaggccgccaaaggtgatgaagtgactcgcaaaaggtttcacgccttcgtccttttcctgggagaattatatctgaatctggagataaagggtaccaatggtcaggtaacccgggccgatatcctccaggtgggattgagagagttactgaacgctctcttcagcaatccaatggacgacaatttaatttgcgctgtgaaactgcttaaactcacaggaagcgtgttagaagacgcctggaaagagaaaggcaagatggacatggaagagatcattcaacggattgagaatgttgtgttagacgccaattgctcacgggacgttaaacagatgctgctaaagcttgtggaactcaggtcttccaattggggccgagtgcatgcaacgtctacttacagagaggcgaccccagagaatgaccccaactacttcatgaacgagcccacgttctacacctccgatggagtgcccttcactgctgccgaccccgactaccaggagaagtatcaggagttactagagcgagaggacttctttcccgactatgaagagaacggaactgatctgtccggcgctggtgatccctaccttgatgatattgacgatgagatggacccagagatcgaagaagcttatgaaaaattttgtctggagagcgaacgcaagcggaagcagtag

SEQ ID NO: 256921 - DNA, 1056 bp, Artificial Sequence
  derived and/or modified sequence
atgagtgacggttttgatcgagctcctgagcagacaaggccgttgagggctcccccttccagccaggacaagatcccccagcagaatagtgagagcgcaatggctaagcctcaggttgtggtcgccccggttctaatgtccaagctctccgtgaacgcacctgaattttatccaagtggatattcttcttcgtatacagagtcttacgaggacgggtgtgaggattatcctacactgtcagaatacgtgcaggatttcttaaatcacctcactgagcagcctggatccttcgagacggaaatcgaacagtttgctgaaacccttaatgggtgtgtcactaccgacgatgcactgcaggagctggtggagctgatttatcaacaggctacgtccatccccaacttctcttacatgggcgctaggctgtgcaattacttatctcatcatctgaccattagtccacagtccggtaactttcgccaactgctcctgcagagatgcaggacggagtatgaagtcaaggatcaggccgccaagggagatgaagtgacacggaaacggtttcatgcgtttgtcctgttcctgggggagctctatttaaacctggaaatcaaagggaccaatgggcaggtaacacgcgcagacattctccaggtagggttgcgggagctgttaaacgcccttttcagcaatccaatggacgacaatctgatctgtgctgtgaagttattaaaacttactggatcagtactcgaggatgcttggaaggaaaaaggcaagatggacatggaggagatcatccagcgcatcgagaatgtggttctcgacgctaactgctcgagagacgtgaaacagatgctgctgaaactggtcgaactgcgctcttctaactggggtcgcgtccacgcaacatctacctaccgcgaggcaacccctgagaatgaccccaactactttatgaacgaacctacattctacacgtctgatggagtccccttcactgccgccgatccagacacgtggatgattctgatgatgagatggacccaaagatag

SEQ ID NO: 256922 - DNA, 1203 bp, Artificial Sequence
  derived and/or modified sequence
atgtctgatggctttgaccgggcccctgagcagacccggcccctgcgggccccacccagcagccaggacaagatcccccagcagaacagcgagagcgccatggccaagccccaggtggtggtggcccctgtgctgatgagcaagctgtctgtgaatgcccctgagttctaccccagcggctacagcagcagctacacagagagctatgaagatggctgtgaggactaccccaccctgtctgaatatgtgcaggacttcctgaaccacctgacagagcagcccggcagctttgaaacagaaattgagcagtttgctgagaccctgaatggctgtgtgaccacagatgatgccctgcaggagctggtggagctgatctaccagcaggccaccagcatccccaacttctcctacatgggcgcccggctgtgcaactacctgagccaccacctgaccatcagcccccagagcggcaacttccggcagctgctgctgcagcgctgcaggacagaatatgaggtgaaggaccaggccgccaagggagatgaggtgaccaggaagcgcttccacgcctttgtgctcttcctgggggagctgtacctgaacctggagatcaagggcaccaacggccaggtgaccagggctgacatcctgcaggtgggcctgcgggagctgctgaatgccctcttcagcaaccccatggatgacaacctgatctgtgctgtgaagctgctgaagctgactggatctgtgctggaggatgcctggaaggagaagggcaagatggacatggaggagatcatccagagaattgaaaatgtggtgctggatgccaactgcagcagagatgtgaagcagatgctgctgaagctggtggagctgcggagcagcaactggggccgggtgcacgccaccagcacctaccgggaggccaccccagaaaatgaccccaactacttcatgaatgagcccaccttctacaccagtgatggagtgcccttcaccgctgctgaccctgactaccaggagaagtaccaggagctgctggagcgggaggacttcttcccagactatgaagaaaatggaacagacctgtctggagctggggacccctacctggatgacattgatgatgagatggaccctgagattgaggaggcctatgagaagttctgcctggagagcgagaggaagaggaagcagtag

SEQ ID NO: 256923 - DNA, 1056 bp, Artificial Sequence
  derived and/or modified sequence
atgtctgatggctttgaccgggcccctgagcagacccggcccctgcgggccccacccagcagccaggacaagatcccccagcagaacagcgagagcgccatggccaagccccaggtggtggtggcccctgtgctgatgagcaagctgtctgtgaatgcccctgagttctaccccagcggctacagcagcagctacacagagagctatgaagatggctgtgaggactaccccaccctgtctgaatatgtgcaggacttcctgaaccacctgacagagcagcccggcagctttgaaacagaaattgagcagtttgctgagaccctgaatggctgtgtgaccacagatgatgccctgcaggagctggtggagctgatctaccagcaggccaccagcatccccaacttctcctacatgggcgcccggctgtgcaactacctgagccaccacctgaccatcagcccccagagcggcaacttccggcagctgctgctgcagcgctgcaggacagaatatgaggtgaaggaccaggccgccaagggagatgaggtgaccaggaagcgcttccacgcctttgtgctcttcctgggggagctgtacctgaacctggagatcaagggcaccaacggccaggtgaccagggctgacatcctgcaggtgggcctgcgggagctgctgaatgccctcttcagcaaccccatggatgacaacctgatctgtgctgtgaagctgctgaagctgactggatctgtgctggaggatgcctggaaggagaagggcaagatggacatggaggagatcatccagagaattgaaaatgtggtgctggatgccaactgcagcagagatgtgaagcagatgctgctgaagctggtggagctgcggagcagcaactggggccgggtgcacgccaccagcacctaccgggaggccaccccagaaaatgaccccaactacttcatgaatgagcccaccttctacaccagtgatggagtgcccttcaccgctgctgaccctgacacctggatgatcctgatgatgcgctggacccagaggtag

SEQ ID NO: 256924 - DNA, 1203 bp, Artificial Sequence
  derived and/or modified sequence
atgagcgacggcttcgaccgggcccccgagcagacccggcccctgcgggctccccctagttctcaggacaagatcccacagcagaattccgagtctgctatggccaagccacaagtggttgttgcccctgtgctcatgtccaaacttagcgtgaatgcccctgagttttacccgagtggctattctagttcctacactgagtcgtacgaggatggctgcgaagattatcctacactaagcgagtacgtgcaggatttcctaaatcatttgacagaacaaccaggaagcttcgagacagaaattgagcagtttgccgagaccctgaatggctgcgtcaccacagacgacgccctccaggagctggttgagctgatatatcagcaagccaccagcatccctaattttagctacatgggagctcgtctttgcaactatctatcacatcatttaaccatctccccacagagcgggaattttaggcagctgttgctccagcgatgtaggaccgaatacgaggttaaagatcaggctgcgaagggtgatgaggtgacaaggaaacgatttcacgcgtttgtgctattcctgggtgagctctacctaaacctggagataaagggcacgaatggccaggtgactagggctgacatcctccaggtcggattgagggaactgctaaatgcattgttctcaaatccgatggacgacaacctgatttgcgctgtgaagttgctcaagctcaccggcagcgtgctggaggatgcttggaaggagaaagggaagatggacatggaggagattattcaaagaattgagaacgttgtgctggacgcaaattgttccagggacgttaaacagatgctgctgaaattagtcgaacttcgctcttcgaactgggggcgcgttcacgccactagtacctacagggaggcaacccccgagaacgatccaaattattttatgaatgaacccactttttataccagcgacggtgttccttttactgccgcagaccctgattaccaggaaaagtaccaggaactcctggagcgggaggattttttccccgactatgaagagaacggcactgatttaagcggagccggcgatccatatttggatgatatagatgacgaaatggaccccgagatcgaagaagcctacgaaaaattctgcctggagtccgagaggaagaggaaacagtag

SEQ ID NO: 256925 - DNA, 1056 bp, Artificial Sequence
  derived and/or modified sequence
atgagcgacggcttcgaccgggcccccgagcagacccggcccctgagggctccaccttccagccaagataaaattcctcagcagaactccgaaagcgcaatggcaaagcctcaggtggtcgttgctccagtgctcatgtccaagcttagcgtgaatgcccctgaattttatccatctggttatagttcttcttataccgagtcttacgaggacggttgtgaagactacccaactctcagtgagtatgtgcaggatttcctgaatcatctcacagagcagcccgggagttttgagaccgaaatcgaacagtttgccgaaactctcaacggatgtgttacaacagatgatgctttgcaggaattggttgagctcatatatcaacaggcgacttctatcccaaatttctcctacatgggagcacggctgtgcaactatctcagccaccacttaacgatctccccacaatcgggtaatttccgccagctgctgctgcaaaggtgtcgtacagaatatgaagttaaggaccaagcagcaaagggggacgaagtcacccgcaagaggtttcacgcctttgttttattcttaggggaattatacctaaacctcgaaattaagggcaccaacggacaggttacccgcgccgatatcctacaggtgggcctgagagagctgcttaatgccctgttctccaatccgatggacgataacctgatttgtgccgtaaagctgctgaaactaaccggcagcgtgctggaagacgcgtggaaggagaaagggaagatggacatggaggaaatcatccagagaatcgagaatgtggtgctcgatgcgaattgcagccgcgacgtcaaacagatgctattaaagctggtggaactgaggtccagcaactggggacgggtgcacgctacgtctacttacagagaggcaaccccagaaaatgacccgaactattttatgaatgaacccactttctacacttctgatggggttcctttcactgcagctgaccctgacacgtggatgattctgatgatgaggtggacccagcgttag

SEQ ID NO: 256926 - DNA, 1734 bp, Artificial Sequence
  derived and/or modified sequence
gttttgggggagaactggaaagccgagggtagccgagcggggcgggcgctctggagcggcgggtgctcgggctgccgtccgctccgccagaagcaccgagcagccgagccggggcccgccgccctcctcctccatgaggcccgagtgaggcgcggcggctatagccgacccgcggcgccttccccccgcgtcctatcgcgagcgcagcggcagcggcccctggaggaggaggcggaggaggaggagcatgtcggacggtttcgatcgggccccagagcaaacgaggcccctgagagctccacctagttcacaggataaaatcccacagcagaactcggagtcagcaatggctaagccccaggtggttgtagctcctgtattaatgtctaagctgtctgtgaatgcccctgaattttacccttcaggttattcttccagttacacagaatcctatgaggatggttgtgaggattatcctactctatcagaatatgttcaggattttttgaatcatcttacagagcagcctggcagttttgaaactgaaattgaacagtttgcagagaccctgaatggttgtgttacaacagatgatgctttgcaagaacttgtggaactcatctatcaacaggccacatctatcccaaatttctcttatatgggagctcgcctgtgtaattacctgtcccatcatctgacaattagcccacagagtggcaacttccgccaattgctacttcaaagatgtcggactgaatatgaagttaaagatcaagctgcaaaaggggatgaagttactcgaaaacgatttcatgcatttgtactctttctgggagaactttatcttaacctggagatcaagggaacaaatggacaggttacaagagcagatattcttcaggttggtcttcgagaattgctgaatgccctgttttctaatcctatggatgacaatttaatttgtgcagtaaaattgttaaagttgacaggatcagttttggaagatgcttggaaggaaaaaggaaagatggatatggaagaaattattcagagaattgaaaacgttgtcctagatgcaaactgcagtagagatgtaaaacagatgctcttgaagcttgtagaactccggtcaagtaactggggcagagtccatgcaacttcaacatatagagaagcaacaccagaaaatgatcctaactactttatgaatgaaccaacattttatacatctgatggtgttcctttcactgcagctgatccagattaccaagagaaataccaagaattacttgaaagagaggacttttttccagattatgaagaaaatggaacagatttatccggggctggtgatccatacttggatgatattgatgatgagatggacccagagatagaagaagcttatgaaaagttttgtttggaatcagagcgtaagcgaaaacagtaaagttaaatttcagcatatcagttttataaagcagtttaggtatggtgatttagcagaacacaagagagcaagaaaatgtcacatctataccaaattaaggatgttgagttatgttactaatgtatgcaactttaattttgtttaacactatctgccaaaataaactttattccctataacttaaaatgtgtatatatatataatagtttattatgtacagttaattctactgttttggctgcaataaaatcgattttgaaataaatgaaatgttgaaaattttg

SEQ ID NO: 256927 - DNA, 752 bp, Artificial Sequence
  derived and/or modified sequence
tggggggaggggccgggtgcgcggtctcggagttcggggtcccgggaggaagtaaaaatcgcctcccctcagcagccctctaaagcgagaccctagcgagtaaccacctcttttccaccgacccctttaaaacgacagagaggaaaaaagctcgcaagcactcatttgagaggcagagcaaacgaggcccctgagagctccacctagttcacaggataaaatcccacagcagaactcggagtcagcaatggctaagccccaggtggttgtagctcctgtattaatgtctaagctgtctgtgaatgcccctgaattttacccttcaggttattcttccagttacacagaatcctatgaggatggttgtgaggattatcctactctatcagaatatgttcaggattttttgaatcatcttacagagcagcctggcagttttgaaactgaaattgaacagtttgcagagaccctgaatggttgtgttacaacagatgatgctttgcaagaacttgtggaactcatctatcaacaggccacatctatcccaaatttctcttatatgggagctcgcctgtgtaattacctgtcccatcatctgacaattagcccacagagtggcaacttccgccaattgctacttcaaagatgtcggactgaatatgaagttaaagatcaagctgcaaaaggggatgaagttactcgaaaacgatttcatgcatttgtactctttctgggagaactttatcttaacc

SEQ ID NO: 256928 - DNA, 706 bp, Artificial Sequence
  derived and/or modified sequence
caagatgaaaaagagggcagagttacactgaaagagcaaacgaggcccctgagagctccacctagttcacaggataaaatcccacagcagaactcggagtcagcaatggctaagccccaggtggttgtagctcctgtattaatgtctaagctgtctgtgaatgcccctgaattttacccttcaggttattcttccagttacacagaatcctatgaggatggttgtgaggattatcctactctatcagaatatgttcaggattttttgaatcatcttacagagcagcctggcagttttgaaactgaaattgaacagtttgcagagaccctgaatggttgtgttacaacagatgatgctttgcaagaacttgtggaactcatctatcaacaggccacatctatcccaaatttctcttatatgggagctcgcctgtgtaattacctgtcccatcatctgacaattagcccacagagtggcaacttccgccaattgctacttcaaagatgtcggactgaatatgaagttaaagatcaagctgcaaaaggggatgaagttactcgaaaacgatttcatgcatttgtactctttctgggagaactttatcttaacctggagatcaagggaacaaatggacaggttacaagagcagatattcttcaggttggtcttcgagaattgctgaatgccctgttttctaatcctatgg

SEQ ID NO: 256929 - DNA, 1603 bp, Artificial Sequence
  derived and/or modified sequence
ggaaagccgagggtagccgagcggggcgggcgctctggagcggcgggtgctcgggctgccgtccgctccgccagaagcaccgagcagccgagccggggcccgccgccctcctcctccatgaggcccgagtgaggcgcggcggctatagccgacccgcggcgccttccccccgcgtcctatcgcgagcgcagcggcagcggcccctggaggaggaggcggaggaggaggagcatgtcggacggtttcgatcgggccccagagcaaacgaggcccctgagagctccacctagttcacaggataaaatcccacagcagaactcggagtcagcaatggctaagccccaggtggttgtagctcctgtattaatgtctaagctgtctgtgaatgcccctgaattttacccttcaggttattcttccagttacacagaatcctatgaggatggttgtgaggattatcctactctatcagaatatgttcaggattttttgaatcatcttacagagcagcctggcagttttgaaactgaaattgaacagtttgcagagaccctgaatggttgtgttacaacagatgatgctttgcaagaacttgtggaactcatctatcaacaggccacatctatcccaaatttctcttatatgggagctcgcctgtgtaattacctgtcccatcatctgacaattagcccacagagtggcaacttccgccaattgctacttcaaagatgtcggactgaatatgaagttaaagatcaagctgcaaaaggggatgaagttactcgaaaacgatttcatgcatttgtactctttctgggagaactttatcttaacctggagatcaagggaacaaatggacaggttacaagagcagatattcttcaggttggtcttcgagaattgctgaatgccctgttttctaatcctatggatgacaatttaatttgtgcagtaaaattgttaaagttgacaggatcagttttggaagatgcttggaaggaaaaaggaaagatggatatggaagaaattattcagagaattgaaaacgttgtcctagatgcaaactgcagtagagatgtaaaacagatgctcttgaagcttgtagaactccggtcaagtaactggggcagagtccatgcaacttcaacatatagagaagcaacaccagaaaatgatcctaactactttatgaatgaaccaacattttatacatctgatggtgttcctttcactgcagctgatccagatacttggatgatattgatgatgagatggacccagagatagaagaagcttatgaaaagttttgtttggaatcagagcgtaagcgaaaacagtaaagttaaatttcagcatatcagttttataaagcagtttaggtatggtgatttagcagaacacaagagagcaagaaaatgtcacatctataccaaattaaggatgttgagttatgttactaatgtatgcaactttaattttgtttaacactatctgccaaaataaactttattccctataacttaaaatgtgtatatatatataatagtttattatgtacagttaattctactgttttggctgcaataaaatcgattttgaaata

SEQ ID NO: 256930 - DNA, 1203 bp, Artificial Sequence
  derived and/or modified sequence
atgagtgacggctttgaccgtgcccctgagcaaaccaggcctttacgggctccaccatcctcccaggacaagatccctcagcagaacagtgagtccgctatggcaaaaccccaggtcgttgtggcccctgtcttaatgagtaagctgtccgtcaatgcgccagagttttacccttccggatactcgagtagctacacagaaagttatgaggatgggtgcgaggattatcccaccttatcagaatatgtccaggatttccttaaccacctgaccgaacagcctggttcctttgagaccgaaatagagcagtttgcagagacactaaatgggtgcgtgaccaccgatgatgctttgcaggaacttgtcgaactgatctatcagcaagctacttcaatccctaatttctcgtacatgggtgcaaggctgtgtaattacttgtcacaccacctgactatcagccctcagtctgggaattttcgacagctgctgctgcagagatgtagaaccgagtatgaggtcaaagatcaagcagctaaaggcgacgaagtgaccagaaaacgcttccatgcttttgttctttttttaggcgagctctacctcaaccttgagattaagggaacgaacggccaggttactagggcagacattttgcaagtcggattgagggaactgctgaatgctctgttctccaaccctatggacgacaacctgatatgtgcagtgaagctgttgaagctcacaggctccgtgctcgaagacgcgtggaaggaaaaagggaaaatggatatggaggaaatcatccagcggattgaaaacgtggtgctagacgccaattgctcccgggatgtcaagcagatgctgctcaaactggtcgagctgcggtcctctaactggggcagggttcatgccaccagcacgtaccgagaggctacaccggagaacgatccgaattattttatgaatgaacccaccttctacaccagtgacggcgtccctttcacggccgctgatcccgattatcaggaaaaataccaagagctcctggaaagggaggacttcttccccgactatgaggagaacggcactgatttgtcaggggctggggatccctatctggacgacatcgacgacgagatggacccagaaatcgaggaggcctatgaaaagttctgtcttgagtccgaaagaaagcgcaagcagtag

SEQ ID NO: 256931 - DNA, 1056 bp, Artificial Sequence
  derived and/or modified sequence
atgtccgatggcttcgaccgggctcccgaacaaacacgccctctgcgagctcccccttcaagtcaggataagattcctcagcaaaacagcgaatcagccatggccaaacctcaagtggtggtggctcctgtgctgatgagtaaactgagtgtcaacgctcctgaattctatccatcagggtacagctcctcctacaccgaaagttacgaggatggatgcgaagattatcccacactcagcgaatatgtgcaagactttctaaaccatctgaccgaacagccaggcagcttcgagaccgaaattgaacagtttgccgagacgctaaacggctgcgtcacgacagacgatgccctccaggagctggtagagctaatctatcaacaagctacctccatcccaaatttttcctatatgggggcacggctgtgcaactacctgtctcaccacctgacaatttctccacagagcgggaacttccgccagcttctgctacagaggtgtcgtactgagtacgaggtgaaggatcaagcagcaaagggagacgaagtgacccgcaagaggttccacgcattcgtcttattccttggggagctatatctcaatctggaaatcaaggggacaaacgggcaggttacccgggctgacattctgcaggttgggctgagagagttgttgaacgcactgttcagcaatccaatggacgacaacctcatctgcgccgtaaagctgctgaagctcactggctctgtactggaggatgcatggaaagagaaggggaagatggatatggaagagatcattcaacgaatcgaaaatgtggtgttggacgctaactgctctagggatgtgaagcaaatgctgcttaagctagtggagctgcggtcgtctaactgggggagggtgcacgccaccagcacatatcgtgaagccacgccagagaacgatcccaactactttatgaacgagccaacattttacacctctgacggggtgccatttactgccgctgatcccgacacttggatgatcttgatgatgcggtggacacagaggtag

SEQ ID NO: 256932 - DNA, 1203 bp, Artificial Sequence
  derived and/or modified sequence
atgagcgacggcttcgacagagcccccgagcagaccagacccctgagagccccccccagcagccaggacaagatcccccagcagaacagcgagagcgccatggccaagccccaggtggtggtggcccccgtgctgatgagcaagctgagcgtgaacgcccccgagttctaccccagcggctacagcagcagctacaccgagagctacgaggacggctgcgaggactaccccaccctgagcgagtacgtgcaggacttcctgaaccacctgaccgagcagcccggcagcttcgagaccgagatcgagcagttcgccgagaccctgaacggctgcgtgaccaccgacgacgccctgcaggagctggtggagctgatctaccagcaggccaccagcatccccaacttcagctacatgggcgccagactgtgcaactacctgagccaccacctgaccatcagcccccagagcggcaacttcagacagctgctgctgcagagatgcagaaccgagtacgaggtgaaggaccaggccgccaagggcgacgaggtgaccagaaagagattccacgccttcgtgctgttcctgggcgagctgtacctgaacctggagatcaagggcaccaacggccaggtgaccagagccgacatcctgcaggtgggcctgagagagctgctgaacgccctgttcagcaaccccatggacgacaacctgatctgcgccgtgaagctgctgaagctgaccggcagcgtgctggaggacgcctggaaggagaagggcaagatggacatggaggagatcatccagagaatcgagaacgtggtgctggacgccaactgcagcagagacgtgaagcagatgctgctgaagctggtggagctgagaagcagcaactggggcagagtgcacgccaccagcacctacagagaggccacccccgagaacgaccccaactacttcatgaacgagcccaccttctacaccagcgacggcgtgcccttcaccgccgccgaccccgactaccaggagaagtaccaggagctgctggagagagaggacttcttccccgactacgaggagaacggcaccgacctgagcggcgccggcgacccctacctggacgacatcgacgacgagatggaccccgagatcgaggaggcctacgagaagttctgcctggagagcgagagaaagagaaagcagtag

SEQ ID NO: 256933 - DNA, 1056 bp, Artificial Sequence
  derived and/or modified sequence
atgagcgacggcttcgacagagcccccgagcagaccagacccctgagagccccccccagcagccaggacaagatcccccagcagaacagcgagagcgccatggccaagccccaggtggtggtggcccccgtgctgatgagcaagctgagcgtgaacgcccccgagttctaccccagcggctacagcagcagctacaccgagagctacgaggacggctgcgaggactaccccaccctgagcgagtacgtgcaggacttcctgaaccacctgaccgagcagcccggcagcttcgagaccgagatcgagcagttcgccgagaccctgaacggctgcgtgaccaccgacgacgccctgcaggagctggtggagctgatctaccagcaggccaccagcatccccaacttcagctacatgggcgccagactgtgcaactacctgagccaccacctgaccatcagcccccagagcggcaacttcagacagctgctgctgcagagatgcagaaccgagtacgaggtgaaggaccaggccgccaagggcgacgaggtgaccagaaagagattccacgccttcgtgctgttcctgggcgagctgtacctgaacctggagatcaagggcaccaacggccaggtgaccagagccgacatcctgcaggtgggcctgagagagctgctgaacgccctgttcagcaaccccatggacgacaacctgatctgcgccgtgaagctgctgaagctgaccggcagcgtgctggaggacgcctggaaggagaagggcaagatggacatggaggagatcatccagagaatcgagaacgtggtgctggacgccaactgcagcagagacgtgaagcagatgctgctgaagctggtggagctgagaagcagcaactggggcagagtgcacgccaccagcacctacagagaggccacccccgagaacgaccccaactacttcatgaacgagcccaccttctacaccagcgacggcgtgcccttcaccgccgccgaccccgacacctggatgatcctgatgatgagatggacccagagatag

SEQ ID NO: 256934 - protein, 214 aa, Artificial Sequence
  derived and/or modified sequence
MNLSSASSTEEKAVTTVLWGCELSQERRTWTFRPQLEGKQSCRLLLHTICLGEKAKEEMHRVEILPPANQEDKKMQPVTIASLQASVLPMVSMVGVQLSPPVTFQLRAGSGPVFLSGQERYEASDLTWEEEEEEEGEEEEEEEEDDEDEDADISLEEQSPVKQVKRLVPQKQASVAKKKKLEKEEEEIRASVRDKSPVKKAKATARAKKPGFKK

SEQ ID NO: 256935 - DNA, 645 bp, Artificial Sequence
  derived and/or modified sequence
atgaatctgtcatccgcttcctccaccgaagagaaggcagttaccacagtgctgtggggctgtgagttaagccaagagcgaaggacttggacattcagaccccagctagagggtaagcagtcatgtcgcctcttactacacactatctgcctgggggagaaggcaaaagaggaaatgcacagggtcgaaatcctgccgcctgctaaccaggaagacaaaaagatgcagcccgtgaccattgccagcctccaggcctccgttctgcctatggtgtccatggtgggagtccagctttctccccctgtaacattccagctaagagccggatctggacccgtcttcttgagcggccaggaaaggtatgaggcttccgatcttacgtgggaggaggaggaggaagaagagggcgaggaggaggaggaggaggaggaggacgatgaagatgaggacgccgacatcagcctcgaggaacagtcgcccgtgaaacaggtcaagaggctagtacctcaaaagcaggcctctgtggcaaagaaaaagaagttagagaaggaagaggaggaaatccgggcaagtgtccgggataagtcacctgtgaagaaagcaaaggctactgctagggctaaaaagccaggatttaagaaatag

SEQ ID NO: 256936 - DNA, 645 bp, Artificial Sequence
  derived and/or modified sequence
atgaatctctcatctgcttcttcaaccgaggagaaggccgtgactaccgtgctttggggctgtgaactcagccaggaacgaagaacgtggacatttcgacctcaactggaggggaagcagtcttgtcgcttgctcctgcacaccatttgtctgggggaaaaagcgaaggaggagatgcacagggtggaaattctccctcctgcaaaccaggaagacaagaaaatgcagccagttacaatcgcctccctgcaggccagtgttctgcctatggtgagcatggtgggtgtgcagctctctcctcctgtgaccttccagctacgggcaggtagcgggcccgtttttctctcaggacaagaaaggtatgaggctagcgacctcacatgggaggaagaggaggaggaggaaggcgaggaggaagaagaggaggaggaggatgacgaggatgaagatgccgatatatccctggaggagcagagtcccgtgaaacaagtgaaacgcctagtaccacagaagcaggcctctgtcgccaagaaaaagaaactggaaaaggaggaggaggagatcagagctagtgtgagagataaatctcctgtcaaaaaggccaaggccactgcaagggccaagaagccaggatttaaaaaatag

SEQ ID NO: 256937 - DNA, 645 bp, Artificial Sequence
  derived and/or modified sequence
atgaacctgtcttcagcatcttctaccgaagagaaggccgtgaccacagttctgtgggggtgcgaattgtctcaggaacgtcggacatggacgtttcgcccccagctcgagggaaagcaatcctgtcgactcctcctgcacaccatttgcttgggggaaaaggcaaaagaagaaatgcaccgagttgagatcttgcccccagctaatcaggaggacaagaaaatgcaacctgtgaccatcgccagccttcaggccagtgtgctgcctatggtctccatggtaggcgtccaactgtcgccccctgttactttccagctcagagcagggagtggccccgtctttctgagcggccaagagaggtacgaagcaagtgacctcacctgggaagaggaggaagaggaggagggggaggaagaagaggaggaagaagaggacgacgaagatgaagacgcagacatttcgctggaggagcaaagccccgtgaagcaggtcaagcggctcgtgcctcagaaacaagcatctgtcgcgaagaaaaagaagctcgaaaaagaagaggaagagattcgcgcctcggtgcgagacaagtctcccgttaaaaaagccaaggccacagcccgagcaaagaaaccaggatttaaaaaatag

SEQ ID NO: 256938 - DNA, 645 bp, Artificial Sequence
  derived and/or modified sequence
atgaacctgtctagcgcgtccagtacagaggaaaaggccgtaacaacggttctctggggatgtgagctgtcacaggagaggcgcacgtggacgtttagaccacagctggaaggcaagcagagctgccgattgctactacacacaatttgccttggcgagaaggcaaaggaggagatgcaccgagtggagatacttccaccagctaaccaggaggataaaaagatgcagccagtgactattgcctccttacaggctagcgtgctccccatggtaagtatggttggtgtgcaactgtcgcctccagtgacctttcaactgcgcgcgggcagcggaccagtctttctgagcgggcaagagcgatatgaggcttcggatttaacctgggaagaggaagaggaagaagagggtgaagaggaggaagaagaggaagaagacgacgaggacgaagatgcagatatctcgttggaggaacagtcacccgttaagcaagtaaaaagactcgtcccccagaaacaggcttccgtggcaaagaaaaagaagttggaaaaagaagaagaagagatccgagcgagcgttagggataagagccccgtcaaaaaagctaaagctactgcaagggctaaaaagccagggttcaagaaatag

SEQ ID NO: 256939 - DNA, 645 bp, Artificial Sequence
  derived and/or modified sequence
atgaacctgagcagcgccagcagcacagaggagaaggctgtgaccaccgtgctgtggggctgtgagctgagccaggagaggaggacctggaccttccggccccagctggagggcaagcagagctgccgcctgctgctgcacaccatctgcctgggggagaaggccaaggaggagatgcaccgggtggagatcctgcccccagccaaccaggaggacaagaagatgcagcctgtgaccatcgccagcctgcaggcctctgtgctgcccatggtgtccatggtgggcgtgcagctgagcccccctgtgaccttccagctgcgggccggcagcggccctgtgttcctgagcggccaggagagatatgaggccagtgacctgacctgggaggaggaggaggaggaggagggggaggaggaggaggaggaggaggaggatgatgaagatgaagatgctgacatcagcctggaggagcagagccctgtgaagcaggtgaagaggctggtgccccagaagcaggcctctgtggccaagaagaagaagctggagaaggaggaggaggagatccgggcctctgtgcgggacaagagccctgtgaagaaggccaaggccacagcccgggccaagaagccaggcttcaagaagtag

SEQ ID NO: 256940 - DNA, 645 bp, Artificial Sequence
  derived and/or modified sequence
atgaacctgagcagcgccagcagcaccgaggagaaggccgtgaccaccgttctttggggatgcgaattgtcccaagagcgaagaacttggacttttagaccacagttggaggggaagcagagttgtagactcctgctgcatactatttgcctgggcgaaaaagctaaagaagaaatgcaccgggtggaaattctgccgcctgccaaccaggaggataaaaagatgcaacccgtaacgattgctagtctgcaggcgagtgtcctgcccatggtgtccatggtcggtgttcagctgtctccacctgtgacatttcagctacgggccgggagcggacctgttttcctaagtggtcaggaacgatatgaggcatcagacctcacttgggaagaagaggaagaagaggaaggagaagaagaggaagaagaggaagaggatgatgaggacgaagatgctgacattagccttgaagagcaatctccagtaaagcaggttaagagactcgttcctcagaagcaggcatctgtggctaagaagaagaaactcgagaaggaggaggaggaaatccgcgcatcagtgcgggacaaaagccccgtcaaaaaggcaaaagcaaccgcacgagctaaaaaacctggctttaagaagtag

SEQ ID NO: 256941 - DNA, 645 bp, Artificial Sequence
  derived and/or modified sequence
atgaacctgagcagcgccagcagcaccgaggagaaggccgtgaccaccgtcctgtgggggtgtgagctcagtcaagagaggaggacgtggaccttccggcctcaactggaagggaaacagtcatgcagactgctgcttcacacaatctgcctgggtgaaaaagctaaagaggagatgcaccgtgtcgagattctccccccggcaaatcaggaggacaaaaagatgcagcctgtgacaatagcttcgttgcaggcctctgttctgcctatggtgagcatggtcggtgtccagttgtccccaccagtgacgttccagctgcgcgccgggtccggccccgtttttctgtcaggtcaggagaggtacgaggcttcagacctaacttgggaggaagaagaggaggaagagggagaggaggaggaggaggaggaggaagacgacgaagatgaggacgcagatatatccctggaggaacaaagcccagttaaacaggtcaaaaggcttgtcccgcaaaaacaggcttcagtcgcaaaaaagaaaaagcttgaaaaggaggaagaagaaatcagagccagtgttcgggataagagtccagttaaaaaggctaaggccacggctcgtgcaaagaagcctgggttcaaaaaatag

SEQ ID NO: 256942 - DNA, 645 bp, Artificial Sequence
  derived and/or modified sequence
atgaacctgagcagcgccagcagcaccgaggagaaggccgtgaccaccgtgctgtggggttgcgagttgtcccaggagcgccgaacttggactttcaggccccagctcgagggaaagcagtcttgcagactcctgttacacacaatctgtctaggcgaaaaagcaaaggaggagatgcatcgtgtggagatccttccccccgccaaccaggaagataaaaagatgcagcccgtgacaatcgcgagcctgcaggccagtgtcctaccaatggtgagcatggtgggtgtgcagctatctcctcctgtcacatttcagttacgcgccggatcaggcccggtgtttctgtcaggacaggaacgttacgaagcgtccgaccttacctgggaggaagaggaggaggaggaaggcgaagaggaagaagaagaggaagaggacgatgaggatgaggacgccgatatcagcctggaagagcaatctcctgtgaaacaggtgaaaaggcttgtcccacagaagcaggccagtgtcgcaaaaaaaaagaagctcgagaaggaagaggaggaaatacgagcttctgtgcgggataaaagcccggtgaagaaggccaaggctaccgcacgcgccaaaaaacccggctttaagaaatag

SEQ ID NO: 256943 - DNA, 645 bp, Artificial Sequence
  derived and/or modified sequence
atgaacctgagcagcgccagcagcaccgaggagaaggccgtgaccaccgtgctatggggctgtgagctgtcacaggagcggcgcacatggacatttagaccacagctggaagggaagcaatcttgccggttgctgctgcatacgatatgcctgggcgagaaagcaaaagaggaaatgcaccgggttgaaattcttcctccagccaaccaagaggacaagaaaatgcagcccgtgaccatcgcttccctccaggcatctgtcctgcccatggtctcgatggtgggtgtgcaattgagtccccctgtgacctttcagctccgcgccggctcaggcccagtgttcctctccgggcaggagcggtacgaagcctctgatctaacttgggaggaagaagaggaggaggagggggaggaggaggaggaagaggaggaagatgacgaggacgaggatgccgacatatccttagaggagcagtctcctgttaaacaggttaaaagattagtgccccaaaaacaagccagtgtggctaagaagaaaaaactcgagaaagaggaagaagagatccgggcatctgtccgagacaagagcccagtaaaaaaagccaaagccactgcccgcgcaaagaagcctggcttcaagaagtag

SEQ ID NO: 256944 - DNA, 645 bp, Artificial Sequence
  derived and/or modified sequence
atgaacctgtccagcgccagcagcactgaggaaaaagccgtcaccacggtcctgtggggttgcgagctgagccaggaacgcagaacctggacttttcggcctcaactcgaagggaagcagtcctgtcgcctgctactgcacaccatctgcttgggcgagaaggcaaaagaagagatgcaccgagtggaaattttaccaccagccaatcaggaggataagaagatgcaaccagtgacaatagccagcctccaggcctccgttttgccaatggtgagcatggtcggtgtacagctgtctcctccggtcactttccagctgcgcgcaggatcaggacctgtattcctgtcaggtcaggaaaggtacgaagcaagcgatttgacgtgggaagaagaagaggaagaagaaggcgaagaagaagaggaggaggaggaagatgatgaagatgaggacgcggacattagcctggaagagcagtctcccgtgaaacaggtcaagaggctggtgccacagaagcaggctagcgtcgcaaaaaagaagaaattagagaaagaggaggaggaaatccgggcaagcgtccgcgacaaaagcccagttaagaaggctaaggccactgccagagctaaaaaaccaggcttcaaaaagtag

SEQ ID NO: 256945 - DNA, 645 bp, Artificial Sequence
  derived and/or modified sequence
atgaatctaagttccgcctcctccaccgaagagaaggccgtgacaaccgtgctgtggggatgcgaactctctcaggagcgcaggacatggacctttcggccacagctggagggtaagcagagctgtaggctgctgctgcacactatctgcttgggagagaaagctaaggaggaaatgcaccgcgtggaaatcctgcccccagcaaaccaagaagacaagaagatgcagcctgtgaccatagcaagcctccaggcctcagtcctgcccatggtgagtatggtgggggttcaactgagcccacccgttaccttccaactgagggctggtagcggccctgtgttcctgtccgggcaggagaggtacgaggcctcagacctgacatgggaggaggaggaagaggaggaaggagaggaggaagaagaagaggaagaggatgatgaggacgaagatgctgatatctccctagaagaacagagccccgtgaaacaggttaaaaggctggtcccccagaagcaggcgtcggtagcaaaaaagaagaagctagagaaggaagaagaagagatacgcgctagcgttcgggataagtcccctgttaagaaggccaaggccactgcccgagccaagaaacctggttttaagaaatag

SEQ ID NO: 256946 - DNA, 645 bp, Artificial Sequence
  derived and/or modified sequence
atgaaccttagtagtgcctcatctacagaggagaaagcggtcacgaccgtgctgtggggctgtgagctgagtcaggaaagacggacatggacatttaggccacagttggaagggaagcaaagttgccgactcttgttgcatactatttgccttggagaaaaggccaaggaagagatgcaccgcgttgagattcttcccccagcaaaccaggaagacaagaagatgcagccggttaccatagctagtctacaggccagcgtactgccaatggtgagtatggttggagtgcagctatcaccacccgttactttccaactgagggcaggcagcggaccagtgtttctgagtggccaggagaggtacgaagcttctgatctcacctgggaggaagaggaggaagaggagggcgaggaagaagaggaagaagaagaagatgatgaggacgaggatgctgacatatccctggaggagcaaagccccgttaaacaagtgaagcgacttgtgccccagaaacaggcctcagtcgccaagaagaagaaactggagaaagaagaagaggaaattcgagcttcagtgcgtgacaagtcccccgttaagaaggccaaggccactgctcgtgctaagaaaccaggcttcaagaaatag

SEQ ID NO: 256947 - DNA, 645 bp, Artificial Sequence
  derived and/or modified sequence
atgaatctctcatctgcatcctccacggaggagaaggccgtgacaacagtactctggggatgtgagctgagtcaagaacggcgaacctggacattccgcccacagctagagggcaagcagagctgtcggttgctcctgcatactatttgcctcggggagaaggccaaagaagagatgcaccgagtggaaatcttaccgcctgcaaaccaagaggacaagaaaatgcaacctgtaacaattgcttctctgcaggcttccgtgctccccatggtcagcatggtgggggtacagctttctccacccgtgacatttcagttgcgcgctggatctggaccagtctttctgagtgggcaggagcgatacgaagcgtctgacttgacttgggaggaagaagaggaagaagaaggcgaagaggaagaagaagaggaagaagacgacgaagatgaggacgcagacatatccttggaggaacagagcccagtgaaacaggttaaaagactcgttcctcagaagcaggcctccgtcgccaagaaaaagaagctggagaaagaggaagaagagattagagcatcagtacgggataagtctccggttaaaaaggcgaaagcaactgcccgtgcgaagaagcctggtttcaagaagtag

SEQ ID NO: 256948 - DNA, 645 bp, Artificial Sequence
  derived and/or modified sequence
atgaacctgagcagcgccagcagcaccgaggagaaggccgtgaccaccgtgctgtggggctgcgagctgagccaggagagaagaacctggaccttcagaccccagctggagggcaagcagagctgcagactgctgctgcacaccatctgcctgggcgagaaggccaaggaggagatgcacagagtggagatcctgccccccgccaaccaggaggacaagaagatgcagcccgtgaccatcgccagcctgcaggccagcgtgctgcccatggtgagcatggtgggcgtgcagctgagcccccccgtgaccttccagctgagagccggcagcggccccgtgttcctgagcggccaggagagatacgaggccagcgacctgacctgggaggaggaggaggaggaggagggcgaggaggaggaggaggaggaggaggacgacgaggacgaggacgccgacatcagcctggaggagcagagccccgtgaagcaggtgaagagactggtgccccagaagcaggccagcgtggccaagaagaagaagctggagaaggaggaggaggagatcagagccagcgtgagagacaagagccccgtgaagaaggccaaggccaccgccagagccaagaagcccggcttcaagaagtag

SEQ ID NO: 256949 - protein, 323 aa, Artificial Sequence
  derived and/or modified sequence
MPEMPEDMEQEEVNIPNRRVLVTGATGLLGRAVHKEFQQNNWHAVGCGFRRARPKFEQVNLLDSNAVHHIIHDFQPHVIVHCAAERRPDVVENQPDAASQLNVDASGNLAKEAAAVGAFLIYISSDYVFDGTNPPYREEDIPAPLNLYGKTKLDGEKAVLENNLGAAVLRIPILYGEVEKLEESAVTVMFDKVQFSNKSANMDHWQQRFPTHVKDVATVCRQLAEKRMLDPSIKGTFHWSGNEQMTKYEMACAIADAFNLPSSHLRPITDSPVLGAQRPRNAQLDCSKLETLGIGQRTPFRIGIKESLWPFLIDKRWRQTVFH

SEQ ID NO: 256950 - DNA, 687 bp, Artificial Sequence
  derived and/or modified sequence
atgcagctggccgtggtgagcgaggagcaggaccagaacctgaacagactgatctgctggatcctgatgcagttcatctacatcagcagcgactacgtgttcgacggcaccaaccccccctacagagaggaggacatccccgcccccctgaacctgtacggcaagaccaagctggacggcgagaaggccgtgctggagaacaacctgggcgccgccgtgctgagaatccccatcctgtacggcgaggtggagaagctggaggagagcgccgtgaccgtgatgttcgacaaggtgcagttcagcaacaagagcgccaacatggaccactggcagcagagattccccacccacgtgaaggacgtggccaccgtgtgcagacagctggccgagaagagaatgctggaccccagcatcaagggcaccttccactggagcggcaacgagcagatgaccaagtacgagatggcctgcgccatcgccgacgccttcaacctgcccagcagccacctgagacccatcaccgacagccccgtgctgggcgcccagagacccagaaacgcccagctggactgcagcaagctggagaccctgggcatcggccagagaacccccttcagaatcggcatcaaggagagcctgtggcccttcctgatcgacaagagatggagacagaccgtgttccactag

SEQ ID NO: 256951 - DNA, 972 bp, Artificial Sequence
  derived and/or modified sequence
atgccagagatgcctgaggatatggagcaagaagaggtcaatattccgaatcggcgtgtcctggtgaccggagcgacggggctcctggggcgtgcagtgcataaggagtttcagcagaacaactggcatgccgtgggctgcggatttcgtagggctcggcccaagtttgaacaagtgaatctgttggactctaacgcagtgcaccatatcatacacgattttcagccccacgttatcgtgcattgcgcggcggagagaagacccgatgtagtggaaaaccaacccgacgcggcatcacagttgaatgtcgatgcttccggtaacctcgcaaaagaggccgccgccgttggcgctttcctgatttatattagttcggactacgtcttcgatggcaccaatcccccctatcgggaagaagacattccagcccccctgaacttgtacggtaaaacaaagttggacggtgagaaagcagtgttagagaacaaccttggtgctgccgttttgaggattccaattctgtacggggaagtcgagaaacttgaggagtccgccgtcacggtgatgtttgacaaagtccagttctccaacaaatcagccaacatggaccactggcagcaaagattccccacgcacgtcaaagatgttgccacagtgtgtagacagcttgctgaaaagaggatgctcgacccaagtatcaagggtacttttcactggtcggggaacgaacagatgactaaatatgagatggcctgtgcaattgcagatgcgttcaacctcccgtcttcccacctccggccaattaccgactccccagttctgggagcccagcggcccaggaatgcccagcttgattgctctaaactggaaaccctcggaatcgggcagcggactcccttcagaatcgggatcaaagagtctctgtggccttttctcatcgacaaacgctggaggcagacggtgtttcactag

SEQ ID NO: 256952 - DNA, 687 bp, Artificial Sequence
  derived and/or modified sequence
atgcagctagctgtagtctctgaagaacaggaccagaacttgaatcgtttaatctgctggatccttatgcagttcatctatatctcttccgactacgtattcgacggcactaatccaccgtatcgggaagaggacattcctgcacccttgaacctttatggcaaaactaaattggatggagaaaaggccgtgctcgagaacaaccttggagcagctgtcctccgcattccaatcctgtacggggaggtggaaaagctggaggaatccgccgtgaccgtcatgttcgacaaggttcagttcagtaacaagtccgcaaatatggaccactggcagcaaagattccctacacacgtaaaagacgtggcaacagtttgccgacagctcgctgaaaaaaggatgctcgatccatccataaagggtacctttcactggtctgggaacgaacagatgactaagtatgaaatggcttgcgctattgctgatgccttcaatctgcctagctcgcatctgcgtcctatcacggacagtccagtgttaggcgctcagcggccacgtaatgcccagctcgactgctctaagctggagactctcggaattgggcagagaacccctttcaggattggtattaaagagtccctgtggccttttttaattgacaaacgatggcggcagacagtgtttcattag

SEQ ID NO: 256953 - DNA, 972 bp, Artificial Sequence
  derived and/or modified sequence
atgcctgagatgcctgaggacatggagcaggaggaggtgaacatccccaacagaagagtgctggtgactggagccaccggcctgctgggccgggctgtgcacaaggagttccagcagaacaactggcatgctgtgggctgcggcttccggcgggcccggcccaagtttgagcaggtgaacctgctggacagcaatgctgtgcaccacatcatccatgacttccagccccacgtgattgtgcactgtgccgctgagcggcggccagatgtggtggagaaccagccagatgctgccagccagctgaatgtggatgccagcggcaacctggccaaggaggccgctgctgtgggcgccttcctgatctacatcagcagtgactatgtgtttgatggcaccaaccccccctaccgggaggaggacatcccagcccccctgaacctgtatggcaagaccaagctggatggagagaaggctgtgctggagaacaacctgggcgctgctgtgctgcgcatccccatcctgtatggagaggtggagaagctggaggagagcgctgtgacagtgatgtttgacaaggtgcagttcagcaacaagagcgccaacatggaccactggcagcagcgcttccccacccacgtgaaggatgtggccaccgtgtgccggcagctggccgagaagaggatgctggaccccagcatcaagggcaccttccactggagcggaaatgagcagatgaccaagtatgagatggcctgtgccatcgcagatgccttcaacctgcccagcagccacctgcggcccatcacagacagccctgtgctgggcgcccagaggcccagaaatgcccagctggactgcagcaagctggagaccctgggcatcggccagaggacccccttccgcatcggcatcaaggagagcctgtggcccttcctgattgacaagcgctggaggcagaccgtcttccactag

SEQ ID NO: 256954 - DNA, 687 bp, Artificial Sequence
  derived and/or modified sequence
atgcagctggccgtggtgtctgaggagcaggaccagaacctgaacagactcatctgctggatcctgatgcagttcatctacatcagcagtgactatgtgtttgatggcaccaaccccccctaccgggaggaggacatcccagcccccctgaacctgtatggcaagaccaagctggatggagagaaggctgtgctggagaacaacctgggcgctgctgtgctgcgcatccccatcctgtatggagaggtggagaagctggaggagagcgctgtgacagtgatgtttgacaaggtgcagttcagcaacaagagcgccaacatggaccactggcagcagcgcttccccacccacgtgaaggatgtggccaccgtgtgccggcagctggccgagaagaggatgctggaccccagcatcaagggcaccttccactggagcggaaatgagcagatgaccaagtatgagatggcctgtgccatcgcagatgccttcaacctgcccagcagccacctgcggcccatcacagacagccctgtgctgggcgcccagaggcccagaaatgcccagctggactgcagcaagctggagaccctgggcatcggccagaggacccccttcagaattggcatcaaggagagcctgtggcccttcctgattgacaagcgctggaggcagacagtgttccactag

SEQ ID NO: 256955 - DNA, 972 bp, Artificial Sequence
  derived and/or modified sequence
atgcccgagatgcccgaggacatggagcaggaggaggtgaacatcccaaaccgtagggtgctagttaccggggccactggtcttctagggagagcagtgcacaaggagttccagcaaaacaactggcatgccgttggctgcggattccggagagctagaccaaaattcgagcaagtaaatctcctcgactcaaacgcagtccaccatatcattcatgactttcagccccacgtaatcgtgcattgtgcagctgagcgaagaccggacgttgtcgaaaaccaacctgatgccgcatcccaacttaacgtcgacgccagcggcaacctcgctaaagaagccgcggctgttggtgcttttctgatttacatttctagtgattatgtgttcgatggcacgaaccctccttatcgtgaggaagacatccctgcccccctgaatttgtatggcaagaccaagctggacggtgaaaaagccgtcctggagaataacctgggcgctgctgtgcttaggattcctattctctacggcgaggtagagaaattggaagaaagcgccgtgactgtgatgttcgacaaggtacaatttagcaataagagtgccaatatggatcattggcagcagcgattcccaactcatgttaaggatgtggcaacagtttgcaggcagttagcagaaaaacgcatgttagatccgtccattaagggtaccttccactggtctggcaatgagcagatgaccaagtatgagatggcctgcgccattgcagatgcatttaatctcccctcctctcatctccggcccatcacggattctccagtgctcggagcccagcgtccaagaaatgcccaacttgattgttccaaactggagactttaggtataggccagagaacgccgttccgcatcgggatcaaagaatccttgtggcctttcctgattgataaacgctggcgccaaaccgtgttccactag

SEQ ID NO: 256956 - DNA, 687 bp, Artificial Sequence
  derived and/or modified sequence
atgcagctggccgtggtgagcgaggagcaggaccagaacctgaaccgactaatttgttggatcttgatgcagtttatttatatcagctccgactatgtgttcgacgggaccaaccctccataccgagaagaggacatccctgcgcctttgaatctctacgggaagacaaagctcgacggggagaaggctgtcctggagaataacctgggagcagcagtcctgcggatcccgatcctctacggggaagtagagaaactggaggaatcagccgttacggtgatgtttgacaaggtacagtttagtaacaagtccgctaatatggaccattggcagcagcggttccccactcacgttaaagacgttgccaccgtctgccgtcagctagcggagaaaaggatgctggacccctctatcaaaggaacatttcactggtcaggaaacgagcagatgactaaatacgagatggcttgcgccattgccgacgcttttaatttgccctccagtcatttgcgccccattacagactccccagtgctgggagcccagagacctcgaaacgctcagctagattgcagcaagctagagactctgggcatcgggcagagaacgccttttcgaataggtataaaagaatcactctggccttttctcatcgacaaacggtggcgacagacagtcttccattag

SEQ ID NO: 256957 - DNA, 972 bp, Artificial Sequence
  derived and/or modified sequence
atgcctgaaatgccggaagacatggaacaggaggaggtgaatatcccaaacaggagggtgctcgtgacaggcgcaaccggattgctgggtcgggcagtgcacaaggagttccagcagaacaactggcacgccgtcgggtgcggcttccgcagagccaggccaaagttcgagcaagtcaaccttctagatagcaatgcagttcatcatataattcacgattttcagccacacgttattgtccattgtgctgctgagaggcggcctgatgtcgtcgaaaaccagccagacgccgctagccagctgaatgtggacgcttccggcaacctcgccaaggaggcagccgctgtgggggcttttctcatttatatctccagcgactacgtcttcgacgggactaacccgccttaccgggaagaggatatcccagccccacttaacttgtacggcaaaacgaaactggatggagagaaagccgtgctcgagaacaacttgggggcagcagtgctgcgcatacccatcctgtatggagaagtggagaaacttgaggaatcggcagtgaccgtcatgttcgataaggtgcagttttctaataagagtgcaaatatggatcactggcagcagcgattcccaacacacgtgaaggatgtcgcaaccgtctgtagacagttggctgaaaaacgcatgctggacccatcaattaagggcaccttccattggagtggcaacgagcaaatgactaagtatgagatggcctgcgccatcgctgacgcctttaatctaccaagctcccatctgcggccaataaccgatagcccagtgctgggcgcacagaggcccagaaatgcacagctggattgttcaaaattagagactctcggtatcggtcagaggacaccctttagaatcggtatcaaagagagcttatggccttttcttatcgataaacgatggaggcaaacagtgttccactag

SEQ ID NO: 256958 - DNA, 993 bp, Artificial Sequence
  derived and/or modified sequence
ccagccactgcggcaggaagcaagaggaagttaacatccctaataggagggttctggttactggtgccactgggcttcttggcagagctgtacacaaagaatttcagcagaataattggcatgcagttggctgtggtttcagaagagcaagaccaaaatttgaacaggttaatctgttggattctaatgcagttcatctacattagctcagattatgtatttgatggaacaaatccaccttacagagaggaagacataccagctcccctaaatttgtatggcaaaacaaaattagatggagaaaaggctgtcctggagaacaatctaggagctgctgttttgaggattcctattctgtatggggaagttgaaaagctcgaagaaagtgctgtgactgttatgtttgataaagtgcagttcagcaacaagtcagcaaacatggatcactggcagcagaggttccccacacatgtcaaagatgtggccactgtgtgccggcagctagcagagaagagaatgctggatccatcaattaagggaacctttcactggtctggcaatgaacagatgactaagtatgaaatggcatgtgcaattgcagatgccttcaacctccccagcagtcacttaagacctattactgacagccctgtcctaggagcacaacgtccgagaaatgctcagcttgactgctccaaattggagaccttgggcattggccaacgaacaccatttcgaattggaatcaaagaatcactttggcctttcctcattgacaagagatggagacaaacggtctttcattagtttatttgtgttgggttcttttttttttttaaatgaaaagtatagtatgtggcactttttaaagaacaaaggaaatagttttgtatgagtactttaattgtgactcttaggatctttcaggtaaatgatgctcttgcactagtgaaattgtctaaagaaactaaagggcagtcatgccctgtttgc

SEQ ID NO: 256959 - DNA, 687 bp, Artificial Sequence
  derived and/or modified sequence
atgcaactggccgtagtgtcagaggagcaggatcaaaatttaaaccgactaatctgctggatactgatgcagttcatctatatcagttcagattatgtttttgacgggactaatccaccctatcgggaggaggacatccccgcacctctcaatctgtatgggaaaacaaagttagatggtgagaaagctgtgctggagaacaacctgggggctgccgttctgaggatcccaattctgtatggggaagttgagaagctcgaagaatctgcggttaccgtgatgtttgataaggtccaatttagtaacaagtcagctaatatggatcattggcaacagcgtttcccaacacacgtgaaggatgtcgctacagtgtgcaggcagcttgcggaaaagcgcatgttggacccaagtataaaggggacgtttcactggtccggaaacgaacagatgaccaagtacgaaatggcctgcgcaatcgccgacgcttttaatctaccctctagccatctaagacccatcaccgactctcccgtgctgggcgcacagaggcctagaaacgcacagctcgattgtagcaagttggagactcttgggatcggccagcggacccctttccgtatcggcataaaagaatctctgtggcctttcctaattgataagcggtggcgccaaactgtattccactag

SEQ ID NO: 256960 - DNA, 2226 bp, Artificial Sequence
  derived and/or modified sequence
gcaaatagacccaggcttgactggcaattaaacatgaaacttctcattgggtattttcgagactactacggggaatcagctaccagcttactgccatgtggagaactgcacgagattccgggattggaatcaaaatgctaatttaaaaggtcaagtgaagctgctcctcacgttttggcgtgcctgcgctctctgcaggcagaagcgaacaaagacccagcaagagaaggcagaggctaagacccatcccgtatctgctctcctgaaataattctggagtcatgcctgaaatgccagaggacatggagcaggaggaagttaacatccctaataggagggttctggttactggtgccactgggcttcttggcagagctgtacacaaagaatttcagcagaataattggcatgcagttggctgtggtttcagaagagcaagaccaaaatttgaacaggttaatctgttggattctaatgcagttcatcacatcattcatgattttcagccccatgttatagtacattgtgcagcagagagaagaccagatgttgtagaaaatcagccagatgctgcctctcaacttaatgtggatgcttctgggaatttagcaaaggaagcagctgctgttggagcatttctcatctacattagctcagattatgtatttgatggaacaaatccaccttacagagaggaagacataccagctcccctaaatttgtatggcaaaacaaaattagatggagaaaaggctgtcctggagaacaatctaggagctgctgttttgaggattcctattctgtatggggaagttgaaaagctcgaagaaagtgctgtgactgttatgtttgataaagtgcagttcagcaacaagtcagcaaacatggatcactggcagcagaggttccccacacatgtcaaagatgtggccactgtgtgccggcagctagcagagaagagaatgctggatccatcaattaagggaacctttcactggtctggcaatgaacagatgactaagtatgaaatggcatgtgcaattgcagatgccttcaacctccccagcagtcacttaagacctattactgacagccctgtcctaggagcacaacgtccgagaaatgctcagcttgactgctccaaattggagaccttgggcattggccaacgaacaccatttcgaattggaatcaaagaatcactttggcctttcctcattgacaagagatggagacaaacggtctttcattagtttatttgtgttgggttcttttttttttttaaatgaaaagtatagtatgtggcactttttaaagaacaaaggaaatagttttgtatgagtactttaattgtgactcttaggatctttcaggtaaatgatgctcttgcactagtgaaattgtctaaagaaactaaagggcagtcatgccctgtttgcagtaatttttctttttatcattttgtttgtcctggctaaacttggagtttgagtatagtaaattatgatccttaaatatttgagagtcaggatgaagcagatctgctgtagacttttcagatgaaattgttcattctcgtaacctccatattttcaggatttttgaagctgttgaccttttcatgttgattattttaaattgtgtgaaatagtataaaaatcattggtgttcattatttgctttgcctgagctcagatcaaaatgtttgaagaaaggaactttatttttgcaagttacgtacagtttttatgcttgagatatttcaacatgttatgtatattggaacttctacagcttgatgcctcctgcttttatagcagtttatggggagcacttgaaagagcgtgtgtacatgtattttttttctaggcaaacattgaatgcaaacgtgtatttttttaatataaatatataactgtccttttcatcccatgttgccgctaagtgatatttcatatgtgtggttatactcataataatgggccttgtaagtcttttcaccattcatgaataataataaatatgtactgctggcatgtaatgcttagttttcttgtatttacttctttttttaaatgtaaggaccaaacttctaaactaattgttcttttgttgctttaatttttaaaaattacattcttctgatgtaacatgtgatacatacaaaagaatatagtttaatatgtattgaaataaaacacaataaaattaacacttgatccagaa

SEQ ID NO: 256961 - DNA, 972 bp, Artificial Sequence
  derived and/or modified sequence
atgcccgagatgcccgaggacatggagcaggaggaggtgaacatccccaacagaagagtgctggtgaccggcgccaccggcctgctgggcagagccgtgcacaaggagttccagcagaacaactggcacgccgtgggctgcggcttcagaagagccagacccaagttcgagcaggtgaacctgctggacagcaacgccgtgcaccacatcatccacgacttccagccccacgtgatcgtgcactgcgccgccgagagaagacccgacgtggtggagaaccagcccgacgccgccagccagctgaacgtggacgccagcggcaacctggccaaggaggccgccgccgtgggcgccttcctgatctacatcagcagcgactacgtgttcgacggcaccaaccccccctacagagaggaggacatccccgcccccctgaacctgtacggcaagaccaagctggacggcgagaaggccgtgctggagaacaacctgggcgccgccgtgctgagaatccccatcctgtacggcgaggtggagaagctggaggagagcgccgtgaccgtgatgttcgacaaggtgcagttcagcaacaagagcgccaacatggaccactggcagcagagattccccacccacgtgaaggacgtggccaccgtgtgcagacagctggccgagaagagaatgctggaccccagcatcaagggcaccttccactggagcggcaacgagcagatgaccaagtacgagatggcctgcgccatcgccgacgccttcaacctgcccagcagccacctgagacccatcaccgacagccccgtgctgggcgcccagagacccagaaacgcccagctggactgcagcaagctggagaccctgggcatcggccagagaacccccttcagaatcggcatcaaggagagcctgtggcccttcctgatcgacaagagatggagacagaccgtgttccactag

SEQ ID NO: 256962 - protein, 1175 aa, Artificial Sequence
  derived and/or modified sequence
MAKPYEFNWQKEVPSFLQEGAVFDRYEEESFVFEPNCLFKVDEFGFFLTWRSEGKEGQVLECSLINSIRSGAIPKDPKILAALEAVGKSENDLEGRIVCVCSGTDLVNISFTYMVAENPEVTKQWVEGLRSIIHNFRANNVSPMTCLKKHWMKLAFMTNTNGKIPVRSITRTFASGKTEKVIFQALKELGLPSGKNDEIEPTAFSYEKFYELTQKICPRTDIEDLFKKINGDKTDYLTVDQLVSFLNEHQRDPRLNEILFPFYDAKRAMQIIEMYEPDEDLKKKGLISSDGFCRYLMSDENAPVFLDRLELYQEMDHPLAHYFISSSHNTYLTGRQFGGKSSVEMYRQVLLAGCRCVELDCWDGKGEDQEPIITHGKAMCTDILFKDVIQAIKETAFVTSEYPVILSFENHCSKYQQYKMSKYCEDLFGDLLLKQALESHPLEPGRALPSPNDLKRKILIKNKRLKPEVEKKQLEALRSMMEAGESASPANILEDDNEEEIESADQEEEAHPEFKFGNELSADDLGHKEAVANSVKKGLVTVEDEQAWMASYKYVGATTNIHPYLSTMINYAQPVKFQGFHVAEERNIHYNMSSFNESVGLGYLKTHAIEFVNYNKRQMSRIYPKGGRVDSSNYMPQIFWNAGCQMVSLNYQTPDLAMQLNQGKFEYNGSCGYLLKPDFMRRPDRTFDPFSETPVDGVIAATCSVQVISGQFLSDKKIGTYVEVDMYGLPTDTIRKEFRTRMVMNNGLNPVYNEESFVFRKVILPDLAVLRIAVYDDNNKLIGQRILPLDGLQAGYRHISLRNEGNKPLSLPTIFCNIVLKTYVPDGFGDIVDALSDPKKFLSITEKRADQMRAMGIETSDIADVPSDTSKNDKKGKANTAKANVTPQSSSELRPTTTAALASGVEAKKGIELIPQVRIEDLKQMKAYLKHLKKQQKELNSLKKKHAKEHSTMQKLHCTQVDKIVAQYDKEKSTHEKILEKAMKKKGGSNCLEMKKETEIKIQTLTSDHKSKVKEIVAQHTKEWSEMINTHSAEEQEIRDLHLSQQCELLKKLLINAHEQQTQQLKLSHDRESKEMRAHQAKISMENSKAISQDKSIKNKAERERRVRELNSSNTKKFLEERKRLAMKQSKEMDQLKKVQLEHLEFLEKQNEQAKEMQQMVKLEAEMDRRPATVV

SEQ ID NO: 256963 - DNA, 3528 bp, Artificial Sequence
  derived and/or modified sequence
atggccaagccctacgaattcaactggcaaaaggaggttcctagctttttacaagaaggcgccgtgttcgatagatatgaagaagagtccttcgtttttgagcctaactgtctgtttaaagtagatgagtttggattttttcttacctggcgttcagaagggaaagaagggcaggtcctagagtgctcacttattaactccatcaggtccggtgcgattcccaaggatccaaagattctcgctgctcttgaggcagttggcaagtctgaaaatgatctggagggccggatcgtttgcgtgtgttctggcaccgacctggtcaacatatcatttacctatatggttgcggagaatccagaggtgaccaagcagtgggttgaaggcctgcggagcatcattcataacttccgcgcaaacaatgtgtccccaatgacttgcctgaagaagcactggatgaaactggcctttatgactaacacaaacggcaagattcccgtcaggagtataaccagaacatttgcatctggcaagacggaaaaggtcatcttccaggctttgaaagagctgggactgccgtccggtaaaaacgacgaaatcgaacccactgctttctcctacgagaagttctatgagcttacacaaaagatatgcccacgcacggatatagaagacctgttcaaaaaaattaatggcgacaagacagactacttgactgttgaccagctggtgtcgttcctgaacgaacaccagcgggatccacgcctgaatgagatattgttccctttttatgacgctaagagggctatgcagatcattgagatgtatgaacctgatgaggatctgaagaagaaaggcctgatttccagtgatgggttttgtcgttacttgatgagcgacgagaatgcccccgtcttcctggaccggttagagctgtaccaggaaatggatcacccattggcccactacttcatttcatcatcacacaatacctacctcacgggccggcaattcggcggtaagtcctctgtggagatgtacaggcaggttctgttggctggttgccgctgcgtggagctcgactgctgggatgggaaaggtgaggatcaggagccaattatcacacacggaaaagctatgtgcacagatatcctgttcaaggacgtaattcaggccattaaggaaacagccttcgtcacctcagaataccctgtcattctgtcctttgagaaccactgctccaagtaccagcaatataaaatgtcaaagtactgcgaggacctgttcggggaccttttgcttaagcaagctctggaaagccatcctctggagccaggccgggcgctgcctagccctaacgatttgaagcgcaagattctgatcaaaaataaacgactgaagccagaggttgagaagaagcagctggaagccctgcggtctatgatggaggccggagaatccgctagccccgccaacattttggaggacgataacgaggaagagatcgagagtgccgatcaagaagaagaagcgcacccggaattcaaatttggaaatgaactctctgcggatgacctggggcacaaagaggcagtcgcaaacagcgtgaagaaagggctagtgacggtagaagatgaacaggcgtggatggcgagttacaagtatgtcggagccaccactaacatccacccctatttgtctactatgatcaattacgctcagccagtgaagttccagggttttcacgtcgccgaggaacgaaatatccactataatatgtcctctttcaacgagagcgtgggacttggctacctgaagacacatgcaatcgagttcgtgaactacaataaaaggcagatgtctcggatatacccaaagggcggcagggtggactcaagcaattacatgccacaaatattctggaatgcggggtgtcagatggttagtctcaattatcagacaccagacctggccatgcaactgaaccagggcaaatttgaatacaatggcagttgcggatacttgctgaaacctgactttatgagacgtccagatcggacctttgacccattttcggagacccctgtcgacggggttatcgccgctacctgctctgtgcaggtgatttctgggcagtttctaagcgacaagaagatcgggacgtacgtcgaggttgatatgtacgggctgcccactgacacaatcaggaaggagtttagaactagaatggtgatgaataatggattaaatccagtgtataacgaagaatccttcgtgtttcgtaaagtcatccttcctgacttagctgtactgaggattgctgtgtacgatgataacaacaaattgattggacagcgcatcctgccacttgatggtttacaggcaggataccgacatatttcattgcgtaatgaaggtaataagcccttaagtcttcctactatattttgcaatattgttcttaaaacatacgtgcccgatgggttcggggacatcgtggacgcgctgtcggatcccaagaaatttctgagcatcaccgagaaacgcgcagatcagatgcgggcaatgggaattgagacttccgacattgccgacgtgccctctgacacgagcaagaatgataagaaaggaaaagcaaatacagccaaggctaatgttactccgcagagtagcagcgaactgcgccccactaccaccgccgccctggctagtggagtcgaggctaaaaagggtatcgaattgatacctcaggtcagaatcgaggacctgaagcagatgaaagcctacctgaagcatctgaagaagcagcagaaagagctgaattctctgaaaaaaaaacatgccaaggagcattccactatgcagaaactgcattgtacccaggtggataaaatcgtagcccagtacgacaaagagaaatccactcacgagaagatcctggagaaggcaatgaagaagaagggaggaagcaactgtcttgagatgaaaaaggagactgaaataaaaatccagacattaacgtctgaccacaaaagtaaggtgaaagagatcgtcgcccagcacacgaaggaatggtctgagatgataaacacacatagcgccgaggagcaagagatccgcgacttgcacctgagccaacagtgcgagttacttaaaaaactcctgatcaacgcccacgaacagcaaactcaacagctgaaactcagccacgaccgcgagtctaaagagatgagggcccaccaggcgaaaatcagcatggagaattcaaaggccatcagtcaggacaaatccatcaaaaacaaagcagaacgggaacggcgggtgcgagaactgaatagttctaatacgaagaagttcttggaggaacggaaacgacttgctatgaagcaaagcaaagaaatggaccaactcaagaaggtccagttggaacacctggagtttctggagaaacaaaacgagcaggctaaggagatgcagcagatggtgaagctcgaagctgagatggacagaagacctgccacagtggtgtag

SEQ ID NO: 256964 - DNA, 3528 bp, Artificial Sequence
  derived and/or modified sequence
atggccaagccatacgaatttaattggcagaaagaggtcccatcattcctacaggagggcgccgtgtttgacaggtacgaagaggagtctttcgtttttgagccaaattgcctgttcaaagtagatgagttcgggttttttctaacctggagaagtgaaggaaaagaaggacaagtcttggaatgttctctgataaactccattagaagtggcgcaattccgaaagaccctaagatactggccgccctagaggccgtgggaaaatccgaaaacgatctggaaggcaggatcgtgtgcgtgtgcagtggcactgacttggtcaatattagcttcacctacatggtggccgagaatcccgaggttacaaaacaatgggttgagggactgcggtccatcattcataacttccgggctaacaacgtcagtcccatgacctgtttgaaaaagcattggatgaaactcgctttcatgacaaatacaaatgggaaaatccccgttcgatcgatcacgagaacgtttgcgtcaggcaagacagagaaggtaattttccaggcccttaaggaattgggcctcccaagtggtaaaaatgatgagattgagcccacagccttctcctatgagaagttttacgaactgacccagaagatatgtcccaggacagatattgaagatctattcaagaaaattaacggcgataagaccgattacctcactgttgaccagttggtatcgttcttgaacgagcaccagcgggacccccgcctgaatgagatcctttttcctttctacgatgccaagagagccatgcaaattatcgagatgtacgaacctgatgaagacctcaagaagaagggtctgatcagtagcgatgggttctgccggtacctgatgagcgatgagaacgcccccgtcttcttagatcggctggaactatatcaggagatggaccacccccttgctcactattttatctcgtcctctcacaatacctatcttactggtaggcagttcggggggaagtcatctgtggagatgtacagacaggtgttactggctgggtgccgctgtgttgaacttgactgttgggacggtaaaggggaggaccaagagcccatcatcactcacggtaaagccatgtgtaccgacatactgttcaaggacgttatccaggccatcaaggaaaccgcctttgtcacgagcgagtatcccgtgatcttgtccttcgagaaccattgcagcaagtaccaacagtacaagatgtctaagtattgtgaggacctctttggcgacctgctgctgaaacaggcacttgaatctcaccctctggagcccggacgggccctgccatctcccaacgacctgaagaggaagattctaatcaaaaacaaacggctgaagcctgaggtggagaagaagcagctagaagctcttcggagcatgatggaagccggggaatccgcaagtccggctaacattttagaagacgacaacgaagaggagattgagtccgctgatcaggaagaggaggcacaccccgagtttaagttcggtaacgaactgtccgccgacgatcttggtcacaaggaagctgtcgccaattctgtcaaaaagggcctagtgaccgtcgaggacgaacaggcttggatggcctcttacaaatacgtgggagctaccactaacatccatccgtatctatcgacaatgatcaattacgctcagcccgtgaaattccaggggtttcatgtcgccgaggagcggaatatccactataacatgagctcatttaacgaaagtgttggcctgggctacctcaagactcacgcaatagagttcgtaaactataacaagcggcagatgtcacgcatttatccaaagggtgggcgtgtcgactcgtccaattacatgcctcagatcttctggaatgcagggtgccaaatggtttcactcaattaccaaacgcctgatctagctatgcagctgaatcaggggaaatttgaatacaacgggtcatgtggctatcttctgaagccagatttcatgcgtcgtcccgatagaacatttgatcccttctctgagacgcccgtggatggagtgatcgcagctacatgctcagtgcaggtgatttccgggcaatttctgtccgataagaaaattggcacctatgtggaagtggacatgtacggactgccaacggataccataagaaaggaatttaggacaagaatggtgatgaataacggacttaacccggtgtacaatgaagaatcattcgtcttccggaaggtgattctgccagacctggcagtactgcgaatagccgtgtacgatgacaataataaactaattggacagcgtattttgcccttagacggcctgcaggccgggtatagacatatctccttgaggaacgagggcaacaagcccctgagtctgcccacgatcttttgtaacatagtgctcaagacttacgtcccagacggatttggggatattgttgacgctctttctgatcccaaaaagttcctcagcatcacagaaaaaagggctgaccagatgagggccatgggcattgagaccagtgacatagcagacgtgccttccgatacttctaaaaatgataaaaagggaaaggccaacaccgccaaggccaatgtaaccccccaatccagcagtgagctgcgcccgaccacaaccgccgccctggcctcaggcgtagaagctaagaagggtattgaattgataccacaggttcgaattgaggacctcaaacagatgaaggcgtacttgaagcatctcaaaaagcagcaaaaggagctaaacagtctcaaaaaaaaacacgcaaaagaacactcaaccatgcaaaagctccactgcacccaggtcgataaaatcgtggcacagtacgacaaagaaaagtcaacccacgagaagatcctggaaaaagcaatgaagaagaagggaggttccaactgccttgagatgaaaaaggagacggagattaagatccagacccttacctcagatcacaaaagcaaagtcaaggaaattgttgctcaacatacaaaggaatggagcgagatgatcaatacacattctgcggaagaacaggaaatcagagatttgcacctgagtcagcagtgtgagctgctcaagaaacttttgattaatgctcacgaacagcaaacacagcagctgaaactgtcacatgatcgagagtcaaaggaaatgagggcgcatcaggcaaagatcagtatggaaaattccaaagccattagccaagacaagagcattaagaacaaagccgagagggagagacgggtacgtgagttaaactcatctaacactaagaagttcttggaggagcgcaagaggctggcaatgaagcaatccaaagagatggaccagctgaaaaaagttcaactcgagcatttagagtttcttgagaaacagaatgaacaggcaaaagaaatgcaacagatggtcaagttggaagccgaaatggatcgccgccctgctaccgtggtttag

SEQ ID NO: 256965 - DNA, 3528 bp, Artificial Sequence
  derived and/or modified sequence
atggccaagccctatgagttcaactggcagaaggaggtgcccagcttcctgcaggagggcgctgtgtttgacagatatgaggaggagagctttgtgtttgagcccaactgcctcttcaaggtggatgaatttggcttcttcctgacctggaggtctgagggcaaggagggccaggtgctggagtgcagcctcatcaacagcatccgcagcggggccatccccaaggaccccaagatcctggccgccctggaggccgtgggcaagtcagaaaatgacctggagggcagaattgtgtgtgtgtgcagcggcacagacctggtgaacatctccttcacctacatggtggctgaaaatcctgaggtgaccaagcagtgggtggagggcctgcggagcatcatccacaacttccgggccaacaacgtgagccccatgacctgcctgaagaagcactggatgaagctggccttcatgaccaacaccaacgggaagatccctgtgcgcagcatcaccaggacctttgccagcggcaagacagagaaggtgatcttccaggccctgaaggagctgggcctgcccagcggcaagaatgatgaaattgagcccacagccttctcctatgagaagttctatgagctgacccagaagatctgccccaggacagacattgaagatctcttcaagaagatcaacggggacaagacagactacctgactgtggaccagctggtgtccttcctgaatgagcaccagagggacccccggctgaatgagatcctcttccccttctatgatgccaagagggccatgcagatcatcgagatgtatgagccagatgaggacctgaagaagaagggcctcatcagcagtgatggcttctgccgctacctgatgtctgatgaaaatgcccctgtgttcctggaccggctggagctgtaccaggagatggaccaccccctggcccactacttcatcagcagcagccacaacacctacctgaccggccggcagtttggaggcaagagctctgtggagatgtaccggcaggtgctgctggccggctgccgctgtgtggagctggactgctgggatggaaaaggagaggaccaggagcccatcatcacccacggcaaggccatgtgcacagacatcctcttcaaggatgtgatccaggccatcaaggagacagcctttgtgaccagcgagtaccctgtgatcctgagctttgagaaccactgcagcaagtaccagcagtacaagatgagcaagtactgtgaggacctgtttggagacctgctgctgaagcaggccctggagagccaccccctggagcccggccgggccctgcccagccccaatgacctgaagaggaagatcctgatcaagaacaagaggctgaagccagaggtggagaagaagcagctggaggccctgcgctccatgatggaggccggggagagcgccagccctgccaacatcctggaggatgacaatgaggaggagattgaatctgctgaccaggaggaggaggcccaccctgagttcaagtttggaaatgagctgtctgcagatgacctgggccacaaggaggccgtggccaacagcgtgaagaagggcctggtgacagtggaggatgagcaggcctggatggccagctacaagtatgtgggcgccaccaccaacatccacccctacctgagcaccatgatcaactatgcccagcctgtgaagttccagggcttccacgtggccgaggagaggaacatccactacaacatgagcagcttcaatgaatctgtgggcctgggctacctgaagacccacgccattgaatttgtgaactacaacaagaggcagatgagccgcatctaccccaagggcggccgggtggacagcagcaactacatgccccagatcttctggaatgccggctgccagatggtgtccctgaactaccagaccccagacctggccatgcagctgaaccagggcaagtttgagtacaacggcagctgtggctacctgctgaagccagacttcatgagaagaccagacaggacctttgaccccttcagcgagacccctgtggatggagtgattgctgccacctgcagcgtgcaggtgatcagcggccagttcctgagtgacaagaagattggcacctacgtggaggtggacatgtatggcctgcccacagacaccatcaggaaggagttccgcaccaggatggtgatgaacaacggcctgaaccctgtgtacaatgaggagagctttgtgttcaggaaggtgatcctgcctgacctggccgtgctgagaattgctgtgtatgatgacaacaacaagctgattggccagaggatcctgcccctggatggcctgcaggccggctaccgccacatcagcctgagaaatgaaggcaacaagcccctgagcctgcccaccatcttctgcaacatcgtgctgaagacctacgtgcctgatggctttggagacatcgtggatgccctgagtgaccccaagaagttcctgagcatcacagagaagagagctgaccagatgagggccatgggcatcgagaccagtgacattgctgatgtgcccagcgacaccagcaagaatgacaagaagggcaaggccaacacagccaaggccaacgtgaccccccagagcagcagcgagctgcggcccaccaccacagctgccctggccagcggcgtggaggccaagaagggcatcgagctgatcccccaggtgagaattgaggacctgaagcagatgaaggcctacctgaagcacctgaagaagcagcagaaggagctgaacagcctgaagaagaagcacgccaaggagcacagcaccatgcagaagctgcactgcacccaggtggacaagatcgtggcccagtatgacaaggagaagagcacccatgagaagatcctggagaaggccatgaagaagaagggcggcagcaactgcctggagatgaagaaggagacagagatcaagatccagaccctgaccagtgaccacaagagcaaggtgaaggagatcgtggcccagcacaccaaggagtggagcgagatgatcaacacccacagcgctgaggagcaggagatccgggacctgcacctgagccagcagtgtgagctgctgaagaagctgctgatcaatgcccacgagcagcagacccagcagctgaagctgagccatgaccgggagagcaaggagatgagggcccaccaggccaagatctccatggagaacagcaaggccatcagccaggacaagagcatcaagaacaaggccgagcgggagaggagagtgcgggagctgaacagcagcaacaccaagaagttcctggaggagaggaagaggctggccatgaagcagagcaaggagatggaccagctgaagaaggtgcagctggagcacctggagttcctggagaagcagaatgagcaggccaaggagatgcagcagatggtgaagctggaggccgagatggacagaagacctgccaccgtggtgtag

SEQ ID NO: 256966 - DNA, 3528 bp, Artificial Sequence
  derived and/or modified sequence
atggccaagccctacgagttcaactggcagaaggaggtgcccagcttcctgcaagaaggagccgtgttcgacagatatgaagaggaatctttcgtttttgagcccaattgtttgttcaaggtggatgagttcggcttttttctcacctggcgctcagaagggaaagagggccaggtgctcgaatgttcgctcatcaactccataaggtccggagccatcccaaaggaccccaagattctggccgctctcgaagcggttggaaaatcggaaaatgaccttgagggtcggatcgtgtgtgtgtgcagtggaaccgaccttgtgaatatcagctttacatatatggtagccgaaaatccggaggtgaccaaacagtgggtggaaggcctcagaagcataatacataacttccgcgcgaacaacgtcagcccaatgacgtgcctgaagaagcattggatgaaactggcgtttatgaccaatactaacggaaaaatccctgtcagaagcatcaccaggacatttgcctctggaaaaactgagaaggtgattttccaggctctgaaagagttgggattaccttctgggaaaaacgatgagatagagcccacagcttttagttatgagaaattttatgagttgacccagaaaatttgtccaagaacagacattgaagatttgtttaagaagattaatggcgataaaaccgattacctgaccgtggaccagctcgtctcatttctcaatgaacaccagagagatccccggctcaatgaaattctgttccctttctacgatgcgaagcgtgccatgcaaatcattgagatgtatgagcccgacgaagacctgaagaaaaagggcctcatttctagcgacggtttttgccgctatttgatgagtgacgagaacgcccctgtgtttctggaccgcctcgaactttatcaggaaatggaccacccattagctcattattttatctctagttcacataacacctatctcacagggaggcagttcgggggcaagagttccgtcgaaatgtacagacaggtgctgctcgcgggctgcaggtgcgtagagttagattgttgggacggtaagggtgaggatcaagagcccatcattacccacggcaaggcgatgtgcaccgacatccttttcaaggacgtgatccaggctattaaggagactgcattcgttacatccgagtatcccgtgatactctctttcgaaaatcattgcagcaagtatcagcaatacaagatgtcaaagtactgtgaagatttgtttggagatctcttgctgaagcaggcacttgagtcacaccccctcgagccgggacgcgccttgcccagtccaaatgatctcaagcggaaaattttgatcaaaaataagcggctgaaaccggaagtagagaagaagcagctggaggcactgagaagcatgatggaagctggtgagtctgcaagccccgcaaacatcctggaagatgataacgaggaagaaatagagtcggccgatcaggaggaggaggcgcacccggaatttaagtttggcaacgagctgtcagccgatgatctgggacataaggaggcagttgcaaatagcgtgaagaaaggtctagtcactgtagaggacgagcaggcgtggatggcttcctataaatacgtcggcgcaacaacaaacatacatccatacctgagcaccatgatcaattacgctcagcccgtcaagtttcaggggtttcatgtggccgaagagcgcaacatacattacaacatgtcgtcatttaatgagagtgtgggattgggttacctgaagacccatgcgatcgagtttgtcaattataataaacggcagatgtccaggatatacccaaaaggaggcagggtagactcaagtaattacatgcctcagatcttttggaacgcaggatgtcagatggttagcctgaactatcaaacaccggatctggcgatgcagttgaatcagggtaagtttgagtacaacggatcttgcgggtacctgcttaaacccgactttatgcggcggcccgatcgcaccttcgacccttttagcgagacgcctgtggacggcgtgatagcggcgacctgcagtgtacaggtaatatcgggacagttcctatctgataagaaaataggcacttacgtcgaagtggatatgtacggactgcctacggatacgatccggaaggagtttcgcactcgcatggtaatgaataatgggctcaaccccgtgtacaatgaagaatccttcgtgttcaggaaggtcatcctgccagacctggctgtgctgcggatcgccgtgtacgacgataacaacaaactgataggacagcgtattcttcctctggacggactgcaagccggctacagacatatcagtttgaggaacgaaggaaataagccacttagcctccccacaatattttgtaacatagtcttgaagacctatgtaccagatggcttcggggatattgtagacgctctgtccgatcccaaaaagttcctttcaattactgagaagcgcgctgaccaaatgagagctatgggaatcgagacttccgatattgccgacgtgcccagcgacaccagcaaaaacgataagaagggcaaagcaaacactgccaaagccaatgtgaccccccaatcgagctccgaactgcgtcctacaaccacagctgctctggcgtccggggtggaggccaagaaaggcatagagcttataccccaggtgagaatagaagacctgaagcagatgaaggcatacctgaagcacctgaagaaacaacagaaggagctcaattccctcaaaaagaaacacgcgaaagagcacagtaccatgcagaagctgcactgcacccaagtggataaaatcgtagcacagtacgacaaggaaaagtcaacacacgagaaaatcctggagaaagccatgaagaagaagggcggaagcaattgtctggaaatgaaaaaagagaccgagataaagattcaaacactaacatcagatcacaaatccaaggtgaaagaaatcgtcgctcagcacaccaaagagtggtcagagatgatcaatacacactccgctgaggagcaagagatcagggatctacatctatcccagcagtgcgagctgcttaagaaacttttgattaatgcccatgagcagcagacccagcagctgaagctcagccatgacagggagagtaaggaaatgagggcacatcaggccaaaattagtatggaaaattcaaaagcgatcagccaggataagagcatcaagaataaggctgaacgagaacgacgcgttcgggaacttaatagctccaacacaaaaaaattcttggaagagagaaagcgactggcaatgaaacagagcaaggaaatggatcagttgaaaaaagttcagctcgaacacctcgaattccttgagaaacagaacgagcaggcgaaagaaatgcagcagatggtcaagctggaagccgaaatggataggagacctgccacagtagtatag

SEQ ID NO: 256967 - DNA, 3528 bp, Artificial Sequence
  derived and/or modified sequence
atggccaagccctacgagttcaactggcagaaggaggtgcccagctttctgcaagagggagctgtctttgacaggtatgaagaggagagtttcgtcttcgaaccaaactgtctttttaaggtggatgagtttggattttttctcacatggaggtccgagggcaaggagggtcaggtgttggagtgtagccttattaattccattcgcagcggcgccatccccaaagatccaaagatcctcgcagcactggaggccgtgggcaagtcagaaaatgatcttgaaggcagaattgtgtgtgtttgctctggaaccgacctcgtaaacatctcttttacatacatggtagcggaaaaccctgaggtaaccaaacagtgggttgagggcctgagatctataatacataacttccgcgctaataacgtgagcccaatgacatgcttgaaaaagcattggatgaagcttgcctttatgacgaacacaaacgggaaaataccagtgagatccattactcgcacatttgcttccggtaaaaccgagaaggtgatctttcaggctcttaaagagttggggctcccatctggtaaaaacgatgagatcgagccaaccgccttctcctacgagaagttttacgagctcacacaaaaaatttgtccaaggacagacatcgaggaccttttcaaaaagattaatggagacaagacagattacctgacagtcgaccagttagtgagtttcctgaacgaacaccaacgggacccgcgtcttaatgaaattctattccctttttatgatgcaaagagggctatgcagatcatcgagatgtacgaaccagacgaggatctaaaaaaaaaggggctcatttccagcgacggcttctgccggtaccttatgagtgacgagaacgcgccggtgttcctggaccggctggaactgtatcaggaaatggaccaccctctcgcacattacttcataagctcctcacacaacacgtacctgacaggaagacagttcggaggaaaatcttctgttgagatgtatcgccaggtcttgctggcagggtgcaggtgtgtcgaattggactgctgggacggcaagggggaggatcaggagccaattattacacacggaaaagccatgtgcaccgacatcctgtttaaggacgttattcaagcaattaaagagactgcattcgtcactagcgagtatccagtgatcctcagtttcgagaaccactgttccaagtaccagcagtacaagatgtccaagtattgtgaggacttatttggggacctcctactgaagcaagcactggagagccatccgctggagccggggcgagccttgccgagtccgaatgacctgaagagaaaaatattaattaagaataaacggctgaaacctgaggtggagaaaaaacagttagaggccctccgaagcatgatggaagctggcgagagtgccagtcctgccaacatcctggaggacgacaatgaagaggagattgagtcagctgaccaggaggaagaagcccaccctgagtttaagtttgggaacgaactgtctgccgacgacttggggcataaggaagccgtcgccaattcagtgaaaaaagggttggtgactgtcgaggacgaacaggcctggatggcctcttacaagtatgttggtgctactaccaacatccatccctatttatctacaatgattaactacgcccagcctgttaagttccaggggttccacgtcgcggaggaacggaacattcactataacatgtcatcatttaatgaatccgtgggcctcggatatctgaaaacccatgcaatagagttcgtcaattataacaaacgtcagatgagtcgcatatacccaaaaggcggtagagtggattcctctaattatatgccacagattttctggaatgccggctgccagatggtaagtctgaactaccagactccagatctggccatgcaactgaaccagggtaagtttgagtacaacggctcctgtggttacctcctcaagccagacttcatgcgtagacccgatagaacctttgaccctttttcagagacaccggtggatggtgtcatcgcggccacatgcagtgtacaggtgatttcaggacagttcctctccgataagaagatcggcacatatgttgaggtagacatgtatgggctgccaaccgacactattcgaaaggagtttaggacccgaatggttatgaacaacgggctcaatcccgtctataacgaggagtcattcgttttcaggaaagtgatcttacccgatctcgccgtcctccgaatcgctgtttacgacgataacaacaagctcatcggacagaggatactaccactcgatggactccaggcagggtatcggcacatcagtctgcgaaatgagggcaataaacccctcagtttaccaacgattttttgcaacatagtgctgaagacttacgtccctgacgggttcggtgacattgtagatgcgctatctgaccctaagaaattcttgtctataacagagaagagagccgatcagatgagagcgatgggcattgaaactagcgacatcgccgatgttccttcagatacgagtaagaacgacaagaaaggaaaagcaaacactgccaaagctaacgtaactcctcagagttcctccgaattgagacctaccaccaccgccgcccttgcttcgggcgtcgaggctaagaagggcatagaactgatcccccaggtcaggattgaagacctcaagcagatgaaggcctacctcaagcatctgaagaaacagcagaaagagctcaattctttgaaaaagaaacatgcaaaagaacacagcactatgcaaaaactgcactgcactcaggttgacaaaattgtcgctcagtacgataaggagaagtccacacatgaaaaaatcttggaaaaggcaatgaagaagaagggtggctctaattgcctggagatgaagaaagaaactgagattaaaatccagactctgaccagtgaccacaagtctaaggtgaaggagatagtcgctcagcacaccaaggagtggtccgagatgatcaatacacatagcgcagaagagcaagagattcgggatcttcacctttctcagcagtgcgaactgctgaaaaagctgctgattaatgcacatgaacagcagacccagcagctgaagctgtctcacgatagagaatccaaggagatgagagctcatcaagcgaagatcagtatggaaaactcaaaggcaatctcacaggataaaagcatcaaaaacaaggctgaacgtgagcgaagagtgagagagctgaacagcagtaatacgaagaagtttctggaagaacgcaagagactggccatgaaacagtcaaaggaaatggatcaactgaagaaagttcaactcgaacatttggagttcctcgagaagcagaacgaacaggcaaaggaaatgcagcagatggtgaagctagaggctgaaatggaccggaggcccgctaccgtggtttag

SEQ ID NO: 256968 - DNA, 5430 bp, Artificial Sequence
  derived and/or modified sequence
aggacagtgctgctgtgagtttgacgaagtggacatcacctgcagtcagtccagagctgcccagtcttgaatataatcatggccaaaccttatgaatttaactggcagaaggaagttccctcctttttgcaagaaggagcagtttttgacagatacgaggaggaatcctttgtgtttgaacccaactgcctcttcaaagtggatgagtttggcttctttctgacatggagaagtgaaggcaaggaaggacaggtgctagaatgctccctcatcaacagtattcggtcgggagccataccaaaggatcccaaaatcttggctgctcttgaagctgttggaaaatcagaaaatgatctggaagggcggatagtttgtgtctgcagtggcacagatctagtgaacattagttttacctacatggtggctgaaaatccagaagtaactaagcaatgggtagaaggcctgagatcaatcatacacaacttcagggccaacaacgtcagtccaatgacatgcctcaagaaacactggatgaaattggcatttatgaccaacacaaatggtaaaattccagttaggagtattactagaacatttgcatcgggaaaaacagaaaaggtgatctttcaagcactcaaggagttaggtcttcccagtggaaagaatgatgaaattgagcccacagcattttcttatgaaaagttctatgaactgacacaaaagatttgtcctcggacagatatagaagatcttttcaaaaaaatcaatggagacaaaactgattatttaacggtagaccaattagtgagctttctaaatgaacatcaacgagatcctcgattgaatgaaattttatttccattttatgatgccaaaagggcaatgcagatcattgagatgtatgaacctgatgaagatttgaagaaaaaaggccttatatcaagtgatgggttttgcagatatctgatgtcagatgaaaacgccccagtcttcctagatcgtttagaactttaccaagaaatggaccatcctctggctcactacttcatcagttcttcccataacacttatctcactggcagacagttcggcgggaagtcttcggtagaaatgtacagacaggttctcctggctggttgcagatgtgttgaacttgactgctgggatggaaaaggtgaagaccaagaaccaataataactcatggaaaagcaatgtgtacagatatcctttttaaggatgtaattcaagccatcaaggaaactgcatttgtcacatcagaatatcctgtaattctctcctttgaaaatcactgcagcaaatatcaacagtacaagatgtccaaatattgcgaagatctatttggggatctcctgttgaaacaagcacttgaatcacatccacttgaaccaggcagggctttgccatcccccaatgacctcaaaagaaaaatactcataaaaaacaagcggctgaaacctgaagttgaaaaaaaacagctggaagctttgagaagcatgatggaagctggagaatctgcctccccagcaaacatcttagaggacgataatgaagaggagatcgaaagtgctgaccaagaggaggaagctcaccccgaattcaaatttggaaatgaactttctgctgatgacttgggtcacaaggaagctgttgcaaatagcgtcaagaagggcctggtcactgtagaagatgagcaggcgtggatggcatcttataaatatgtaggtgctaccactaatatccatccatatttgtccacaatgatcaactacgcccagcctgtaaagtttcaaggtttccatgtggcagaagaacgcaatattcattataacatgtcttcttttaatgaatcagtcggtcttggctacttgaagacacatgcaattgaatttgtcaattataacaaacggcaaatgagtcgcatttaccccaagggaggccgagtcgattccagtaattacatgcctcagattttctggaacgctggctgccagatggtttcactgaactatcaaaccccagatttagcgatgcaattgaatcagggaaaatttgagtataatggatcgtgcgggtaccttctcaaaccagatttcatgaggcggcctgatcgaacatttgaccccttctctgaaactcctgttgatggtgttattgcagccacttgctcagtgcaggttatatcaggtcaattcttatcagataagaaaattggcacctacgtagaggtggatatgtatgggttgcccactgacaccatacgtaaggaattccgaactcgcatggttatgaataatggactcaatccagtttacaatgaagagtcatttgtatttcggaaggtgatcctgccggacctggctgtcttgagaatagctgtgtatgatgataacaacaagctgattggccagaggatcctcccgcttgatggcctccaagccggatatcgacacatttcccttcgaaatgagggaaataaaccattatcactaccaacaattttctgcaatattgttcttaaaacatatgtgcctgatggatttggagatatcgtggatgctttatcagatccaaagaaatttctctcaattacagaaaagagagcagaccaaatgagagctatgggcattgaaactagtgacatagccgacgtgcccagtgacacttccaaaaatgacaagaaaggaaaggccaacaccgccaaagcaaatgtgacccctcagagtagctctgagctcagaccaaccaccacggctgccctggcctctggtgtggaagccaagaaaggtattgaacttatccctcaagtaaggatagaagacttaaagcagatgaaggcttacttgaagcatttaaagaaacagcagaaggagctaaattctttaaagaagaaacatgcaaaggaacacagtaccatgcagaagttacactgcacgcaagttgacaaaattgtggcacagtatgacaaagagaagtcgactcatgagaaaatcctagagaaggcaatgaagaagaaggggggaagtaattgtctcgaaatgaaaaaagaaacagaaatcaaaattcagacgctgacatcagatcacaaatctaaggtcaaagagattgtagcacagcacacaaaggaatggtcagaaatgatcaatacccacagtgctgaggagcaagaaatccgagacctgcacctcagccagcagtgtgagctgctgaaaaagctactcatcaatgcccacgagcagcaaacccagcagctgaaactgtcccatgacagggaaagcaaggaaatgcgagcacaccaggctaagatttctatggaaaatagcaaagccatcagccaagataaatctatcaagaataaagcagaacgggaaaggcgagtcagggagttaaacagcagcaacactaaaaagtttctggaagaaagaaagagacttgccatgaagcagtccaaagaaatggatcagttgaaaaaagtccagcttgaacatctagaattcctagagaaacagaatgagcaggcgaaggagatgcagcagatggtgaaattggaagccgagatggaccgcagaccagcaacagtagtatgaaactccaaaatgcaaactgaagcagcaaacccacaaagcatcaaaagactcactcacaaacttctgaacacaaactccatggatgaaagctgtttattttgtttcctttatgtgtaaacaagatgatatctgaaaccagagagacttggaatgtctgactgacttctatttaacagcttgagtattgcatttccttggccaaacaaaaatagctacaaatccacaaaaatttactattccagtaaggcagagtccaaccattgataatacaacttaaacatgtttgctataaaataccatcacaagtaaatgagcttggtgtgaacaactctcctttgtgatgccttaggacatgtttgaactgcagcaaaaaacaaaaacaaaaaacagtgcattagcaatttcatagcaagtgcatgcactaggaaaagaaaactctgtctacaagtttattagcagaagtggtggtctgctagacaaataattttgcaaaatttttctacatctaagttacctcatcagtaagtgccatgtctctaccatgccatcagaggctaatttcctgtaaaagttgtggaaattgttagaacaatagaaaaatagagcagtgtatgtgtgccaaaactcatcattactcaaaggagaactgtgttaggcacatttaagaaagtttacatctgacattgctttataggaattgtttctgcagattccggatattataattcacaccataaagattgtgaagtggttattggcaaacgtttgtaaatgtgaccatgtataaagtatttatactctttaattcacactgttagagagcaaaatcatctaagtattgccacatgacaagattagtaaacaggaatactagaactatgtttgcatgatacacaagcaccaataaagactaatccatacacagttaacctaatgccaaataaatactggttaaataaatgtatggcacagaatataatttgactatcaagacttttagcataatgaaaaaccctctctctatatatatatgtgtatatgaattatgtgggcattcttgatacttcaagttctagtttgaaaaaaatacataactaatttaattttacacaaaaatatttatgcagattttcagaatttcatatcaggaaatgacctttttatgtctgttaaatatcaaaacaatttgctacagtgttaatctgcatggtctttaagcctgctgtagttgagttgcagacagtgcatgaaaaagtattccgctgggaattgagccatgccaccaaagccaagaggagcgcatggaaacccggtagtctagaactaatcagattactgattttagggcacagcaccagatgaattgttgtatatgcttgtaaaaattgattctgtgtgttcctctgaacaaagcggagaaaatgatgataccatcaatattgaaattaaacttccaacttctctaataaaaaattaaaacacgcataacactcgtcaagagtatttgctcccaagacacattctagcaaatgttttgcctttttcatatacatgatatcatcgttattttcaaagggggcttattaataccctcagcatgtttttcacccaaatgatgcaaaacatgcagattctagttgacttcagttgtaatagacttgtttttctcctatttatgatttgaagtggattctgtaaaatatctcttgttcttagtttccttatctgtaaaacagtggagttagactacatatcttttggcactaacatctcatgaaaaattatggttaataaaatatcaccacatttggattgccaattttc

SEQ ID NO: 256969 - DNA, 5796 bp, Artificial Sequence
  derived and/or modified sequence
gtcttgaatataatcatggccaaaccttatgaatttaactggcagaaggaagttccctcctttttgcaagaaggagcagtttttgacagatacgaggaggaatcctttgtgtttgaacccaactgcctcttcaaagtggatgagtttggcttctttctgacatggagaagtgaaggcaaggaaggacaggtgctagaatgctccctcatcaacagtattcggtcgggagccataccaaaggatcccaaaatcttggctgctcttgaagctgttggaaaatcagaaaatgatctggaagggcggatagtttgtgtctgcagtggcacagatctagtgaacattagttttacctacatggtggctgaaaatccagaagtaactaagcaatgggtagaaggcctgagatcaatcatacacaacttcagggccaacaacgtcagtccaatgacatgcctcaagaaacactggatgaaattggcatttatgaccaacacaaatggtaaaattccagttaggagtattactagaacatttgcatcgggaaaaacagaaaaggtgatctttcaagcactcaaggagttaggtcttcccagtggaaagaatgatgaaattgagcccacagcattttcttatgaaaagttctatgaactgacacaaaagatttgtcctcggacagatatagaagatcttttcaaaaaaatcaatggagacaaaactgattatttaacggtagaccaattagtgagctttctaaatgaacatcaacgagatcctcgattgaatgaaattttatttccattttatgatgccaaaagggcaatgcagatcattgagatgtatgaacctgatgaagatttgaagaaaaaaggccttatatcaagtgatgggttttgcagatatctgatgtcagatgaaaacgccccagtcttcctagatcgtttagaactttaccaagaaatggaccatcctctggctcactacttcatcagttcttcccataacacttatctcactggcagacagttcggcgggaagtcttcggtagaaatgtacagacaggttctcctggctggttgcagatgtgttgaacttgactgctgggatggaaaaggtgaagaccaagaaccaataataactcatggaaaagcaatgtgtacagatatcctttttaaggatgtaattcaagccatcaaggaaactgcatttgtcacatcagaatatcctgtaattctctcctttgaaaatcactgcagcaaatatcaacagtacaagatgtccaaatattgcgaagatctatttggggatctcctgttgaaacaagcacttgaatcacatccacttgaaccaggcagggctttgccatcccccaatgacctcaaaagaaaaatactcataaaaaacaagcggctgaaacctgaagttgaaaaaaaacagctggaagctttgagaagcatgatggaagctggagaatctgcctccccagcaaacatcttagaggacgataatgaagaggagatcgaaagtgctgaccaagaggaggaagctcaccccgaattcaaatttggaaatgaactttctgctgatgacttgggtcacaaggaagctgttgcaaatagcgtcaagaagggcctggtcactgtagaagatgagcaggcgtggatggcatcttataaatatgtaggtgctaccactaatatccatccatatttgtccacaatgatcaactacgcccagcctgtaaagtttcaaggtttccatgtggcagaagaacgcaatattcattataacatgtcttcttttaatgaatcagtcggtcttggctacttgaagacacatgcaattgaatttgtcaattataacaaacggcaaatgagtcgcatttaccccaagggaggccgagtcgattccagtaattacatgcctcagattttctggaacgctggctgccagatggtttcactgaactatcaaaccccagatttagcgatgcaattgaatcagggaaaatttgagtataatggatcgtgcgggtaccttctcaaaccagatttcatgaggcggcctgatcgaacatttgaccccttctctgaaactcctgttgatggtgttattgcagccacttgctcagtgcaggttatatcaggtcaattcttatcagataagaaaattggcacctacgtagaggtggatatgtatgggttgcccactgacaccatacgtaaggaattccgaactcgcatggttatgaataatggactcaatccagtttacaatgaagagtcatttgtatttcggaaggtgatcctgccggacctggctgtcttgagaatagctgtgtatgatgataacaacaagctgattggccagaggatcctcccgcttgatggcctccaagccggatatcgacacatttcccttcgaaatgagggaaataaaccattatcactaccaacaattttctgcaatattgttcttaaaacatatgtgcctgatggatttggagatatcgtggatgctttatcagatccaaagaaatttctctcaattacagaaaagagagcagaccaaatgagagctatgggcattgaaactagtgacatagccgacgtgcccagtgacacttccaaaaatgacaagaaaggaaaggccaacaccgccaaagcaaatgtgacccctcagagtagctctgagctcagaccaaccaccacggctgccctggcctctggtgtggaagccaagaaaggtattgaacttatccctcaagtaaggatagaagacttaaagcagatgaaggcttacttgaagcatttaaagaaacagcagaaggagctaaattctttaaagaagaaacatgcaaaggaacacagtaccatgcagaagttacactgcacgcaagttgacaaaattgtggcacagtatgacaaagagaagtcgactcatgagaaaatcctagagaaggcaatgaagaagaaggggggaagtaattgtctcgaaatgaaaaaagaaacagaaatcaaaattcagacgctgacatcagatcacaaatctaaggtcaaagagattgtagcacagcacacaaaggaatggtcagaaatgatcaatacccacagtgctgaggagcaagaaatccgagacctgcacctcagccagcagtgtgagctgctgaaaaagctactcatcaatgcccacgagcagcaaacccagcagctgaaactgtcccatgacagggaaagcaaggaaatgcgagcacaccaggctaagatttctatggaaaatagcaaagccatcagccaagataaatctatcaagaataaagcagaacgggaaaggcgagtcagggagttaaacagcagcaacactaaaaagtttctggaagaaagaaagagacttgccatgaagcagtccaaagaaatggatcagttgaaaaaagtccagcttgaacatctagaattcctagagaaacagaatgagcaggcgaaggagatgcagcagatggtgaaattggaagccgagatggaccgcagaccagcaacagtagtatgaaactccaaaatgcaaactgaagcagcaaacccacaaagcatcaaaagactcactcacaaacttctgaacacaaactccatggatgaaagctgtttattttgtttcctttatgtgtaaacaagatgatatctgaaaccagagagacttggaatgtctgactgacttctatttaacagcttgagtattgcatttccttggccaaacaaaaatagctacaaatccacaaaaatttactattccagtaaggcagagtccaaccattgataatacaacttaaacatgtttgctataaaataccatcacaagtaaatgagcttggtgtgaacaactctcctttgtgatgccttaggacatgtttgaactgcagcaaaaaacaaaaacaaaaaacagtgcattagcaatttcatagcaagtgcatgcactaggaaaagaaaactctgtctacaagtttattagcagaagtggtggtctgctagacaaataattttgcaaaatttttctacatctaagttacctcatcagtaagtgccatgtctctaccatgccatcagaggctaatttcctgtaaaagttgtggaaattgttagaacaatagaaaaatagagcagtgtatgtgtgccaaaactcatcattactcaaaggagaactgtgttaggcacatttaagaaagtttacatctgacattgctttataggaattgtttctgcagattccggatattataattcacaccataaagattgtgaagtggttattggcaaacgtttgtaaatgtgaccatgtataaagtatttatactctttaattcacactgttagagagcaaaatcatctaagtattgccacatgacaagattagtaaacaggaatactagaactatgtttgcatgatacacaagcaccaataaagactaatccatacacagttaacctaatgccaaataaatactggttaaataaatgtatggcacagaatataatttgactatcaagacttttagcataatgaaaaaccctctctctatatatatatgtgtatatgaattatgtgggcattcttgatacttcaagttctagtttgaaaaaaatacataactaatttaattttacacaaaaatatttatgcagattttcagaatttcatatcaggaaatgacctttttatgtctgttaaatatcaaaacaatttgctacagtgttaatctgcatggtctttaagcctgctgtagttgagttgcagacagtgcatgaaaaagtattccgctgggaattgagccatgccaccaaagccaagaggagcgcatggaaacccggtagtctagaactaatcagattactgattttagggcacagcaccagatgaattgttgtatatgcttgtaaaaattgattctgtgtgttcctctgaacaaagcggagaaaatgatgataccatcaatattgaaattaaacttccaacttctctaataaaaaattaaaacacgcataacactcgtcaagagtatttgctcccaagacacattctagcaaatgttttgcctttttcatatacatgatatcatcgttattttcaaagggggcttattaataccctcagcatgtttttcacccaaatgatgcaaaacatgcagattctagttgacttcagttgtaatagacttgtttttctcctatttatgatttgaagtggattctgtaaaatatctcttgttcttagtttccttatctgtaaaacagtggagttagactacatatcttttggcactaacatctcatgaaaaattatggttaataaaatatcaccacatttggattgccaattttcaaagattctgagtggcttctcatcatcaaatcaaatcaaatccaagagctcaactatgctcaccattctgtaacacttgactgaattcatcacttgcctcctcttgtttctgctttggagaggtactactagtttttccatttttcttatttcttccctcttttcatcctcctaggccaccataagcatttatattttccagtgttatacatggaaccagtttgtttttctttgatccaggttacttttagtatttgagacatcataccattaatccattgtagtaggattaaaatgtacacacaactcaaatgtgcaacaaaagcatgtgttacctgctattgtcagttcatattgcactcaaaccttgcattatcccttattatgaagaaaaattaatagccaattaaagtaactcagtgtcttcca

SEQ ID NO: 256970 - DNA, 3528 bp, Artificial Sequence
  derived and/or modified sequence
atggcaaagccatacgaatttaactggcagaaagaggtgccaagcttccttcaagaaggcgcagtgttcgatcgctacgaagaggagtccttcgtgttcgaaccaaactgtctgtttaaagtggacgagtttggctttttcttgacctggcgaagcgagggaaaggaagggcaggtactggagtgctccctgataaattcaatacgaagcggcgcaatccctaaagacccaaagattttagctgccctggaagccgtcggcaaaagtgaaaatgacctcgagggcaggattgtgtgcgtctgctccgggactgacctggttaatattagtttcacgtacatggtggctgaaaacccagaagtaaccaagcaatgggttgaggggcttaggagtatcatacacaattttcgggctaacaatgtaagtcccatgacctgtttaaaaaagcactggatgaagctcgcattcatgacgaatactaatgggaagatacccgtaagatcaattacccggacgttcgcatccggaaagacagaaaaggtaatttttcaggcccttaaggagctggggttgccatctgggaaaaacgatgagatcgagcccacagccttctcttatgagaagttttacgagcttactcagaagatatgtcccagaaccgacatcgaggatcttttcaaaaaaataaacggtgacaagacagattacctgactgtggatcaattggtaagtttcttaaacgaacatcaacgtgatccacgattaaacgaaatactgttccccttttatgacgccaaaagggcaatgcagatcattgaaatgtacgagccagatgaggaccttaaaaagaaaggactcatttccagtgatggcttctgtcggtatcttatgtccgatgagaacgctcccgtttttctggacagactggagttgtatcaggagatggaccaccctttggcgcattactttatttcgtccagtcacaatacatacctcacaggtcgccaatttggcggaaagtcttccgtcgagatgtacagacaggtccttcttgcaggatgccggtgcgtggagctggactgctgggacggcaaaggagaagaccaagagccgatcatcacacacggcaaggcaatgtgtacggatatcttgttcaaggatgtcatccaggcaatcaaagagactgcattcgttacctccgaatatcccgtcatcctgtcattcgagaaccattgttcaaagtaccagcagtacaaaatgtcaaagtattgtgaagatctgttcggggatctcctcttaaagcaggctctggaatcccacccgctggagcctggacgggctctgccctcccccaacgacctgaagcgcaaaatacttatcaaaaacaagcggctcaagcctgaagtggagaaaaagcagctggaggccttgcgctcaatgatggaagctggcgaaagcgccagccccgctaatatccttgaggacgataacgaggaggaaatagagtcagcagatcaagaggaagaggcacacccagaattcaagttcgggaatgagctgagtgcagatgacttaggacataaagaggccgtcgccaatagtgtgaaaaagggactcgtcaccgtagaagatgagcaggcctggatggcatcatataagtacgtgggggctactacaaacattcatccctatttgagcactatgatcaactatgcccagcccgttaagttccagggatttcacgtggctgaggagagaaacatccactacaacatgtcaagttttaatgagtccgtgggtctcggctacctaaagacgcacgctatcgagtttgtcaattataataagaggcagatgtcaaggatttacccgaagggaggacgcgtagacagctctaattatatgccccagatattctggaacgccggatgtcagatggtctcgctgaattaccaaacacctgaccttgcaatgcagctgaatcaggggaagtttgagtacaatgggtcctgtggctatttgctcaaaccagacttcatgcgcagacctgaccgcacattcgatcctttttcagaaacccccgtggatggggtgatagccgctacctgtagcgtgcaggtgatttccggccaatttttaagcgacaagaagattggcacctatgtggaggtcgacatgtacggactgcccactgataccatccgaaaagaatttcggacaaggatggtgatgaacaacggtttgaatcctgtgtataatgaggagtcattcgtttttagaaaggtgatcctcccagaccttgcagtgctacgtatcgccgtgtatgacgataataacaaactgatcggccagcggatactccccctcgacggactccaggcaggttacagacacattagcctgaggaatgaagggaacaagccgctgagtcttccaacaattttctgtaacattgttttaaagacttacgtgcccgacggattcggggatattgtggatgctctgtcggatcctaaaaagtttctttccattacggagaaacgggcagaccagatgcgggctatgggaattgagacgagcgacatcgcggacgtgccttccgatacttcaaaaaatgataagaaggggaaggctaacaccgctaaagcaaatgtaacaccacagtcttccagtgaactgcgacctaccacaactgcggctctggcctcaggagttgaggccaaaaaaggcatagagctcatcccccaggtgcgtatcgaggatctgaagcagatgaaagcctatctcaagcacctgaagaagcagcagaaagagctcaacagtttgaagaaaaaacacgctaaagagcatagtacaatgcagaaactgcactgcactcaggtggacaagattgtggcccagtacgataaagaaaaatctacacacgagaagatactcgaaaaagcaatgaaaaagaaggggggaagcaactgccttgagatgaaaaaggaaaccgaaatcaaaattcagactctcacttctgaccacaaatctaaagtaaaagagatcgtggcccagcataccaaagaatggagtgaaatgattaatacccattctgcagaggagcaagaaattcgcgaccttcacctgtctcagcagtgcgagctcctcaagaagctgctgataaacgcacacgaacaacagacccagcagctgaaactcagccacgatagagagtcaaaggaaatgcgggctcaccaagctaagatctcaatggagaattctaaggccatttcacaggacaaaagcataaagaacaaagctgagcgagagaggagggtgcgggagctgaacagttccaatacaaagaagtttttggaggaacgcaaacgccttgccatgaaacagtccaaagaaatggatcaacttaaaaaggttcagctcgagcatctggaatttctggagaagcagaacgaacaggctaaggagatgcaacaaatggttaaactggaagccgaaatggatcgccgacctgctacggttgtttag

SEQ ID NO: 256971 - DNA, 3528 bp, Artificial Sequence
  derived and/or modified sequence
atggccaagccctacgagtttaattggcagaaagaggtgccttcttttctccaggagggtgccgtgtttgaccgctatgaagaggaatcttttgtgttcgaacctaactgcctatttaaggtggatgagttcggattctttctcacatggaggtccgagggaaaggaaggccaggtcctggaatgcagcctgatcaattcaatcagatcaggtgctatccctaaggacccaaaaatcctcgcggctctggaggcagtggggaagagcgaaaatgatctggagggaagaattgtctgtgtgtgcagcggcacagatctcgtcaacatatcctttacatacatggtggcagaaaatcctgaagtgactaagcaatgggtggagggccttaggtccattattcataattttagggcgaacaacgtctctcctatgacttgtcttaaaaaacattggatgaaacttgccttcatgaccaatacaaacgggaaaattccagttagatccatcaccaggacttttgcttccggtaagaccgagaaagtgatttttcaggctctgaaagaacttggactgcccagcggtaagaatgacgaaatcgagccaacagctttcagttatgaaaagttctacgaactgacacagaaaatctgtcctcggaccgacatcgaggatctgtttaagaaaatcaacggcgataagaccgattacctgacagtcgatcaactggtgtcattcttgaacgagcaccagagggatccacgactcaatgagattctatttccattctacgacgccaaaagggccatgcaaattattgaaatgtacgaaccagacgaagatctgaaaaaaaagggactgattagcagcgacgggttttgcagatatctgatgtcagatgaaaacgctcccgtgttcttagacagattggagctttaccaagagatggaccacccactggctcactacttcatctccagcagtcataatacctacctgacagggcgacagtttggcggaaagtcctcagtggagatgtaccggcaggtactcctggctggctgcagatgtgtcgaactcgattgttgggatggaaagggggaggatcaggaaccaatcataacacacggcaaggctatgtgtactgatatcctattcaaggacgtcattcaggcaataaaggaaacagctttcgtgacctcagaatatccagtaatactttcttttgagaaccattgttcaaagtaccagcagtataaaatgtctaaatattgtgaagacctctttggcgacttgctgctaaaacaggccctcgagtcacacccactggaacccggtcgggcactaccttctcccaatgatctcaaaaggaaaatcctgatcaagaataaaagactaaagcctgaagttgagaagaagcagctcgaagccttgcggtccatgatggaagccggtgagtcagcctctccggctaatatcctggaggatgataacgaagaagagatcgaatccgcagatcaagaggaggaagcccatcctgaatttaagttcgggaacgagctaagtgctgacgacctggggcacaaagaagccgtcgcaaactctgtgaagaagggcctggttacagtggaggatgagcaggcttggatggcctcttacaagtatgttggcgctaccacaaatattcatccttacctatccaccatgattaattacgcccagcctgtgaagtttcaaggctttcacgtggccgaggaacggaacatccattataatatgtcctcatttaacgaatcagtggggctaggctacttaaaaacacatgcaatcgagtttgttaattacaacaaaaggcagatgtcccggatctatcccaaaggcggtagagtggactccagcaactatatgcctcaaatcttttggaatgcaggatgtcagatggtatcactgaactaccagaccccggacctggcgatgcaactaaatcagggaaaatttgagtataatgggtcctgtggatatcttctgaagccagattttatgcggaggcccgaccggactttcgatcccttttcggaaactccggtggacggggtcatagccgcaacgtgtagtgtgcaggtcatttccggccagtttctgagcgataaaaagatagggacgtatgtagaggtggatatgtacggcctgcccacagacaccatcaggaaagaattccggactcgcatggtgatgaacaacgggctcaatcctgtatataacgaagagtcattcgtgtttcgtaaggtcattctacccgacttggctgtattgcgcatcgcggtgtacgatgacaataacaagctcattggacagcggattctgccgcttgacggactgcaggctggataccgtcacatctccttacgtaacgaggggaataagcctctgtcccttcctaccatcttctgcaacattgtactgaagacctacgttccagacggtttcggtgacattgtggacgcgctgagcgatcccaagaaattcctctccattaccgagaagagggctgatcagatgcgcgctatgggcatcgaaacctcagatattgcagatgtgccatccgataccagcaaaaacgataagaaggggaaggctaatacagcgaaagccaacgtgaccccacagagttcaagtgagcttcggccaaccaccaccgcagcgctagctagtggagtggaagccaaaaaaggcatagaacttattccacaggtacgcattgaggacctgaaacagatgaaggcttacttaaagcacctcaaaaagcagcagaaggagctgaattctcttaagaagaagcacgccaaagaacactccactatgcaaaaactgcattgtactcaggtggataaaattgtggcccagtatgacaaagaaaagtccacccatgagaagattcttgagaaagccatgaaaaagaaaggcggatcaaattgcctcgagatgaagaaagagacagaaatcaagatacagacattgacctcagaccacaagtctaaggttaaagagatcgtggcgcagcacacgaaggaatggagcgaaatgatcaatacccacagtgccgaagaacaggagattagggatcttcatctcagtcagcaatgcgaacttctcaagaagttgctcattaacgctcacgaacagcagactcagcagctcaaactcagtcacgacagagaaagcaaggagatgcgggcacaccaggccaagattagtatggagaattccaaagcaatctctcaggataagagcataaagaacaaagccgagagagagcgcagagtgagggaactgaattcttctaatactaagaagtttttggaagaacgaaagcgcctggctatgaaacagagtaaggagatggatcagctgaagaaagtgcagcttgaacatttagagtttttggagaagcagaatgagcaggcaaaagaaatgcagcagatggtgaagttggaagccgagatggacagacgacccgcaaccgtggtgtag

SEQ ID NO: 256972 - DNA, 3528 bp, Artificial Sequence
  derived and/or modified sequence
atggccaagccctacgagttcaactggcagaaggaggtgcccagcttcctgcaggagggcgccgtgttcgacagatacgaggaggagagcttcgtgttcgagcccaactgcctgttcaaggtggacgagttcggcttcttcctgacctggagaagcgagggcaaggagggccaggtgctggagtgcagcctgatcaacagcatcagaagcggcgccatccccaaggaccccaagatcctggccgccctggaggccgtgggcaagagcgagaacgacctggagggcagaatcgtgtgcgtgtgcagcggcaccgacctggtgaacatcagcttcacctacatggtggccgagaaccccgaggtgaccaagcagtgggtggagggcctgagaagcatcatccacaacttcagagccaacaacgtgagccccatgacctgcctgaagaagcactggatgaagctggccttcatgaccaacaccaacggcaagatccccgtgagaagcatcaccagaaccttcgccagcggcaagaccgagaaggtgatcttccaggccctgaaggagctgggcctgcccagcggcaagaacgacgagatcgagcccaccgccttcagctacgagaagttctacgagctgacccagaagatctgccccagaaccgacatcgaggacctgttcaagaagatcaacggcgacaagaccgactacctgaccgtggaccagctggtgagcttcctgaacgagcaccagagagaccccagactgaacgagatcctgttccccttctacgacgccaagagagccatgcagatcatcgagatgtacgagcccgacgaggacctgaagaagaagggcctgatcagcagcgacggcttctgcagatacctgatgagcgacgagaacgcccccgtgttcctggacagactggagctgtaccaggagatggaccaccccctggcccactacttcatcagcagcagccacaacacctacctgaccggcagacagttcggcggcaagagcagcgtggagatgtacagacaggtgctgctggccggctgcagatgcgtggagctggactgctgggacggcaagggcgaggaccaggagcccatcatcacccacggcaaggccatgtgcaccgacatcctgttcaaggacgtgatccaggccatcaaggagaccgccttcgtgaccagcgagtaccccgtgatcctgagcttcgagaaccactgcagcaagtaccagcagtacaagatgagcaagtactgcgaggacctgttcggcgacctgctgctgaagcaggccctggagagccaccccctggagcccggcagagccctgcccagccccaacgacctgaagagaaagatcctgatcaagaacaagagactgaagcccgaggtggagaagaagcagctggaggccctgagaagcatgatggaggccggcgagagcgccagccccgccaacatcctggaggacgacaacgaggaggagatcgagagcgccgaccaggaggaggaggcccaccccgagttcaagttcggcaacgagctgagcgccgacgacctgggccacaaggaggccgtggccaacagcgtgaagaagggcctggtgaccgtggaggacgagcaggcctggatggccagctacaagtacgtgggcgccaccaccaacatccacccctacctgagcaccatgatcaactacgcccagcccgtgaagttccagggcttccacgtggccgaggagagaaacatccactacaacatgagcagcttcaacgagagcgtgggcctgggctacctgaagacccacgccatcgagttcgtgaactacaacaagagacagatgagcagaatctaccccaagggcggcagagtggacagcagcaactacatgccccagatcttctggaacgccggctgccagatggtgagcctgaactaccagacccccgacctggccatgcagctgaaccagggcaagttcgagtacaacggcagctgcggctacctgctgaagcccgacttcatgagaagacccgacagaaccttcgaccccttcagcgagacccccgtggacggcgtgatcgccgccacctgcagcgtgcaggtgatcagcggccagttcctgagcgacaagaagatcggcacctacgtggaggtggacatgtacggcctgcccaccgacaccatcagaaaggagttcagaaccagaatggtgatgaacaacggcctgaaccccgtgtacaacgaggagagcttcgtgttcagaaaggtgatcctgcccgacctggccgtgctgagaatcgccgtgtacgacgacaacaacaagctgatcggccagagaatcctgcccctggacggcctgcaggccggctacagacacatcagcctgagaaacgagggcaacaagcccctgagcctgcccaccatcttctgcaacatcgtgctgaagacctacgtgcccgacggcttcggcgacatcgtggacgccctgagcgaccccaagaagttcctgagcatcaccgagaagagagccgaccagatgagagccatgggcatcgagaccagcgacatcgccgacgtgcccagcgacaccagcaagaacgacaagaagggcaaggccaacaccgccaaggccaacgtgaccccccagagcagcagcgagctgagacccaccaccaccgccgccctggccagcggcgtggaggccaagaagggcatcgagctgatcccccaggtgagaatcgaggacctgaagcagatgaaggcctacctgaagcacctgaagaagcagcagaaggagctgaacagcctgaagaagaagcacgccaaggagcacagcaccatgcagaagctgcactgcacccaggtggacaagatcgtggcccagtacgacaaggagaagagcacccacgagaagatcctggagaaggccatgaagaagaagggcggcagcaactgcctggagatgaagaaggagaccgagatcaagatccagaccctgaccagcgaccacaagagcaaggtgaaggagatcgtggcccagcacaccaaggagtggagcgagatgatcaacacccacagcgccgaggagcaggagatcagagacctgcacctgagccagcagtgcgagctgctgaagaagctgctgatcaacgcccacgagcagcagacccagcagctgaagctgagccacgacagagagagcaaggagatgagagcccaccaggccaagatcagcatggagaacagcaaggccatcagccaggacaagagcatcaagaacaaggccgagagagagagaagagtgagagagctgaacagcagcaacaccaagaagttcctggaggagagaaagagactggccatgaagcagagcaaggagatggaccagctgaagaaggtgcagctggagcacctggagttcctggagaagcagaacgagcaggccaaggagatgcagcagatggtgaagctggaggccgagatggacagaagacccgccaccgtggtgtag

SEQ ID NO: 256973 - protein, 775 aa, Artificial Sequence
  derived and/or modified sequence
MHPGPEEAGSGRYGPRYITDMGAGEDDEGFEDDLDLDISFEEVKPLPATKGGNKKFLVESKKMSISNPKTISRLIPPTSASLPVTTVAPQPIPIQRKGKNGVAIMSRLFDMPCDETLCSADSFCVNDYTWGGSRCQCTLGKGGESCSEDIVIQYPQFFGHSYVTFEPLKNSYQAFQITLEFRAEAEDGLLLYCGENEHGRGDFMSLAIIRRSLQFRFNCGTGVAIIVSETKIKLGGWHTVMLYRDGLNGLLQLNNGTPVTGQSQGQYSKITFRTPLYLGGAPSAYWLVRATGTNRGFQGCVQSLAVNGRRIDMRPWPLGKALSGADVGECSSGICDEASCIHGGTCTAIKADSYICLCPLGFKGRHCEDAFTLTIPQFRESLRSYAATPWPLEPQHYLSFMEFEITFRPDSGDGVLLYSYDTGSKDFLSINLAGGHVEFRFDCGSGTGVLRSEDPLTLGNWHELRVSRTAKNGILQVDKQKIVEGMAEGGFTQIKCNTDIFIGGVPNYDDVKKNSGVLKPFSGSIQKIILNDRTIHVKHDFTSGVNVENAAHPCVRAPCAHGGSCRPRKEGYDCDCPLGFEGLHCQKAIIEAIEIPQFIGRSYLTYDNPDILKRVSGSRSNVFMRFKTTAKDGLLLWRGDSPMRPNSDFISLGLRDGALVFSYNLGSGVASIMVNGSFNDGRWHRVKAVRDGQSGKITVDDYGARTGKSPGMMRQLNINGALYVGGMKEIALHTNRQYMRGLVGCISHFTLSTDYHISLVEDAVDGKNINTCGAK

SEQ ID NO: 256974 - DNA, 2328 bp, Artificial Sequence
  derived and/or modified sequence
atgcacccgggaccagaggaggcaggctcgggcagatatgggcctcgctatataaccgatatgggtgccggagaggacgacgaaggctttgaggatgacttggatctcgatatcagcttcgaggaagtgaagcccctgccagctacaaagggcggaaacaagaagttcctcgtggagagcaaaaagatgtcaatctccaatccgaagaccatttctcgactgataccgcctacctctgcatccttacccgtgacaacagtagccccacaacctatccccattcagcgaaaggggaaaaacggtgtcgcaattatgagtcgactatttgatatgccctgtgatgaaacactgtgttccgctgactctttttgtgtcaacgactatacgtggggcggatcccgatgccaatgtaccctagggaaaggaggtgagtcttgctcagaggatattgtgattcagtacccccagttcttcggacacagctatgtgaccttcgaacccctgaaaaactcttatcaggcctttcagatcacgctggagtttcgagcagaagccgaagatggactgctgctgtactgcggggagaacgaacacggcagaggcgatttcatgagcctggctataattaggcggtctctgcaattcagattcaactgtggaactggggtggccataatcgtgtcggaaactaagatcaaactgggtggatggcacactgttatgctgtatcgggacggtcttaacggcctgctgcagctcaataacggcacacccgtgacaggtcagagtcagggccagtacagtaagatcacgttccgcacacccttataccttggaggcgcaccctccgcatactggctggttcgggctacaggtacgaaccgcggattccagggatgtgtgcagtcacttgctgtcaatggacgtcgcattgacatgcggccatggcctctgggcaaagctctgtctggagccgatgtgggcgaatgctctagcgggatctgcgacgaagctagctgtatccacggaggaacatgcactgctatcaaagccgactcttacatctgcttgtgtcctctgggttttaaaggtcgtcattgtgaggacgcattcaccctcacgatcccccagtttcgagagtccttgcgtagttacgccgcaacaccttggcccctggaaccacagcactatctttctttcatggagtttgagattacttttagaccagacagcggggacggggtgctgctttactcctacgacactggatcgaaggacttcctttccattaacctagctggtggccatgtcgaattcaggtttgactgcggcagcggcactggggtgctgaggagtgaggatcctctaaccctgggcaattggcacgaactgcgggtctcacgaactgctaagaacggaattttacaagtggataaacaaaagattgttgagggcatggccgaaggaggttttactcagattaagtgtaacacagatatcttcattgggggagtgccaaattatgatgacgtcaaaaagaactccggagtgctcaaacctttcagcggtagtatccagaagattattttaaacgacaggaccattcacgtgaagcacgatttcacttcaggtgtcaacgtcgaaaatgccgctcacccatgcgtgcgcgctccgtgtgcccatggtgggagttgtcgccctaggaaggagggctacgactgcgattgtccactgggcttcgagggcctgcactgtcagaaagcaattatcgaagccatagaaattcctcagtttatcggccgtagttaccttacttatgataatcccgacatcctgaagcgagtttccggatcaaggtctaatgtgttcatgcgcttcaagacaactgcaaaagacggccttttactgtggcgaggcgacagcccaatgaggcctaacagcgacttcatcagtctgggactccgggacggcgctctggttttttcatataatttggggtcaggggtcgcaagcataatggtgaacggaagctttaatgacggacgatggcaccgcgtcaaagcagtacgggatggccagtctggcaagatcaccgtcgatgactacggagccagaactggcaaaagccctggtatgatgagacagctaaatatcaacggcgcattgtacgttggcggtatgaaagaaattgccctccacactaatcgacagtacatgcggggtctggtcgggtgtattagccactttactctgtctacggattaccatattagtttagtggaagatgccgtagatggaaaaaatatcaatacatgcggcgcaaaatag

SEQ ID NO: 256975 - DNA, 2328 bp, Artificial Sequence
  derived and/or modified sequence
atgaaggaaggcccagaagaagctggctctggcagatatggacctcgttacatcaccgatatgggcgcaggagaggacgatgaaggttttgaggatgatctggacttggacatctcttttgaagaggtaaaaccactcccagcgacaaaaggcggtaacaagaagttcctggtcgagagtaagaagatgtcaattagcaaccccaagactatcagtcggctcatccctcccacctcagcatcactcccagtgacgaccgtagcgccacagcccatacctatccaacggaagggaaaaaacggggtggcaataatgtcacgcctgtttgacatgccttgcgacgagaccctgtgctcagccgactccttctgtgtaaatgattacacttggggaggcagcagatgccaatgcactttaggcaaaggcggagagagttgttcggaggacattgtgatccagtatccccagttttttggccacagctacgtcacctttgagccactgaaaaatagctatcaagcattccaaataacactggagttccgagccgaggctgaagacgggcttcttctctactgcggggagaatgagcacggcaggggagatttcatgtcccttgctatcattcgcaggtccctccagttcaggttcaattgcggcaccggagtagccattatcgtgtcagaaacaaagattaaactgggtggatggcacaccgtgatgttgtacagggatggtctgaatgggcttcttcagctgaataacgggacccccgtgactgggcagagccaaggccagtattccaaaataaccttccgaacaccattgtatcttgggggtgccccatctgcatattggctcgtgcgagcaaccggaaccaatcggggattccaaggttgcgttcaatcacttgcggtgaacggaagacgcattgacatgcgcccttggcccctgggaaaggctctatccggggctgatgtaggagagtgcagcagtggaatttgtgacgaggcaagttgcattcatggcggaacatgtaccgcaattaaagccgacagctacatatgtctatgcccccttgggtttaaaggcagacattgcgaggatgccttcacattgacaattccccagttccgtgaatccctcaggtcctatgcagccacaccatggcccttagaaccccagcactatctcagcttcatggagtttgagatcacctttcgtcccgatagcggggatggcgtgttgctgtattcatacgacacaggatccaaagatttcctgtctataaaccttgctggagggcacgtggaatttcgattcgactgtggctctggcactggcgtactacgatctgaggaccctctcaccctcggcaattggcatgagctgagggtgagccgaactgctaagaacgggattcttcaagttgacaagcagaagattgtggaaggaatggccgagggaggtttcacccagatcaaatgtaacacggacattttcattgggggagttcctaactatgatgatgtgaaaaaaaatagcggggtgcttaagccctttagcggctccatccagaaaatcattctaaatgatcgtactattcatgtaaagcacgactttaccagcggggtaaatgtggagaacgccgcacacccctgcgtgcgggcaccctgcgcccatggcggatcttgcagacccagaaaggaggggtacgactgcgactgccccctgggctttgagggcctgcactgccaaaaggcgattatcgaggctattgagattccccagttcattggacgaagctacctgacttatgataaccctgatattctaaaacgcgtgtcaggctccagaagtaatgtctttatgagattcaagactacggctaaggatggactcctgctgtggcgaggagatagtcctatgcgcccaaacagcgattttatttccctggggctccgggacggcgctctggtattctcatataatctgggcagcggtgtggcttctattatggtgaatggctcatttaatgacgggagatggcatagggtcaaggccgtgagggatggccaaagtggcaagattaccgtggatgactatggggcaagaacgggtaaaagccccggtatgatgagacagcttaacattaatggggcactctacgtcggcggtatgaaagaaatagctctgcacactaacagacagtacatgcgcggtcttgttggttgcataagccatttcaccttgagtacagactaccatatcagcctggttgaagacgccgtggatgggaaaaacatcaatacgtgcggtgccaagtag

SEQ ID NO: 256976 - DNA, 1128 bp, Artificial Sequence
  derived and/or modified sequence
atggaatttgaaattacctttcgcccagattctggtgacggcgtcctactctactcctacgacaccggaagcaaagatttcctgtcaataaatctggccggaggacatgtggagtttagattcgactgtgggtccggcacaggtgtcctgaggtctgaagatcccctcactcttggcaattggcatgagctgagagtgagcaggactgccaagaatggcattctgcaggtggacaaacaaaagattgtggaaggtatggccgaggggggatttacccagatcaagtgcaatactgatatatttatcgggggagtacccaactacgatgatgttaaaaagaatagcggggtattaaaacccttcagcggtagcatacagaagattatcctgaacgaccgtacaatacatgtgaagcacgactttacatcaggtgtgaacgtcgaaaatgcggcacacccctgtgtgcgtgctccatgtgctcatggcggaagctgtcgacctaggaaggaaggctacgattgcgactgtccactcggctttgagggtttgcactgccagaaagccatcatcgaggccatagagatcccacagttcataggccgtagttatttgacgtatgacaacccagatatcctgaaacgggtctccgggtcacgctcgaatgtgtttatgcgcttcaagactactgccaaggacgggcttctgctgtggcggggtgattcacccatgcgccctaatagtgactttatttcccttggtttgcgtgatggcgctctggttttcagctacaacctgggtagcggcgtagcttccattatggtaaacggatcattcaatgacggtcgctggcatcgagtgaaggctgtgagagacgggcagtccggcaagatcacagtggatgattacggggctcgtacgggcaagagtccaggcatgatgaggcaattgaacattaatggtgctctgtatgtggggggtatgaaggagatcgcactgcacactaatcgccaatatatgcgcggactggtgggatgtatctcccactttaccttatcaacggactaccacatcagcctagttgaggatgccgtcgacggaaagaatatcaatacatgcggagcaaagtag

SEQ ID NO: 256977 - DNA, 2328 bp, Artificial Sequence
  derived and/or modified sequence
atgcatcccgggcccgaagaagccggatcaggacgttatgggcccagatatatcactgacatgggtgctggggaggatgacgaagggttcgaagatgaccttgacttagatatttcatttgaggaagtgaagcctctgccagcaaccaaaggaggtaacaagaagttcttggtggagagcaaaaagatgagcatttctaatcccaaaacaattagtcggcttattcctcctacatccgcctctttgccggtgacgaccgttgcacctcaacctatacccattcagaggaagggcaaaaacggcgttgccataatgtcgaggctgtttgacatgccttgcgatgagaccctatgctcggccgacagcttctgtgtcaacgactatacttggggtggttctagatgtcagtgcactctggggaaaggaggcgagtcatgttccgaggacatagtcattcagtatcctcagtttttcgggcacagctatgtgacgtttgaacctctgaagaattcgtaccaggcatttcagatcacccttgagtttcgcgccgaagcggaagacggactcctgctctactgtggtgaaaatgagcatggccgaggcgacttcatgtcacttgccattatacgtcgttcgctacagttcagatttaattgtggcactggcgtagcgatcatcgtgtctgagacgaaaatcaaacttgggggctggcataccgtcatgctttatcgcgatggactcaacgggctattgcagctgaataacggcactcccgtcactggacagtcgcagggacagtactcaaagatcaccttccgtactcctctctatctgggtggagccccatccgcatattggttagtgcgagccacaggtacgaatagggggttccagggatgcgtgcaaagcctcgctgtaaatggcaggcgaatcgatatgcgcccctggcctttgggcaaagccctgtccggcgccgatgtcggcgaatgttcttcagggatatgcgacgaggcgtcttgtatccatggtggcacatgtactgctataaaggccgattcttacatatgcctctgtccactgggattcaaagggagacattgcgaggatgcattcacacttactatcccacagttccgtgaatccctgagatcatatgctgctacaccctggcctttagaacctcagcattatctctcgtttatggagttcgagattacatttaggcctgattccggagatggagtgctgctatacagctacgataccggttctaaagatttcctcagcatcaatctggccggcgggcatgtcgagttccgatttgattgtggatccggtactggtgttctgcggagtgaagaccccctgacactggggaactggcatgaattgagggttagtaggacagccaaaaacggcatactccaagtggacaaacaaaagattgttgagggtatggctgagggaggctttacccaaattaaatgtaataccgatattttcataggaggagtgcccaattacgacgacgttaagaagaactcaggtgtccttaagccctttagcggctcaatccagaagataatcctcaacgataggactatccatgtgaaacatgacttcacctctggggtgaacgtagagaatgccgcacacccctgtgtgagagctccctgcgcccatggcgggtcgtgcaggcctaggaaagagggatatgactgcgactgtccacttggattcgaggggctacactgtcagaaagccatcatagaagcaatcgaaattccacagttcatcggcagatcctaccttacgtacgacaatcccgacattctaaagcgagtgtctgggtctcgctctaacgtgttcatgaggttcaagacaaccgccaaagatggactattgttgtggcgaggggattctcctatgagacctaactcagatttcatttctctggggctgagagacggcgcactcgtcttctcctataatcttggctcgggcgtggcctccatcatggtgaacggatcgttcaacgacggtcggtggcacagggtcaaagcggttcgggacggacagtctggaaagattactgtggacgattacggagccaggacaggcaagtcaccagggatgatgcgccaactgaacataaacggggctttatatgtgggaggaatgaaagaaattgcgctgcacaccaatagacaatacatgcgagggcttgtgggttgcatttcccattttaccttaagcactgattatcatatctctttggtggaggacgctgtcgatggcaagaacatcaacacctgcggggcgaaatag

SEQ ID NO: 256978 - DNA, 2328 bp, Artificial Sequence
  derived and/or modified sequence
atgaaggagggcccagaggaagccggatcaggacgctatggcccaagatatattactgacatgggagctggcgaagatgatgagggcttcgaagacgatctggacctggacatcagcttcgaggaagtcaaacccctaccagccactaaagggggaaacaagaagtttctcgtggagtcgaaaaagatgtccatctccaaccctaagactatcagcaggctaatcccccccacctcagcaagtctacccgtaaccaccgttgccccgcaacccatcccaatacagaggaaagggaaaaatggagtggcaataatgagtaggttgtttgacatgccttgcgatgagactctatgctcagcagattcgttctgcgttaatgattacacatggggtggcagtagatgtcagtgcactctcgggaaaggaggtgaaagctgttctgaggacatagtgatccagtacccacagttttttggtcattcctacgtcacatttgagcctctcaaaaactcctatcaggcctttcagatcacactggaatttagagctgaagccgaagacggcctgcttctgtattgtggagagaacgaacacggtaggggcgattttatgagtctggcaattattcgcaggtcactgcaatttcgtttcaactgcggcacaggggtggccattatagtaagcgaaaccaaaatcaaactcggtggttggcacacggtgatgctataccgggatggcttgaatggactgttacagctcaacaacggtaccccggtgactgggcagtcccagggacaatactctaagataacttttaggacccctctctacctgggcggagcacctagtgcctactggttggtccgggccacaggcacgaataggggctttcaggggtgcgtgcaaagcctggccgtgaatgggagaaggattgatatgcggccttggcccctcggtaaagcactctctggggcagacgtaggagaatgcagctccgggatctgcgacgaagcgagttgcatacatggaggaacatgtaccgccattaaagcggattcttacatctgtctgtgcccactgggtttcaaggggcgacattgcgaggatgccttcacactcactatcccccagtttcgggaatcccttagaagttacgctgctaccccctggcccctggaaccccagcactatctgtcttttatggaattcgaaatcactttcaggcccgattctggggacggcgtcctgctatattcatatgacacagggtccaaagacttcctgtccatcaatctggctggtggccacgtcgaatttcggttcgactgtggctccggaactggcgtcctccgatcggaggaccccctgacccttgggaactggcacgaactgcgcgtttcgaggacagcaaagaacggcatcctccaagtggataaacagaaaatcgtcgagggcatggcagagggcggttttactcagattaagtgcaacaccgacattttcatcggcggagtgcctaactacgatgatgtgaagaagaattccggggtgctcaagcctttcagcggctcaatccaaaaaataattctgaatgatagaacgatccatgtaaagcacgatttcaccagcggcgtgaacgtagaaaacgcagcccacccctgtgtgcgggccccttgcgcacatggagggtcttgtcgacctagaaaagaaggctatgactgtgattgccccctcggttttgaagggttgcactgccaaaaagccataattgaagctatagagatcccacagtttatcggccgctcttacctcacatacgataatcctgacattctgaagagagtatccgggagccgatccaatgtattcatgcgtttcaaaaccacagctaaggatggactgctactgtggcgaggcgattcccccatgcggccaaacagcgacttcatttctttggggttaagagacggagcccttgtcttctcctacaacttgggcagcggagtggctagcataatggtaaacggctcctttaacgacgggcgctggcaccgggtgaaggccgtccgtgacgggcaatccgggaagattaccgtagatgattacggggcccggactggaaaatcgccgggaatgatgaggcagctgaacattaacggtgccctgtatgtcggcggcatgaaggaaattgcgctgcatactaaccgacagtatatgcggggtttagttggttgcataagtcattttacactgtctaccgattatcacatttctcttgtggaggatgcagttgacggcaaaaatatcaacacttgcggcgccaaatag

SEQ ID NO: 256979 - DNA, 1128 bp, Artificial Sequence
  derived and/or modified sequence
atggaattcgaaattacatttcgccccgactcaggagacggagttttgctttattcatatgataccggctcaaaggattttctcagcatcaacttggccgggggccatgtagaatttagattcgattgcggaagcggcaccggagttctcagaagcgaagaccctctgactcttggaaactggcatgaacttcgggtgtcccggaccgcaaaaaacggcatcctccaggtggacaagcagaaaattgtagagggaatggctgagggaggctttacccaaattaagtgcaataccgacattttcataggcggggttcccaattacgatgacgtgaaaaagaactccggcgtgctcaaaccattttcaggatctattcagaaaataattctcaacgatagaactattcacgtgaagcatgacttcacatcgggagttaatgttgagaacgcagcacatccttgtgtgcgagcgccctgtgcccatggaggaagttgtcggccacgaaaggaaggatatgactgcgactgtccgctcgggtttgaaggactgcactgtcagaaagctataatcgaggccattgagatcccacagttcattggaagatcctatctgacctacgacaaccccgacatactaaaacgggtctccggcagccgatctaatgtctttatgcgattcaagactacggcaaaggatggtcttctcctgtggaggggagattctcccatgaggccgaacagcgattttatctcacttgggctcagagatggcgccctggtgttctcctataatttgggatcaggcgttgcgagcataatggtgaacgggtccttcaacgatggccgctggcatagggtgaaggctgtgcgcgatgggcagtctggcaagattacagtggatgattatggcgccaggactggcaagtctcccggcatgatgcgacagctcaacatcaatggtgccttgtacgtgggtggcatgaaggagattgccctgcacaccaataggcaatacatgagaggactagtagggtgcatttcccacttcactctgtcaaccgattatcatatctcccttgtcgaagatgctgtggacggtaagaacattaacacgtgtggagcgaagtag

SEQ ID NO: 256980 - DNA, 2328 bp, Artificial Sequence
  derived and/or modified sequence
atgcacccaggacccgaagaagctggttcaggccggtatggcccgcggtatatcactgacatgggtgccggagaagacgacgaaggctttgaggatgatcttgatctcgacatttcattcgaagaggtcaaaccactgccagctactaagggtgggaataaaaaatttcttgtagagagcaaaaaaatgtccatctctaatcctaagactatcagcaggctcattcctcccacctctgccagccttcctgttacaactgtagcaccccagccaatccccatccagcggaaaggaaagaatggtgtggcaattatgtcacgactgtttgacatgccttgcgacgagaccttatgcagcgccgattctttttgcgtgaacgattacacctggggaggttctagatgtcaatgcaccttgggcaaaggcggtgagtcgtgcagcgaggacattgtgatccagtatccccaattttttggccacagctacgtgacctttgaacccctgaaaaacagttatcaagcttttcagattactctcgaattccgggcagaggccgaggacggattgctcttgtattgcggagaaaacgagcatggtaggggtgactttatgagcttagcaattatcaggcgttccctgcaattccggtttaactgcggaacaggagtagcaatcatcgtgtctgaaacaaagattaagttggggggctggcacaccgtgatgttgtacagagacggcttgaatggacttttgcagctgaataatggaacccctgtcactggccagagtcagggacaatacagcaagattacgttcagaacccccttatatctgggcggggcgcccagtgcctattggttggtcagagcgacgggcaccaatcgcggattccagggatgcgttcagtctctagctgtgaacggacgacgaatagacatgagaccatggccattgggcaaggcattatctggcgctgatgttggcgaatgttcttcagggatctgcgatgaggcctcatgtatacacggcggcacgtgcaccgccatcaaagctgacagttatatttgtctctgccctctcgggttcaaagggcgccactgtgaagacgcctttacccttaccattccccagttccgtgagagcctacgatcttacgccgctaccccatggcctctcgaaccacaacattacctgtccttcatggagttcgaaataacttttagacctgactcaggggatggtgtactcctgtatagctacgacacaggaagtaaggactttctgtccattaatctcgcagggggccatgttgagtttcgtttcgattgtggatccggcacaggcgtactaagaagtgaggaccctctgacgctcggtaactggcacgagttacgtgtgtcacgtacagcaaagaatggtattttgcaggtggacaagcaaaagatcgtagagggcatggcagaaggcggtttcacccagattaaatgtaacacagatatattcatcggcggagtgcccaactacgatgacgttaaaaaaaattccggagtgctgaagcccttttctggtagcatacaaaaaatcatcttaaacgatcgcaccatccatgttaaacacgatttcacatcaggtgtcaatgtcgaaaatgctgcccacccctgcgtccgcgcaccttgcgcacacggaggttcctgccggccgagaaaggaaggctacgactgtgactgccccctcggattcgaaggtctccactgtcagaaggctatcattgaagccattgaaattccacagttcatcggccgatcatacctaacctacgacaaccccgacattcttaaacgtgtgagcgggagtagatcaaacgttttcatgagatttaaaaccaccgctaaggacgggcttttgttatggcgcggggactcgccaatgcgtcctaatagcgacttcatatccttgggtctgcgcgacggcgctctggtgttttcctacaatcttggcagcggtgtggccagcatcatggttaacggctcatttaatgacggacgctggcatcgggtcaaagcggtacgagatggacagtccggtaaaattaccgtcgacgattacggagccaggacaggcaagtcaccagggatgatgcgccaactgaacataaacggggctttatatgtgggaggaatgaaagaaattgcgctgcacaccaatagacaatacatgcgagggcttgtgggttgcatttcccattttaccttaagcactgattatcatatctctttggtggaggacgctgtcgatggcaagaacatcaacacctgcggggcgaaatag

SEQ ID NO: 256981 - DNA, 2328 bp, Artificial Sequence
  derived and/or modified sequence
atgaaagaaggtccagaagaagcaggcagcggacgatacggcccacggtacattacagacatgggggccggtgaagatgacgagggcttcgaggatgacctcgatttggatatctctttcgaggaggttaagcctctccccgccacaaagggaggaaacaagaaatttctggtcgagtcgaagaagatgagcatctccaatccaaaaaccatatctcggttgatcccacctacctccgcgagcctcccagtcactacagtagctccccaaccaattccaatccaaagaaagggcaagaatggagtggcaataatgagtaggttgtttgacatgccttgcgatgagactctatgctcagcagattcgttctgcgttaatgattacacatggggtggcagtagatgtcagtgcactctcgggaaaggaggtgaaagctgttctgaggacatagtgatccagtacccacagttttttggtcattcctacgtcacatttgagcctctcaaaaactcctatcaggcctttcagatcacactggaatttagagctgaagccgaagacggcctgcttctgtattgtggagagaacgaacacggtaggggtgatttcatgagtctcgcaattattcgtaggagtttacagttcaggttcaactgtggcaccggagtggcgatcattgtgtctgagacaaagattaagctgggtggctggcatacagtcatgttataccgtgacggtcttaacggtctgttacaactcaacaacggcacccccgttacaggccagagccagggccaatactcaaaaatcacattcaggacacccttgtatctgggcggagccccatctgcatattggctggtcagagccactggtacaaaccgcggctttcagggttgcgtacaatcccttgccgtcaacggaaggaggatcgacatgagaccttggccactcggtaaggcgctgtctggcgccgacgtgggtgaatgttcatcaggaatttgtgatgaggcatcctgtatccatggcggcacttgcaccgcgattaaagccgactcttatatctgcctgtgtccactcgggtttaagggaagacattgcgaggacgcttttactctcactatcccccagtttcgtgaatctttgagatcttacgccgccacgccttggcccctcgagcctcagcactacctttcattcatggaatttgaaatcactttcagacctgactccggagatggcgttctgctatacagctatgacaccggaagcaaagattttctctccattaatctggctggaggacatgttgagtttcgctttgattgtggatcaggtaccggagtcctcagatcagaagacccactgaccctaggcaactggcacgagttacgagtgagcaggacagcaaagaacggcatactgcaagtcgacaaacagaagattgtggaggggatggcggagggaggatttacacagatcaaatgtaacaccgatatcttcattggaggagtccctaattacgacgatgtgaaaaagaattcaggcgtattgaaaccattcagcggtagcattcagaagattatattaaatgacagaactattcacgtcaagcacgattttacaagcggagtgaatgtggagaatgcagctcatccatgtgtccgcgcaccctgtgcccacggcgggagttgtagaccccggaaggaaggttacgactgtgattgccccctggggtttgaaggtcttcattgccagaaagccattatcgaagccatcgagatccctcagtttataggcaggtcctacttgacatacgacaatcccgatatcctgaagagagtatctggctcccgctctaatgtatttatgaggtttaaaacgacagctaaagacggcttgctcttgtggagaggagattcacctatgagacctaatagtgactttatttcactgggactaagagacggcgccctggtgttctcctacaatctgggttccggcgtggcctcgattatggtgaacggaagcttcaacgacggacggtggcacagagtgaaggcagtcagggatggccaaagcgggaagattaccgtcgatgactatggggcacgtaccggtaaatctcctgggatgatgcggcagcttaacatcaatggagctctgtatgtgggaggaatgaaagagatcgccctgcacacaaatcgtcagtatatgcgcggactcgtgggctgcatttctcactttacactcagcaccgactatcacataagtcttgtggaggacgccgtagatgggaagaatataaatacctgtggcgcgaaatag

SEQ ID NO: 256982 - DNA, 1128 bp, Artificial Sequence
  derived and/or modified sequence
atggagttcgaaatcacctttaggcccgactctggggatggcgtcctgctgtacagctacgacacaggctccaaggatttcctcagtatcaacttggccggagggcacgtagaatttcggtttgactgtgggtcaggaactggagtgttaagatccgaagaccccctcacattgggaaattggcacgaactcagggtctccagaactgcaaaaaatggtatcttgcaagttgataagcagaaaatcgttgaaggcatggcagaaggaggttttacccaaataaagtgcaatacagacatatttatcggaggtgttcccaactatgacgacgtcaaaaagaatagcggtgtcttaaaacccttcagcgggtcgatacagaaaatcatcctgaacgacagaacaattcacgttaaacacgacttcacttcgggcgtgaacgtcgagaatgcagctcacccctgcgtccgtgctccatgcgcccatggaggatcttgccggccccgcaaagaaggctatgattgtgactgtccactgggctttgagggtctgcattgtcagaaggccattatcgaagcaatagaaattccccaatttataggacggtcttacctgacatatgataatcccgatatcctgaaaagagtgtcaggttcccggagtaacgtatttatgcgttttaagactacggcaaaggacgggttgcttttgtggagaggtgattcccccatgcgtcctaattccgactttatctcactggggctcagagacggggcactggttttctcctataacttgggctctggagtagccagcataatggtgaatgggtcttttaatgacggtaggtggcatcgagtgaaagcagtgcgcgatgggcaaagcgggaaaattactgtcgatgattacggtgctcggacaggaaagtcacctggcatgatgcgacagcttaatatcaatggagccttgtacgtggggggcatgaaggagattgcactgcacacaaatagacagtacatgcgggggcttgtaggatgtatttcccactttactctctccacagactaccacatatcattggtggaggacgcagtggatggcaaaaatattaatacttgtggcgctaagtag

SEQ ID NO: 256983 - DNA, 676 bp, Artificial Sequence
  derived and/or modified sequence
agagaaccacatactatgtaacctcctttttctgttctgtcccagcgatcatagaagccattgagatcccgcagtttatcggccgcagttacctgacgtatgacaacccagatatcttgaagagggtgtcaggatcaagatcaaatgtgttcatgaggtttaaaacaactgccaaggatggccttttgctgtggaggggagacagccccatgagacccaacagcgacttcatttccttgggccttcgggatggagccctcgtgttcagctataacctgggcagtggtgtggcatccatcatggtgaatggctccttcaacgatggtcggtggcaccgagttaaggccgttagggatggccagtcaggaaagataaccgtggatgactatggagccagaacaggcaaatccccaggcatgatgcggcagcttaacatcaatggagctctgtatgtgggtggaatgaaggaaattgctctgcacactaacaggcaatatatgagagggctcgtgggctgtatctctcacttcaccctgtccaccgattaccacatttccctcgtggaagatgccgtggatgggaaaaacatcaacacttgtggagccaagtaacaccagctggccttgtccaagggacagagccttctattctgagaatcccaggggccctcagaccc

SEQ ID NO: 256984 - DNA, 2328 bp, Artificial Sequence
  derived and/or modified sequence
atgcaccccggccccgaggaggccggcagcggcagatacggccccagatacatcaccgacatgggcgccggcgaggacgacgagggcttcgaggacgacctggacctggacatcagcttcgaggaggtgaagcccctgcccgccaccaagggcggcaacaagaagttcctggtggagagcaagaagatgagcatcagcaaccccaagaccatcagcagactgatcccccccaccagcgccagcctgcccgtgaccaccgtggccccccagcccatccccatccagagaaagggcaagaacggcgtggccatcatgagcagactgttcgacatgccctgcgacgagaccctgtgcagcgccgacagcttctgcgtgaacgactacacctggggcggcagcagatgccagtgcaccctgggcaagggcggcgagagctgcagcgaggacatcgtgatccagtacccccagttcttcggccacagctacgtgaccttcgagcccctgaagaacagctaccaggccttccagatcaccctggagttcagagccgaggccgaggacggcctgctgctgtactgcggcgagaacgagcacggcagaggcgacttcatgagcctggccatcatcagaagaagcctgcagttcagattcaactgcggcaccggcgtggccatcatcgtgagcgagaccaagatcaagctgggcggctggcacaccgtgatgctgtacagagacggcctgaacggcctgctgcagctgaacaacggcacccccgtgaccggccagagccagggccagtacagcaagatcaccttcagaacccccctgtacctgggcggcgcccccagcgcctactggctggtgagagccaccggcaccaacagaggcttccagggctgcgtgcagagcctggccgtgaacggcagaagaatcgacatgagaccctggcccctgggcaaggccctgagcggcgccgacgtgggcgagtgcagcagcggcatctgcgacgaggccagctgcatccacggcggcacctgcaccgccatcaaggccgacagctacatctgcctgtgccccctgggcttcaagggcagacactgcgaggacgccttcaccctgaccatcccccagttcagagagagcctgagaagctacgccgccaccccctggcccctggagccccagcactacctgagcttcatggagttcgagatcaccttcagacccgacagcggcgacggcgtgctgctgtacagctacgacaccggcagcaaggacttcctgagcatcaacctggccggcggccacgtggagttcagattcgactgcggcagcggcaccggcgtgctgagaagcgaggaccccctgaccctgggcaactggcacgagctgagagtgagcagaaccgccaagaacggcatcctgcaggtggacaagcagaagatcgtggagggcatggccgagggcggcttcacccagatcaagtgcaacaccgacatcttcatcggcggcgtgcccaactacgacgacgtgaagaagaacagcggcgtgctgaagcccttcagcggcagcatccagaagatcatcctgaacgacagaaccatccacgtgaagcacgacttcaccagcggcgtgaacgtggagaacgccgcccacccctgcgtgagagccccctgcgcccacggcggcagctgcagacccagaaaggagggctacgactgcgactgccccctgggcttcgagggcctgcactgccagaaggccatcatcgaggccatcgagatcccccagttcatcggcagaagctacctgacctacgacaaccccgacatcctgaagagagtgagcggcagcagaagcaacgtgttcatgagattcaagaccaccgccaaggacggcctgctgctgtggagaggcgacagccccatgagacccaacagcgacttcatcagcctgggcctgagagacggcgccctggtgttcagctacaacctgggcagcggcgtggccagcatcatggtgaacggcagcttcaacgacggcagatggcacagagtgaaggccgtgagagacggccagagcggcaagatcaccgtggacgactacggcgccagaaccggcaagagccccggcatgatgagacagctgaacatcaacggcgccctgtacgtgggcggcatgaaggagatcgccctgcacaccaacagacagtacatgagaggcctggtgggctgcatcagccacttcaccctgagcaccgactaccacatcagcctggtggaggacgccgtggacggcaagaacatcaacacctgcggcgccaagtag

SEQ ID NO: 256985 - DNA, 2328 bp, Artificial Sequence
  derived and/or modified sequence
atgaaggagggccccgaggaggccggcagcggcagatacggccccagatacatcaccgacatgggcgccggcgaggacgacgagggcttcgaggacgacctggacctggacatcagcttcgaggaggtgaagcccctgcccgccaccaagggcggcaacaagaagttcctggtggagagcaagaagatgagcatcagcaaccccaagaccatcagcagactgatcccccccaccagcgccagcctgcccgtgaccaccgtggccccccagcccatccccatccagagaaagggcaagaacggcgtggccatcatgagcagactgttcgacatgccctgcgacgagaccctgtgcagcgccgacagcttctgcgtgaacgactacacctggggcggcagcagatgccagtgcaccctgggcaagggcggcgagagctgcagcgaggacatcgtgatccagtacccccagttcttcggccacagctacgtgaccttcgagcccctgaagaacagctaccaggccttccagatcaccctggagttcagagccgaggccgaggacggcctgctgctgtactgcggcgagaacgagcacggcagaggcgacttcatgagcctggccatcatcagaagaagcctgcagttcagattcaactgcggcaccggcgtggccatcatcgtgagcgagaccaagatcaagctgggcggctggcacaccgtgatgctgtacagagacggcctgaacggcctgctgcagctgaacaacggcacccccgtgaccggccagagccagggccagtacagcaagatcaccttcagaacccccctgtacctgggcggcgcccccagcgcctactggctggtgagagccaccggcaccaacagaggcttccagggctgcgtgcagagcctggccgtgaacggcagaagaatcgacatgagaccctggcccctgggcaaggccctgagcggcgccgacgtgggcgagtgcagcagcggcatctgcgacgaggccagctgcatccacggcggcacctgcaccgccatcaaggccgacagctacatctgcctgtgccccctgggcttcaagggcagacactgcgaggacgccttcaccctgaccatcccccagttcagagagagcctgagaagctacgccgccaccccctggcccctggagccccagcactacctgagcttcatggagttcgagatcaccttcagacccgacagcggcgacggcgtgctgctgtacagctacgacaccggcagcaaggacttcctgagcatcaacctggccggcggccacgtggagttcagattcgactgcggcagcggcaccggcgtgctgagaagcgaggaccccctgaccctgggcaactggcacgagctgagagtgagcagaaccgccaagaacggcatcctgcaggtggacaagcagaagatcgtggagggcatggccgagggcggcttcacccagatcaagtgcaacaccgacatcttcatcggcggcgtgcccaactacgacgacgtgaagaagaacagcggcgtgctgaagcccttcagcggcagcatccagaagatcatcctgaacgacagaaccatccacgtgaagcacgacttcaccagcggcgtgaacgtggagaacgccgcccacccctgcgtgagagccccctgcgcccacggcggcagctgcagacccagaaaggagggctacgactgcgactgccccctgggcttcgagggcctgcactgccagaaggccatcatcgaggccatcgagatcccccagttcatcggcagaagctacctgacctacgacaaccccgacatcctgaagagagtgagcggcagcagaagcaacgtgttcatgagattcaagaccaccgccaaggacggcctgctgctgtggagaggcgacagccccatgagacccaacagcgacttcatcagcctgggcctgagagacggcgccctggtgttcagctacaacctgggcagcggcgtggccagcatcatggtgaacggcagcttcaacgacggcagatggcacagagtgaaggccgtgagagacggccagagcggcaagatcaccgtggacgactacggcgccagaaccggcaagagccccggcatgatgagacagctgaacatcaacggcgccctgtacgtgggcggcatgaaggagatcgccctgcacaccaacagacagtacatgagaggcctggtgggctgcatcagccacttcaccctgagcaccgactaccacatcagcctggtggaggacgccgtggacggcaagaacatcaacacctgcggcgccaagtag

SEQ ID NO: 256986 - DNA, 1128 bp, Artificial Sequence
  derived and/or modified sequence
atggagttcgagatcaccttcagacccgacagcggcgacggcgtgctgctgtacagctacgacaccggcagcaaggacttcctgagcatcaacctggccggcggccacgtggagttcagattcgactgcggcagcggcaccggcgtgctgagaagcgaggaccccctgaccctgggcaactggcacgagctgagagtgagcagaaccgccaagaacggcatcctgcaggtggacaagcagaagatcgtggagggcatggccgagggcggcttcacccagatcaagtgcaacaccgacatcttcatcggcggcgtgcccaactacgacgacgtgaagaagaacagcggcgtgctgaagcccttcagcggcagcatccagaagatcatcctgaacgacagaaccatccacgtgaagcacgacttcaccagcggcgtgaacgtggagaacgccgcccacccctgcgtgagagccccctgcgcccacggcggcagctgcagacccagaaaggagggctacgactgcgactgccccctgggcttcgagggcctgcactgccagaaggccatcatcgaggccatcgagatcccccagttcatcggcagaagctacctgacctacgacaaccccgacatcctgaagagagtgagcggcagcagaagcaacgtgttcatgagattcaagaccaccgccaaggacggcctgctgctgtggagaggcgacagccccatgagacccaacagcgacttcatcagcctgggcctgagagacggcgccctggtgttcagctacaacctgggcagcggcgtggccagcatcatggtgaacggcagcttcaacgacggcagatggcacagagtgaaggccgtgagagacggccagagcggcaagatcaccgtggacgactacggcgccagaaccggcaagagccccggcatgatgagacagctgaacatcaacggcgccctgtacgtgggcggcatgaaggagatcgccctgcacaccaacagacagtacatgagaggcctggtgggctgcatcagccacttcaccctgagcaccgactaccacatcagcctggtggaggacgccgtggacggcaagaacatcaacacctgcggcgccaagtag

SEQ ID NO: 256987 - DNA, 3071 bp, Artificial Sequence
  derived and/or modified sequence
gacaactgagacggctgcagaccatggggcagggagcatatggagcacggatatgccagacagagggatgattcatatcccaggcaggatggagcagggcagtgtgctatttcatcgtgctactcagaacttatgaattgtttatttctggaatttcccatttaatatttttggactgtggttgatcgagggtaaatgaaattgcagaaagcaaaaatacagataagggggactgcttgctgtacaaagatagagacaagaggaaggagctgtcctcaagggccttttgtgtgaagacatctggcacacagatacgctgcatgcaggtggcttgagagaacatgcatccaggccctgaggaggcgggaagtggccgctatggaccccgttatatcaccgacatgggagctggtgaggatgatgaaggatttgaagacgacttagatttggatatttcctttgaggaggttaaaccacttcctgctaccaaaggagggaataagaaatttttggtggaaagcaagaagatgtctatatctaacccaaagaccatttctaggctcatcccccctacctcagcatctctccctgtgaccacggtggctccccagcccattcccatacagagaaaggggaagaatggtgtggccataatgtcaaggctctttgacatgccttgtgatgaaactctctgctctgctgacagcttctgtgtcaatgactacacctgggggggctcgcgatgccagtgcaccctgggcaaaggtggtgagagctgctcagaagatattgttatccagtatcctcagttctttggccactcctatgtaacgtttgaacctctgaagaattcttatcaggcatttcaaattactcttgaatttagggcggaggcagaggatggcttactgctctactgtggggagaacgaacacgggaggggggatttcatgtccctggctatcatccgacgctccctgcagttcaggtttaattgtggaactggggttgccatcatcgtaagtgagaccaaaatcaaactagggggttggcacacggttatgctctacagagatgggctgaacgggctgctgcagctgaacaatggcaccccagtgacaggccagtctcagggccaatacagtaaaattactttccggacacctctctatcttggtggcgctcccagcgcttactggttggttagagcaacagggacaaaccgaggctttcaaggctgtgtgcagtcgctcgctgtgaatgggaggagaattgacatgaggccctggcccctgggaaaagcactcagtggggctgatgtgggggaatgcagcagtggaatctgtgatgaggcctcgtgcatccatggtggcacctgcacagcaatcaaagccgactcctacatttgcctctgtccccttgggtttaaaggtcgacactgtgaagatgctttcaccttgaccattcctcagttcagagagtctctgagatcttacgctgcaactccctggccactggagccccagcattacctttccttcatggaatttgagatcacatttcggccagactcaggagatggtgtcctcctgtacagctatgacacaggcagcaaagacttcctgtccatcaacttggcagggggccacgtggagttccgctttgactgtggctctgggaccggtgtcctcaggagtgaagatcccctcaccctgggcaactggcacgagcttcgtgtatctcgcacagcaaagaatggaatcttacaggtggataagcagaagatagtggagggaatggcagagggaggcttcacacagattaagtgcaacacagacattttcattggcggagtccccaattatgatgatgtgaagaagaactcgggtgtcctgaagcctttcagcgggagcatccagaagatcatcctgaatgaccgaaccatccatgtgaagcatgacttcacctccggagtgaatgtggagaatgcggcccacccctgtgtgagagccccttgtgcccatgggggcagctgccggcccaggaaggagggctatgactgtgactgccccttgggctttgaggggcttcactgccagaaagcgatcatagaagccattgagatcccgcagtttatcggccgcagttacctgacgtatgacaacccagatatcttgaagagggtgtcaggatcaagatcaaatgtgttcatgaggtttaaaacaactgccaaggatggccttttgctgtggaggggagacagccccatgagacccaacagcgacttcatttccttgggccttcgggatggagccctcgtgttcagctataacctgggcagtggtgtggcatccatcatggtgaatggctccttcaacgatggtcggtggcaccgagttaaggccgttagggatggccagtcaggaaagataaccgtggatgactatggagccagaacaggcaaatccccaggcatgatgcggcagcttaacatcaatggagctctgtatgtgggtggaatgaaggaaattgctctgcacactaacaggcaatatatgagagggctcgtgggctgtatctctcacttcaccctgtccaccgattaccacatttccctcgtggaagatgccgtggatgggaaaaacatcaacacttgtggagccaagtaacaccagctggccttgtccaagggacagagccttctattctgagaatcccaggggccctcagaccctgcctgatgctatatgcagaggcccagggaccaggtgtgtttcctctcaccaagaagaaagtacacactgatgagaaactgagaaccaagacaggcatccctgggtggcctttcctgctgacactccacgagctgacccagcagaattctctgtgtaggaagcatcggactttgtccattgaatatgtagcggctgccagagatcacacatcaatgcaaattccagagcctgtctgctatagctcagtgactgtgttgtgattcatagtacattaaaaagagagagagagagaaagaatcccacagggcactattaaaatacttctctccttccctg

SEQ ID NO: 256988 - DNA, 2888 bp, Artificial Sequence
  derived and/or modified sequence
atgaaggaaggccctgaggaggcgggaagtggccgctatggaccccgttatatcaccgacatgggagctggtgaggatgatgaaggatttgaagacgacttagatttggatatttcctttgaggaggttaaaccacttcctgctaccaaaggagggaataagaaatttttggtggaaagcaagaagatgtctatatctaacccaaagaccatttctaggctcatcccccctacctcagcatctctccctgtgaccacggtggctccccagcccattcccatacagagaaaggggaagaatggtgtggccataatgtcaaggctctttgacatgccttgtgatgaaactctctgctctgctgacagcttctgtgtcaatgactacacctgggggggctcgcgatgccagtgcaccctgggcaaaggtggtgagagctgctcagaagatattgttatccagtatcctcagttctttggccactcctatgtaacgtttgaacctctgaagaattcttatcaggcatttcaaattactcttgaatttagggcggaggcagaggatggcttactgctctactgtggggagaacgaacacgggaggggggatttcatgtccctggctatcatccgacgctccctgcagttcaggtttaattgtggaactggggttgccatcatcgtaagtgagaccaaaatcaaactagggggttggcacacggttatgctctacagagatgggctgaacgggctgctgcagctgaacaatggcaccccagtgacaggccagtctcagggccaatacagtaaaattactttccggacacctctctatcttggtggcgctcccagcgcttactggttggttagagcaacagggacaaaccgaggctttcaaggctgtgtgcagtcgctcgctgtgaatgggaggagaattgacatgaggccctggcccctgggaaaagcactcagtggggctgatgtgggggaatgcagcagtggaatctgtgatgaggcctcgtgcatccatggtggcacctgcacagcaatcaaagccgactcctacatttgcctctgtccccttgggtttaaaggtcgacactgtgaagatgctttcaccttgaccattcctcagttcagagagtctctgagatcttacgctgcaactccctggccactggagccccagcattacctttccttcatggaatttgagatcacatttcggccagactcaggagatggtgtcctcctgtacagctatgacacaggcagcaaagacttcctgtccatcaacttggcagggggccacgtggagttccgctttgactgtggctctgggaccggtgtcctcaggagtgaagatcccctcaccctgggcaactggcacgagcttcgtgtatctcgcacagcaaagaatggaatcttacaggtggataagcagaagatagtggagggaatggcagagggaggcttcacacagattaagtgcaacacagacattttcattggcggagtccccaattatgatgatgtgaagaagaactcgggtgtcctgaagcctttcagcgggagcatccagaagatcatcctgaatgaccgaaccatccatgtgaagcatgacttcacctccggagtgaatgtggagaatgcggcccacccctgtgtgagagccccttgtgcccatgggggcagctgccggcccaggaaggagggctatgactgtgactgccccttgggctttgaggggcttcactgccagaaagcgatcatagaagccattgagatcccgcagtttatcggccgcagttacctgacgtatgacaacccagatatcttgaagagggtgtcaggatcaagatcaaatgtgttcatgaggtttaaaacaactgccaaggatggccttttgctgtggaggggagacagccccatgagacccaacagcgacttcatttccttgggccttcgggatggagccctcgtgttcagctataacctgggcagtggtgtggcatccatcatggtgaatggctccttcaacgatggtcggtggcaccgagttaaggccgttagggatggccagtcaggaaagataaccgtggatgactatggagccagaacaggcaaatccccaggcatgatgcggcagcttaacatcaatggagctctgtatgtgggtggaatgaaggaaattgctctgcacactaacaggcaatatatgagagggctcgtgggctgtatctctcacttcaccctgtccaccgattaccacatttccctcgtggaagatgccgtggatgggaaaaacatcaacacttgtggagccaagtaacaccagctggccttgtccaagggacagagccttctattctgagaatcccaggggccctcagaccctgcctgatgctatatgcagaggcccagggaccaggtgtgtttcctctcaccaagaagaaagtacacactgatgagaaactgagaaccaagacaggcatccctgggtggcctttcctgctgacactccacgagctgacccagcagaattctctgtgtaggaagcatcggactttgtccattgaatatgtagcggctgccagagatcacacatcaatgcaaattccagagcctgtctgctatagctcagtgactgtgttgtgattcatagtacattaaaaagagagagagagagaaagaatcccacagggcactattaaaatacttctctccttccctgactcatgacactcttcctgacagcagaatgactgtgtgaccttgaacttcacatttcccacattggcccttggattgttcggattaaccccttccactcctcactggctggttcactgtgttctgactagtccataaaaataaagatggaaggagatc

SEQ ID NO: 256989 - DNA, 2328 bp, Artificial Sequence
  derived and/or modified sequence
atgcacccaggccctgaagaagctggatcagggcgatatggcccacggtatatcaccgacatgggggccggcgaagacgacgaaggattcgaggacgatctcgaccttgatatctctttcgaagaagtgaaaccattgccggccacaaagggcggaaataaaaagtttctggtggagtcaaagaaaatgagcattagcaacccaaaaaccatcagtagactcatccccccaactagtgcctctctgcctgtcacaaccgtggccccacagcccatccctattcagcgcaaagggaaaaacggtgtggctataatgagtagactgtttgatatgccctgcgacgagaccctgtgcagcgccgacagtttctgcgtgaatgattatacatggggaggcagtcggtgtcaatgtaccctaggcaaggggggggagtcatgctctgaagatatcgtcattcagtacccccaattctttggtcacagctacgtcacattcgagcctttgaagaatagctatcaggcttttcagataacgctcgaatttcgggccgaggctgaagacgggctgctgctgtactgcggagagaacgaacatggacggggggactttatgtctctggccattatccgcagaagcttgcagtttaggtttaattgcggaaccggggttgcaatcattgtttctgaaaccaaaatcaagctgggcggatggcatacagtcatgctgtaccgagacgggctgaatggactgctgcagcttaacaacgggactccagtgacaggacaatctcaggggcaatattcgaagattaccttcagaacccccctctatctgggaggagctccctcggcgtattggttagtcagggctaccggaaccaaccggggatttcagggctgcgtgcagagtttggctgtgaacggccggaggatcgatatgaggccctggccactcgggaaagctctgtccggagcagacgtgggagagtgcagctctggaatctgcgatgaagcctcatgcatacacgggggtacttgtaccgctattaaagccgacagctacatttgtttatgtccactgggattcaaagggagacactgtgaggatgcgttcactctcaccatcccccaattcagagagagcttacggagttacgccgccaccccgtggcctctggagccacagcattatctctcatttatggagtttgaaattactttcaggcccgattctggcgatggtgtgcttctgtatagctatgacaccggaagcaaggacttccttagcataaatctcgcaggtgggcatgtggaatttcgttttgattgcggaagcggcaccggggttcttcggtcagaggacccacttaccttgggcaattggcacgagctgcgggtgagtcggactgcgaagaacggcattctccaagtggacaaacaaaaaatagtcgaagggatggcagaagggggtttcacccaaatcaagtgtaacaccgacatctttataggcggggtgcctaactacgacgacgtcaagaagaactccggggtgttgaaacctttctccggctccattcagaagattatcttgaatgatagaaccatacatgtgaagcacgattttacttcaggcgtaaacgttgagaacgcagctcacccatgtgttcgcgccccctgtgcccatggcggctcatgccgcccaagaaaggaaggctacgactgtgattgcccgctaggattcgagggtctccactgccagaaggctatcattgaggccatcgaaattccacagtttatcggcagatcttacttaacttacgacaatcctgacatcctgaagagagtctctggcagcaggtccaacgtgttcatgcgtttcaagacgaccgcaaaggatggccttttgctgtggagaggtgattcacctatgcgccctaatagtgattttatttcactcgggctgcgtgacggggctcttgtcttttcttacaacctcggcagcggcgtggcttctatcatggtgaatggcagttttaatgatggtcggtggcatcgcgttaaagctgtgcgggatggccagagcggcaagataacggtcgacgattacggcgcccggacggggaaatcaccaggtatgatgagacagcttaacattaatggcgcgctgtacgtgggggggatgaaagaaattgcactgcacacaaacaggcagtatatgcgtgggctcgtgggctgtatatctcacttcaccctgtcaactgattatcacattagcttagtggaggacgccgtggatggcaaaaatattaacacctgcggcgccaagtag

SEQ ID NO: 256990 - DNA, 2328 bp, Artificial Sequence
  derived and/or modified sequence
atgaaggaaggtccagaggaagcgggctctgggagatacggcccgcgctatattacagacatgggtgcgggcgaggacgacgaaggcttcgaagatgacctggatctggacatctccttcgaggaagtgaagccccttccagccacaaaaggaggcaacaagaagtttctcgtggagtcaaaaaagatgagcattagtaacccaaagactatatcgcgtttgattccccctacatccgccagcctgccagtgacaactgtggcccctcaacccattcctatacaaaggaaaggtaaaaacggcgtggctattatgagtcgactgtttgatatgccatgcgatgaaacgctgtgctcagccgattcattctgtgttaacgactatacttggggcggcagtagatgtcagtgtaccttaggcaagggtggtgagtcttgttccgaggatatcgtgattcagtatcctcagtttttcggacactcctacgtgacattcgagcctctaaaaaactcataccaggctttccagatcacgttggaattcagagcggaggctgaagatggactacttctttactgtggcgagaacgaacatggccggggcgatttcatgagcctagccattattaggagaagtttgcagttcagatttaattgtggaacaggcgttgccatcatagtgtccgaaaccaaaattaaattgggcgggtggcataccgttatgttatatcgcgatggattgaatgggctgttacaacttaataacgggacgccagtcactggccagagtcagggccagtattcaaaaattacctttcgtaccccactgtacctcggcggcgcccccagtgcgtactggttggtgcgcgccaccgggactaacaggggttttcagggctgtgtccagtcattggccgtgaatggccgtcgtatagatatgcgtccttggcctctgggtaaggccctaagcggcgcggacgtaggggaatgctcttctggcatctgcgacgaagcgagctgcattcacggcggaacttgtaccgctattaaagccgatagctatatctgcctgtgtccactcggctttaagggtcgtcactgcgaggacgctttcaccctgacgattccccagttcagagagtcgctcaggagctacgcagcaactccctggccattggagccacaacattacctgagctttatggagttcgagataacatttcgacccgatagcggcgatggagttctgctgtacagctacgataccgggagcaaagactttctcagtattaacctggctggtggacacgtggagttccgtttcgattgcgggtccggaacaggggtcctgcggtctgaagacccacttacattaggtaattggcacgagctgagggtctcccggactgctaaaaatggaatcctgcaggtcgacaagcagaaaattgtggaggggatggccgagggcggtttcacgcaaattaaatgtaacacggacatattcatcgggggcgtccccaactatgacgatgtcaaaaaaaacagcggtgtgctgaagcccttctcagggtcaattcagaaaatcattctgaacgatcgaaccatccacgtgaagcatgactttaccagcggcgtaaacgtggaaaacgctgcccacccctgtgtgagggccccttgcgcacacgggggctcttgcagaccaagaaaagaaggttacgactgcgactgtccgttgggtttcgaaggactccattgccagaaagcgatcattgaggccattgagattccccagttcatcgggcgcagttatctgacctacgataaccctgatattctgaaacgggtctctggttcgagaagtaatgtgttcatgcgctttaagaccaccgctaaagatggtctgttgctgtggcgcggagattcccccatgcgccccaatagcgattttatatcgcttgggctgcgcgacggcgctctggtgttcagttacaatctaggtagcggggtggcatcgattatggtaaacggctcgtttaatgatggtcgttggcacagagttaaggctgtgcgagacggccaaagtggtaagataactgtcgacgattatggtgctcgaacaggcaaatccccaggtatgatgagacagctgaatataaacggagccctgtacgtaggaggaatgaaggagattgccttgcataccaacagacaatatatgcggggtctggttggatgcatttctcattttaccttatcaacggattaccatatctcccttgttgaggacgccgtagatgggaagaacatcaacacttgcggtgccaagtag

SEQ ID NO: 256991 - DNA, 1128 bp, Artificial Sequence
  derived and/or modified sequence
atggagtttgagatcactttccgcccggattctggcgacggcgtgttattatatagctatgataccggctctaaagatttcctctcgatcaacctggctgggggccacgtggaatttcgctttgattgtgggagtggaaccggtgtgctgcggtctgaggatcccttgacactggggaattggcacgaactcagagtctcccggacggctaaaaatggcatacttcaggttgataagcagaaaatagttgagggtatggcagaaggaggtttcacacagatcaagtgtaacaccgatatctttatcgggggtgtacccaactatgacgatgtgaagaaaaatagtggcgtactaaagcctttttctggctcaatccagaaaataatcttaaacgaccgtactatccacgttaagcacgatttcacctctggcgtgaatgttgagaacgccgcccatccctgtgtgcgggctccctgtgctcatggcgggtcctgcaggccacggaaagagggttatgactgcgactgtcccctgggattcgagggcttgcattgtcaaaaagccatcatagaggccatcgagatccctcaattcatcggaagatcctaccttacatacgacaatcccgacatcctgaaaagggtgtccggaagcagatcaaatgtttttatgcggtttaaaaccactgcaaaggacggcctgcttctgtggagaggtgatagccctatgcgccccaacagtgacttcatcagtctgggcctgagagacggcgctcttgttttctcctacaaccttggcagtggcgtggcatctatcatggtgaacggttctttcaacgatggtagatggcacagagtaaaagccgtgcgtgatggacagagcggaaagatcacagtggatgactatggtgcaaggacgggcaaatcacccggaatgatgaggcagctgaacatcaatggcgcattgtatgtcgggggaatgaaagaaatcgcgcttcacactaacaggcagtatatgcgggggctggtggggtgcatttcgcactttactctgtccacagactaccatatttcactagtcgaggatgctgtggacggtaaaaatataaacacttgcggggcgaaatag

SEQ ID NO: 256992 - DNA, 2328 bp, Artificial Sequence
  derived and/or modified sequence
atgcaccctggccctgaggaggccggcagcggccgctatggcccccgctacatcacagacatgggcgctggagaagatgatgagggctttgaagatgacctggacctggacatcagctttgaggaggtgaagcccctgcctgccaccaagggcggcaacaagaagttcctggtggagagcaagaagatgagcatcagcaaccccaagaccatcagccgcctcatcccccccaccagcgccagcctgcctgtgaccaccgtggccccccagcccatccccatccagaggaagggcaagaatggagtggccatcatgagccggctgtttgacatgccctgtgatgagaccctgtgcagcgctgacagcttctgtgtgaatgactacacctggggcggcagccgctgccagtgcaccctgggcaaaggaggagagagctgcagcgaggacatcgtcatccagtacccccagttcttcggccacagctatgtgacctttgagcccctgaagaacagctaccaggccttccagatcaccctggagttccgggcagaggccgaggatggcctgctgctgtactgtggagaaaatgagcacggccgcggggacttcatgagcctggccatcatccgccgcagcctgcagttccgcttcaactgtggcactggagtggccatcatcgtgtctgagaccaagatcaagctgggcggctggcacacagtgatgctgtacagagatggcctgaatggcctgctgcagctgaacaacggcacccctgtgacaggccagagccagggccagtacagcaagatcaccttccgcacccccctgtacctgggcggggcccccagcgcctactggctggtgcgggccaccggcaccaacagaggcttccagggctgtgtgcagagcctggccgtgaatggaagaagaattgacatgaggccctggcccctgggcaaggccctgtctggagcagatgtgggagaatgtagcagcggcatctgtgatgaggccagctgcatccacggcggcacctgcacagccatcaaggctgacagctacatctgcctgtgccccctgggcttcaagggccgccactgtgaagatgccttcaccctgaccatcccccagttccgggagagcctgcggagctatgctgccaccccctggcccctggagccccagcactacctgtccttcatggagtttgagatcaccttccggccagattctggagatggagtgctgctgtacagctatgacaccggcagcaaggacttcctgagcatcaacctggccggcggccacgtggagttccgctttgactgtggcagcggcactggagtgctgcggtctgaggaccccctgaccctgggcaactggcatgagctgcgggtgtccaggacagccaagaatggcatcctgcaggtggacaagcagaagatcgtggagggcatggccgagggcggcttcacccagatcaagtgcaacacagacatcttcatcggcggcgtgcccaactatgatgatgtgaagaagaacagcggcgtgctgaagcccttcagcggcagcatccagaagatcatcctgaatgacaggaccatccacgtgaagcatgacttcaccagcggcgtgaatgtggagaatgctgcccacccctgtgtgcgggccccctgtgcccatggaggcagctgccggcccaggaaggagggctatgactgtgactgccccctgggctttgagggcctgcactgccagaaggccatcatcgaggccatcgagatcccccagttcatcggccgcagctacctgacctatgacaacccagacatcctgaagagggtgtctggcagccgcagcaatgtgttcatgaggttcaagaccacagccaaggatggcctgctgctgtggaggggggacagccccatgaggcccaacagcgacttcatcagcctgggcctgagagatggagccctggtgttctcctacaacctgggcagcggcgtggccagcatcatggtgaatggcagcttcaatgatggccgctggcaccgggtgaaggctgtgagagatggccagagcggcaagatcaccgtggatgattatggagccaggacaggcaagagccctggcatgatgaggcagctgaacatcaatggagccctgtatgtgggcggcatgaaggagatcgccctgcacaccaaccggcagtacatgaggggcctggtgggctgcatcagccacttcaccctgagcacagactaccacatcagcctggtggaggatgctgtggatggcaagaacatcaacacctgtggggccaagtag

SEQ ID NO: 256993 - DNA, 2328 bp, Artificial Sequence
  derived and/or modified sequence
atgaaggagggccctgaggaggccggcagcggccgctatggcccccgctacatcacagacatgggcgctggagaagatgatgagggctttgaagatgacctggacctggacatcagctttgaggaggtgaagcccctgcctgccaccaagggcggcaacaagaagttcctggtggagagcaagaagatgagcatcagcaaccccaagaccatcagccgcctcatcccccccaccagcgccagcctgcctgtgaccaccgtggccccccagcccatccccatccagaggaagggcaagaatggagtggccatcatgagccggctgtttgacatgccctgtgatgagaccctgtgcagcgctgacagcttctgtgtgaatgactacacctggggcggcagccgctgccagtgcaccctgggcaaaggaggagagagctgcagcgaggacatcgtcatccagtacccccagttcttcggccacagctatgtgacctttgagcccctgaagaacagctaccaggccttccagatcaccctggagttccgggcagaggccgaggatggcctgctgctgtactgtggagaaaatgagcacggccgcggggacttcatgagcctggccatcatccgccgcagcctgcagttccgcttcaactgtggcactggagtggccatcatcgtgtctgagaccaagatcaagctgggcggctggcacacagtgatgctgtacagagatggcctgaatggcctgctgcagctgaacaacggcacccctgtgacaggccagagccagggccagtacagcaagatcaccttccgcacccccctgtacctgggcggggcccccagcgcctactggctggtgcgggccaccggcaccaacagaggcttccagggctgtgtgcagagcctggccgtgaatggaagaagaattgacatgaggccctggcccctgggcaaggccctgtctggagcagatgtgggagaatgtagcagcggcatctgtgatgaggccagctgcatccacggcggcacctgcacagccatcaaggctgacagctacatctgcctgtgccccctgggcttcaagggccgccactgtgaagatgccttcaccctgaccatcccccagttccgggagagcctgcggagctatgctgccaccccctggcccctggagccccagcactacctgtccttcatggagtttgagatcaccttccggccagattctggagatggagtgctgctgtacagctatgacaccggcagcaaggacttcctgagcatcaacctggccggcggccacgtggagttccgctttgactgtggcagcggcactggagtgctgcggtctgaggaccccctgaccctgggcaactggcatgagctgcgggtgtccaggacagccaagaatggcatcctgcaggtggacaagcagaagatcgtggagggcatggccgagggcggcttcacccagatcaagtgcaacacagacatcttcatcggcggcgtgcccaactatgatgatgtgaagaagaacagcggcgtgctgaagcccttcagcggcagcatccagaagatcatcctgaatgacaggaccatccacgtgaagcatgacttcaccagcggcgtgaatgtggagaatgctgcccacccctgtgtgcgggccccctgtgcccatggaggcagctgccggcccaggaaggagggctatgactgtgactgccccctgggctttgagggcctgcactgccagaaggccatcatcgaggccatcgagatcccccagttcatcggccgcagctacctgacctatgacaacccagacatcctgaagagggtgtctggcagccgcagcaatgtgttcatgaggttcaagaccacagccaaggatggcctgctgctgtggaggggggacagccccatgaggcccaacagcgacttcatcagcctgggcctgagagatggagccctggtgttctcctacaacctgggcagcggcgtggccagcatcatggtgaatggcagcttcaatgatggccgctggcaccgggtgaaggctgtgagagatggccagagcggcaagatcaccgtggatgattatggagccaggacaggcaagagccctggcatgatgaggcagctgaacatcaatggagccctgtatgtgggcggcatgaaggagatcgccctgcacaccaaccggcagtacatgaggggcctggtgggctgcatcagccacttcaccctgagcacagactaccacatcagcctggtggaggatgctgtggatggcaagaacatcaacacctgtggggccaagtag

SEQ ID NO: 256994 - DNA, 1128 bp, Artificial Sequence
  derived and/or modified sequence
atggagtttgagatcaccttccggccagattctggagatggagtgctgctgtacagctatgacaccggcagcaaggacttcctgagcatcaacctggccggcggccacgtggagttccgctttgactgtggcagcggcactggagtgctgcggtctgaggaccccctgaccctgggcaactggcatgagctgcgggtgtccaggacagccaagaatggcatcctgcaggtggacaagcagaagatcgtggagggcatggccgagggcggcttcacccagatcaagtgcaacacagacatcttcatcggcggcgtgcccaactatgatgatgtgaagaagaacagcggcgtgctgaagcccttcagcggcagcatccagaagatcatcctgaatgacaggaccatccacgtgaagcatgacttcaccagcggcgtgaatgtggagaatgctgcccacccctgtgtgcgggccccctgtgcccatggaggcagctgccggcccaggaaggagggctatgactgtgactgccccctgggctttgagggcctgcactgccagaaggccatcatcgaggccatcgagatcccccagttcatcggccgcagctacctgacctatgacaacccagacatcctgaagagggtgtctggcagccgcagcaatgtgttcatgaggttcaagaccacagccaaggatggcctgctgctgtggaggggggacagccccatgaggcccaacagcgacttcatcagcctgggcctgagagatggagccctggtgttctcctacaacctgggcagcggcgtggccagcatcatggtgaatggcagcttcaatgatggccgctggcaccgggtgaaggctgtgagagatggccagagcggcaagatcaccgtggatgattatggagccaggacaggcaagagccctggcatgatgaggcagctgaacatcaatggagccctgtatgtgggcggcatgaaggagatcgccctgcacaccaaccggcagtacatgaggggcctggtgggctgcatcagccacttcaccctgagcacagactaccacatcagcctggtggaggatgctgtggatggcaagaacatcaacacctgtggggccaagtag

SEQ ID NO: 256995 - DNA, 2328 bp, Artificial Sequence
  derived and/or modified sequence
atgcaccccggccccgaggaggccggcagcggccggtacggccccaggtacattaccgacatgggggcaggtgaagatgacgagggtttcgaggacgatttagaccttgatatcagttttgaggaagtcaaacccctacccgcaaccaagggcggtaacaagaaattcctggtggagtctaagaaaatgagtatctctaaccctaaaacaatttccaggttgattcctcctacaagcgcttcattaccagtgacaactgtcgctccccagccaatacctatccaaaggaagggcaagaatggtgtggcaatcatgtctcggctttttgatatgccttgcgatgagaccctttgttcagcagattcattttgcgttaatgactacacatggggcggaagcagatgccagtgcaccctgggtaagggcggagaaagttgttccgaagatatcgtcatccaatacccgcagttctttggacactcgtacgtgacttttgagcctctcaagaacagctatcaagcattccagatcaccttggagttccgcgcagaagctgaggacggtttgcttctctattgcggtgagaatgagcacggacgcggggacttcatgagcctggccattattagaaggtcactccaattccggttcaattgcgggacaggagtggccattattgtttccgagaccaagatcaaactgggcggttggcatacagtgatgttatatagagacggtctgaatggactgcttcaactgaacaacggaactccggtaactggacaatctcaggggcaatatagcaaaatcaccttccgaactccgctgtatctggggggtgcccccagcgcctactggctggtacgcgctactggtactaatcgtggattccaaggctgtgtccagtctctggccgtgaacggaaggaggatagacatgcgaccttggcccctgggaaaagcactcagcggggcagatgtgggtgagtgcagcagcgggatttgcgatgaagcatcctgcattcacggcgggacatgcaccgccattaaggctgattcttatatttgtctctgtccgctgggtttcaagggtagacactgtgaagacgcttttaccttaaccattccgcagtttagggaatctctcagaagctatgctgccacaccgtggccactggagcctcagcattatttaagttttatggagttcgagattactttccggcccgactccggggatggtgttctcctgtactcgtacgatacaggatcaaaagattttctgtccattaatctggctggtgggcatgtcgaattcagattcgactgtggatctgggaccggggtgctgcgatctgaagatccgctcacgttaggcaactggcacgaactacgcgtgagtcgcactgcaaagaatggaatcctacaggtggacaagcagaagattgtggaaggcatggccgaaggcgggttcacgcagatcaaatgcaacacagatatctttattgggggcgtgcctaattacgacgatgtgaaaaaaaatagtggcgtgctgaagcccttttctggttctatccaaaagattatcctcaatgatcggacgatacatgtgaagcatgacttcactagtggggttaatgtagaaaatgccgcccacccctgtgtgagagccccttgtgctcacggagggtcctgccggccaaggaaggagggctacgattgcgattgccccctgggttttgagggcctccattgccagaaggctattatcgaagcaatcgaaattccacaattcattggccggagctatctgacttacgataatccagacattctgaagagagtttccggaagcagatctaacgtgttcatgagatttaaaacaaccgcgaaagacggtctgctcctgtggaggggggactccccgatgcgtcctaatagcgatttcatatctctgggccttcgggacggagcactggtcttcagttacaacttggggtctggtgtggcctccatcatggttaatggctccttcaatgacggtaggtggcatcgggtgaaagccgtgagagacggacaatccggaaagatcaccgtggatgactatggcgcacggaccgggaagtccccaggcatgatgagacagcttaatattaacggtgcactttacgtgggaggaatgaaggaaatcgctcttcacacaaatcggcagtacatgcgcggcttggtgggatgcatcagccactttaccctaagcactgactaccacataagcctagtcgaagacgctgtggacggcaagaacattaatacttgtggtgcaaagtag

SEQ ID NO: 256996 - DNA, 2328 bp, Artificial Sequence
  derived and/or modified sequence
atgaaggagggccccgaggaggccggcagcggccggtacggcccccggtatatcactgatatgggcgcaggcgaggatgacgagggattcgaggacgatctggacctggatatatccttcgaagaggtaaaacctctccctgcaaccaaaggtggaaacaagaaattcctggtcgaatcaaagaagatgtccatctcaaatccaaagaccatatctaggctaatccccccgacctccgccagcctgccagtaactacggtagctccacagcccatccctatacaaaggaaaggaaaaaacggcgttgctatcatgtctcgactctttgacatgccatgcgacgagactctgtgctcagcagattcattctgcgtgaatgattacacttggggggggagtcggtgccagtgcactcttggaaagggcggtgagagctgttcagaggatattgtgattcagtacccgcagtttttcgggcacagctacgttacttttgagccgctgaagaacagctatcaggctttccagataacactcgagtttagagccgaggcagaagatggcctgctcctgtattgcggagagaacgaacacggcaggggcgacttcatgtccttggcaatcatccgtagatccctgcagtttagatttaactgtggtacaggcgttgccatcattgtcagcgagacaaagataaagttaggcggatggcacaccgtgatgctgtaccgggacgggctaaatggccttttgcagcttaacaatgggacccctgtgactggacagagccagggacagtactccaagataaccttcagaactccactctatttggggggagctcctagcgcctactggctggtacgcgccacgggaactaacaggggattccaaggctgtgtacagagcctggcagttaacggacgcaggatagacatgagaccatggcccctgggcaaagctctgagcggcgccgatgtcggagagtgctcttccggaatttgtgatgaggcctcctgtatccacggggggacatgcactgccattaaagctgactcatacatctgtctgtgtcccctcgggttcaaggggaggcattgcgaggatgcattcactttaactatcccacagtttagagagtctctcagaagctacgcggctaccccctggcctctggagccacagcactacctctcctttatggagttcgagatcactttccggccagactccggggacggagtgcttctgtattcatatgacactggatcaaaagacttcttgtctataaatctcgccggcggacacgtggaattccggttcgactgtggcagtggcaccggggtgttgcggagcgaagacccccttactctcgggaactggcacgagcttagagtcagcagaacggccaaaaacggcatccttcaggtagataagcagaaaattgtcgaaggcatggctgagggagggttcacccaaataaagtgcaacacagatattttcattgggggggtgcctaactacgacgacgtgaaaaaaaattccggagtgcttaagcctttcagcgggtccattcagaagatcatactcaatgatagaaccattcatgtgaagcatgatttcacatccggtgtgaacgtggaaaatgcagcacatccctgcgttcgggcaccgtgtgcccatggaggatcttgccggccccgtaaggagggctacgactgtgattgtcccctcgggtttgagggcctgcactgtcagaaggccattatcgaggccatcgaaattcctcaatttataggacgatcatacttaacatacgataatcccgacatcctcaagagagtgtctggtagtagaagcaacgtatttatgaggtttaagacaacggccaaagacggattgctgttgtggcgcggcgactcacccatgcggccgaattctgatttcataagtctggggctgcgggacggcgctctagtgttttcatataatttgggtagtggagtcgcctccatcatggtgaacggatcatttaatgacggcaggtggcaccgggtgaaagctgtgcgggacggacagtccggcaaaatcaccgtcgacgactatggagcaaggaccggtaagtctcctgggatgatgcggcagctgaatattaatggtgccctatatgtgggtggtatgaaggaaattgccctccacaccaatagacagtacatgcggggcctagtcgggtgtatttcacactttaccctctccacggattaccacatcagtttggtggaagacgcagttgatggcaagaatatcaacacctgcggtgcgaaatag

SEQ ID NO: 256997 - DNA, 1128 bp, Artificial Sequence
  derived and/or modified sequence
atggagttcgagatcaccttccggcccgacagcggcgacggcgtgctgctttatagctacgacaccggttctaaggacttcctcagcattaatctggcaggcgggcacgtggaatttaggtttgattgcggctcagggaccggagttctgcgatctgaggatcctttgacacttggcaattggcatgagctgagggtctcgcggacagccaaaaatgggattctacaggtggacaaacagaagattgtcgagggcatggcagaaggtggctttacccagatcaaatgtaataccgatatcttcattgggggcgtgcccaactacgatgacgtcaaaaagaactctggcgtgctgaagccattcagtggctccattcaaaaaattattttgaatgacagaactattcacgtgaagcacgattttacaagcggggtcaatgtggagaacgctgcccatccctgtgttagggccccttgcgcccacggcggctcctgtcggccgcggaaggaaggatacgattgtgactgtcctctggggtttgaaggattgcattgccagaaagccattatcgaggctatcgagattccacaatttattgggcgctcctatctgacttacgacaatcctgatattctgaagagggtctcaggatcgagatcaaatgtctttatgagatttaagaccactgccaaagatggcctcttactgtggcggggcgactcccctatgaggccaaattctgattttatcagcctgggcctgagggacggcgcactggtgttcagttacaatcttggcagcggcgtggctagtatcatggtgaatggctctttcaatgatggccgctggcatagggtcaaggcagtgagggacgggcagtcaggaaaaatcacagtggatgactacggggcccgtaccggaaagagtcccgggatgatgcgtcaactgaatatcaacggagccctctacgtaggtgggatgaaagaaatcgcactgcatacgaatcggcagtatatgaggggtctggtagggtgtatatctcattttacgttatccacagactaccacataagcctggtggaggatgccgtggacggcaaaaatattaacacatgcggcgccaaatag

SEQ ID NO: 256998 - RNA, 2328 nt, Artificial Sequence
  derived and/or modified sequence
augcaucccgggcccgaagaagccggaucaggacguuaugggcccagauauaucacugacaugggugcuggggaggaugacgaaggguucgaagaugaccuugacuuagauauuucauuugaggaagugaagccucugccagcaaccaaaggagguaacaagaaguucuugguggagagcaaaaagaugagcauuucuaaucccaaaacaauuagucggcuuauuccuccuacauccgccucuuugccggugacgaccguugcaccucaaccuauacccauucagaggaagggcaaaaacggcguugccauaaugucgaggcuguuugacaugccuugcgaugagacccuaugcucggccgacagcuucugugucaacgacuauacuuggggugguucuagaugucagugcacucuggggaaaggaggcgagucauguuccgaggacauagucauucaguauccucaguuuuucgggcacagcuaugugacguuugaaccucugaagaauucguaccaggcauuucagaucacccuugaguuucgcgccgaagcggaagacggacuccugcucuacuguggugaaaaugagcauggccgaggcgacuucaugucacuugccauuauacgucguucgcuacaguucagauuuaauuguggcacuggcguagcgaucaucgugucugagacgaaaaucaaacuugggggcuggcauaccgucaugcuuuaucgcgauggacucaacgggcuauugcagcugaauaacggcacucccgucacuggacagucgcagggacaguacucaaagaucaccuuccguacuccucucuaucuggguggagccccauccgcauauugguuagugcgagccacagguacgaauaggggguuccagggaugcgugcaaagccucgcuguaaauggcaggcgaaucgauaugcgccccuggccuuugggcaaagcccuguccggcgccgaugucggcgaauguucuucagggauaugcgacgaggcgucuuguauccaugguggcacauguacugcuauaaaggccgauucuuacauaugccucuguccacugggauucaaagggagacauugcgaggaugcauucacacuuacuaucccacaguuccgugaaucccugagaucauaugcugcuacacccuggccuuuagaaccucagcauuaucucucguuuauggaguucgagauuacauuuaggccugauuccggagauggagugcugcuauacagcuacgauaccgguucuaaagauuuccucagcaucaaucuggccggcgggcaugucgaguuccgauuugauuguggauccgguacugguguucugcggagugaagacccccugacacuggggaacuggcaugaauugaggguuaguaggacagccaaaaacggcauacuccaaguggacaaacaaaagauuguugaggguauggcugagggaggcuuuacccaaauuaaauguaauaccgauauuuucauaggaggagugcccaauuacgacgacguuaagaagaacucagguguccuuaagcccuuuagcggcucaauccagaagauaauccucaacgauaggacuauccaugugaaacaugacuucaccucuggggugaacguagagaaugccgcacaccccugugugagagcucccugcgcccauggcgggucgugcaggccuaggaaagagggauaugacugcgacuguccacuuggauucgaggggcuacacugucagaaagccaucauagaagcaaucgaaauuccacaguucaucggcagauccuaccuuacguacgacaaucccgacauucuaaagcgagugucugggucucgcucuaacguguucaugagguucaagacaaccgccaaagauggacuauuguuguggcgaggggauucuccuaugagaccuaacucagauuucauuucucuggggcugagagacggcgcacucgucuucuccuauaaucuuggcucgggcguggccuccaucauggugaacggaucguucaacgacggucgguggcacagggucaaagcgguucgggacggacagucuggaaagauuacuguggacgauuacggagccaggacaggcaagucaccagggaugaugcgccaacugaacauaaacggggcuuuauaugugggaggaaugaaagaaauugcgcugcacaccaauagacaauacaugcgagggcuuguggguugcauuucccauuuuaccuuaagcacugauuaucauaucucuuugguggaggacgcugucgauggcaagaacaucaacaccugcggggcgaaauag

SEQ ID NO: 256999 - RNA, 2328 nt, Artificial Sequence
  derived and/or modified sequence
augaaggagggcccagaggaagccggaucaggacgcuauggcccaagauauauuacugacaugggagcuggcgaagaugaugagggcuucgaagacgaucuggaccuggacaucagcuucgaggaagucaaaccccuaccagccacuaaagggggaaacaagaaguuucucguggagucgaaaaagauguccaucuccaacccuaagacuaucagcaggcuaaucccccccaccucagcaagucuacccguaaccaccguugccccgcaacccaucccaauacagaggaaagggaaaaauggaguggcaauaaugaguagguuguuugacaugccuugcgaugagacucuaugcucagcagauucguucugcguuaaugauuacacaugggguggcaguagaugucagugcacucucgggaaaggaggugaaagcuguucugaggacauagugauccaguacccacaguuuuuuggucauuccuacgucacauuugagccucucaaaaacuccuaucaggccuuucagaucacacuggaauuuagagcugaagccgaagacggccugcuucuguauuguggagagaacgaacacgguaggggcgauuuuaugagucuggcaauuauucgcaggucacugcaauuucguuucaacugcggcacagggguggccauuauaguaagcgaaaccaaaaucaaacucggugguuggcacacggugaugcuauaccgggauggcuugaauggacuguuacagcucaacaacgguaccccggugacugggcagucccagggacaauacucuaagauaacuuuuaggaccccucucuaccugggcggagcaccuagugccuacugguugguccgggccacaggcacgaauaggggcuuucaggggugcgugcaaagccuggccgugaaugggagaaggauugauaugcggccuuggccccucgguaaagcacucucuggggcagacguaggagaaugcagcuccgggaucugcgacgaagcgaguugcauacauggaggaacauguaccgccauuaaagcggauucuuacaucugucugugcccacuggguuucaaggggcgacauugcgaggaugccuucacacucacuaucccccaguuucgggaaucccuuagaaguuacgcugcuacccccuggccccuggaaccccagcacuaucugucuuuuauggaauucgaaaucacuuucaggcccgauucuggggacggcguccugcuauauucauaugacacaggguccaaagacuuccuguccaucaaucuggcugguggccacgucgaauuucgguucgacuguggcuccggaacuggcguccuccgaucggaggacccccugacccuugggaacuggcacgaacugcgcguuucgaggacagcaaagaacggcauccuccaaguggauaaacagaaaaucgucgagggcauggcagagggcgguuuuacucagauuaagugcaacaccgacauuuucaucggcggagugccuaacuacgaugaugugaagaagaauuccggggugcucaagccuuucagcggcucaauccaaaaaauaauucugaaugauagaacgauccauguaaagcacgauuucaccagcggcgugaacguagaaaacgcagcccaccccugugugcgggccccuugcgcacauggagggucuugucgaccuagaaaagaaggcuaugacugugauugcccccucgguuuugaaggguugcacugccaaaaagccauaauugaagcuauagagaucccacaguuuaucggccgcucuuaccucacauacgauaauccugacauucugaagagaguauccgggagccgauccaauguauucaugcguuucaaaaccacagcuaaggauggacugcuacuguggcgaggcgauucccccaugcggccaaacagcgacuucauuucuuugggguuaagagacggagcccuugucuucuccuacaacuugggcagcggaguggcuagcauaaugguaaacggcuccuuuaacgacgggcgcuggcaccgggugaaggccguccgugacgggcaauccgggaagauuaccguagaugauuacggggcccggacuggaaaaucgccgggaaugaugaggcagcugaacauuaacggugcccuguaugucggcggcaugaaggaaauugcgcugcauacuaaccgacaguauaugcgggguuuaguugguugcauaagucauuuuacacugucuaccgauuaucacauuucucuuguggaggaugcaguugacggcaaaaauaucaacacuugcggcgccaaauag

SEQ ID NO: 257000 - RNA, 1128 nt, Artificial Sequence
  derived and/or modified sequence
auggaauucgaaauuacauuucgccccgacucaggagacggaguuuugcuuuauucauaugauaccggcucaaaggauuuucucagcaucaacuuggccgggggccauguagaauuuagauucgauugcggaagcggcaccggaguucucagaagcgaagacccucugacucuuggaaacuggcaugaacuucgggugucccggaccgcaaaaaacggcauccuccagguggacaagcagaaaauuguagagggaauggcugagggaggcuuuacccaaauuaagugcaauaccgacauuuucauaggcgggguucccaauuacgaugacgugaaaaagaacuccggcgugcucaaaccauuuucaggaucuauucagaaaauaauucucaacgauagaacuauucacgugaagcaugacuucacaucgggaguuaauguugagaacgcagcacauccuugugugcgagcgcccugugcccauggaggaaguugucggccacgaaaggaaggauaugacugcgacuguccgcucggguuugaaggacugcacugucagaaagcuauaaucgaggccauugagaucccacaguucauuggaagauccuaucugaccuacgacaaccccgacauacuaaaacgggucuccggcagccgaucuaaugucuuuaugcgauucaagacuacggcaaaggauggucuucuccuguggaggggagauucucccaugaggccgaacagcgauuuuaucucacuugggcucagagauggcgcccugguguucuccuauaauuugggaucaggcguugcgagcauaauggugaacggguccuucaacgauggccgcuggcauagggugaaggcugugcgcgaugggcagucuggcaagauuacaguggaugauuauggcgccaggacuggcaagucucccggcaugaugcgacagcucaacaucaauggugccuuguacguggguggcaugaaggagauugcccugcacaccaauaggcaauacaugagaggacuaguagggugcauuucccacuucacucugucaaccgauuaucauaucucccuugucgaagaugcuguggacgguaagaacauuaacacguguggagcgaaguag

SEQ ID NO: 257001 - RNA, 2328 nt, Artificial Sequence
  derived and/or modified sequence
augcacccaggacccgaagaagcugguucaggccgguauggcccgcgguauaucacugacaugggugccggagaagacgacgaaggcuuugaggaugaucuugaucucgacauuucauucgaagaggucaaaccacugccagcuacuaagggugggaauaaaaaauuucuuguagagagcaaaaaaauguccaucucuaauccuaagacuaucagcaggcucauuccucccaccucugccagccuuccuguuacaacuguagcaccccagccaauccccauccagcggaaaggaaagaaugguguggcaauuaugucacgacuguuugacaugccuugcgacgagaccuuaugcagcgccgauucuuuuugcgugaacgauuacaccuggggagguucuagaugucaaugcaccuugggcaaaggcggugagucgugcagcgaggacauugugauccaguauccccaauuuuuuggccacagcuacgugaccuuugaaccccugaaaaacaguuaucaagcuuuucagauuacucucgaauuccgggcagaggccgaggacggauugcucuuguauugcggagaaaacgagcaugguaggggugacuuuaugagcuuagcaauuaucaggcguucccugcaauuccgguuuaacugcggaacaggaguagcaaucaucgugucugaaacaaagauuaaguuggggggcuggcacaccgugauguuguacagagacggcuugaauggacuuuugcagcugaauaauggaaccccugucacuggccagagucagggacaauacagcaagauuacguucagaacccccuuauaucugggcggggcgcccagugccuauugguuggucagagcgacgggcaccaaucgcggauuccagggaugcguucagucucuagcugugaacggacgacgaauagacaugagaccauggccauugggcaaggcauuaucuggcgcugauguuggcgaauguucuucagggaucugcgaugaggccucauguauacacggcggcacgugcaccgccaucaaagcugacaguuauauuugucucugcccucucggguucaaagggcgccacugugaagacgccuuuacccuuaccauuccccaguuccgugagagccuacgaucuuacgccgcuaccccauggccucucgaaccacaacauuaccuguccuucauggaguucgaaauaacuuuuagaccugacucaggggaugguguacuccuguauagcuacgacacaggaaguaaggacuuucuguccauuaaucucgcagggggccauguugaguuucguuucgauuguggauccggcacaggcguacuaagaagugaggacccucugacgcucgguaacuggcacgaguuacgugugucacguacagcaaagaaugguauuuugcagguggacaagcaaaagaucguagagggcauggcagaaggcgguuucacccagauuaaauguaacacagauauauucaucggcggagugcccaacuacgaugacguuaaaaaaaauuccggagugcugaagcccuuuucugguagcauacaaaaaaucaucuuaaacgaucgcaccauccauguuaaacacgauuucacaucaggugucaaugucgaaaaugcugcccaccccugcguccgcgcaccuugcgcacacggagguuccugccggccgagaaaggaaggcuacgacugugacugcccccucggauucgaaggucuccacugucagaaggcuaucauugaagccauugaaauuccacaguucaucggccgaucauaccuaaccuacgacaaccccgacauucuuaaacgugugagcgggaguagaucaaacguuuucaugagauuuaaaaccaccgcuaaggacgggcuuuuguuauggcgcggggacucgccaaugcguccuaauagcgacuucauauccuugggucugcgcgacggcgcucugguguuuuccuacaaucuuggcagcgguguggccagcaucaugguuaacggcucauuuaaugacggacgcuggcaucgggucaaagcgguacgagauggacaguccgguaaaauuaccgucgacgauuacggagccaggacaggcaagucaccagggaugaugcgccaacugaacauaaacggggcuuuauaugugggaggaaugaaagaaauugcgcugcacaccaauagacaauacaugcgagggcuuguggguugcauuucccauuuuaccuuaagcacugauuaucauaucucuuugguggaggacgcugucgauggcaagaacaucaacaccugcggggcgaaauag

SEQ ID NO: 257002 - RNA, 2328 nt, Artificial Sequence
  derived and/or modified sequence
augaaagaagguccagaagaagcaggcagcggacgauacggcccacgguacauuacagacaugggggccggugaagaugacgagggcuucgaggaugaccucgauuuggauaucucuuucgaggagguuaagccucuccccgccacaaagggaggaaacaagaaauuucuggucgagucgaagaagaugagcaucuccaauccaaaaaccauaucucgguugaucccaccuaccuccgcgagccucccagucacuacaguagcuccccaaccaauuccaauccaaagaaagggcaagaauggaguggcaauaaugaguagguuguuugacaugccuugcgaugagacucuaugcucagcagauucguucugcguuaaugauuacacaugggguggcaguagaugucagugcacucucgggaaaggaggugaaagcuguucugaggacauagugauccaguacccacaguuuuuuggucauuccuacgucacauuugagccucucaaaaacuccuaucaggccuuucagaucacacuggaauuuagagcugaagccgaagacggccugcuucuguauuguggagagaacgaacacgguaggggugauuucaugagucucgcaauuauucguaggaguuuacaguucagguucaacuguggcaccggaguggcgaucauugugucugagacaaagauuaagcuggguggcuggcauacagucauguuauaccgugacggucuuaacggucuguuacaacucaacaacggcacccccguuacaggccagagccagggccaauacucaaaaaucacauucaggacacccuuguaucugggcggagccccaucugcauauuggcuggucagagccacugguacaaaccgcggcuuucaggguugcguacaaucccuugccgucaacggaaggaggaucgacaugagaccuuggccacucgguaaggcgcugucuggcgccgacgugggugaauguucaucaggaauuugugaugaggcauccuguauccauggcggcacuugcaccgcgauuaaagccgacucuuauaucugccuguguccacucggguuuaagggaagacauugcgaggacgcuuuuacucucacuaucccccaguuucgugaaucuuugagaucuuacgccgccacgccuuggccccucgagccucagcacuaccuuucauucauggaauuugaaaucacuuucagaccugacuccggagauggcguucugcuauacagcuaugacaccggaagcaaagauuuucucuccauuaaucuggcuggaggacauguugaguuucgcuuugauuguggaucagguaccggaguccucagaucagaagacccacugacccuaggcaacuggcacgaguuacgagugagcaggacagcaaagaacggcauacugcaagucgacaaacagaagauuguggaggggauggcggagggaggauuuacacagaucaaauguaacaccgauaucuucauuggaggagucccuaauuacgacgaugugaaaaagaauucaggcguauugaaaccauucagcgguagcauucagaagauuauauuaaaugacagaacuauucacgucaagcacgauuuuacaagcggagugaauguggagaaugcagcucauccauguguccgcgcacccugugcccacggcgggaguuguagaccccggaaggaagguuacgacugugauugcccccugggguuugaaggucuucauugccagaaagccauuaucgaagccaucgagaucccucaguuuauaggcagguccuacuugacauacgacaaucccgauauccugaagagaguaucuggcucccgcucuaauguauuuaugagguuuaaaacgacagcuaaagacggcuugcucuuguggagaggagauucaccuaugagaccuaauagugacuuuauuucacugggacuaagagacggcgcccugguguucuccuacaaucuggguuccggcguggccucgauuauggugaacggaagcuucaacgacggacgguggcacagagugaaggcagucagggauggccaaagcgggaagauuaccgucgaugacuauggggcacguaccgguaaaucuccugggaugaugcggcagcuuaacaucaauggagcucuguaugugggaggaaugaaagagaucgcccugcacacaaaucgucaguauaugcgcggacucgugggcugcauuucucacuuuacacucagcaccgacuaucacauaagucuuguggaggacgccguagaugggaagaauauaaauaccuguggcgcgaaauag

SEQ ID NO: 257003 - RNA, 1128 nt, Artificial Sequence
  derived and/or modified sequence
auggaguucgaaaucaccuuuaggcccgacucuggggauggcguccugcuguacagcuacgacacaggcuccaaggauuuccucaguaucaacuuggccggagggcacguagaauuucgguuugacugugggucaggaacuggaguguuaagauccgaagacccccucacauugggaaauuggcacgaacucagggucuccagaacugcaaaaaaugguaucuugcaaguugauaagcagaaaaucguugaaggcauggcagaaggagguuuuacccaaauaaagugcaauacagacauauuuaucggagguguucccaacuaugacgacgucaaaaagaauagcggugucuuaaaacccuucagcgggucgauacagaaaaucauccugaacgacagaacaauucacguuaaacacgacuucacuucgggcgugaacgucgagaaugcagcucaccccugcguccgugcuccaugcgcccauggaggaucuugccggccccgcaaagaaggcuaugauugugacuguccacugggcuuugagggucugcauugucagaaggccauuaucgaagcaauagaaauuccccaauuuauaggacggucuuaccugacauaugauaaucccgauauccugaaaagagugucagguucccggaguaacguauuuaugcguuuuaagacuacggcaaaggacggguugcuuuuguggagaggugauucccccaugcguccuaauuccgacuuuaucucacuggggcucagagacggggcacugguuuucuccuauaacuugggcucuggaguagccagcauaauggugaaugggucuuuuaaugacgguagguggcaucgagugaaagcagugcgcgaugggcaaagcgggaaaauuacugucgaugauuacggugcucggacaggaaagucaccuggcaugaugcgacagcuuaauaucaauggagccuuguacguggggggcaugaaggagauugcacugcacacaaauagacaguacaugcgggggcuuguaggauguauuucccacuuuacucucuccacagacuaccacauaucauugguggaggacgcaguggauggcaaaaauauuaauacuuguggcgcuaaguag

SEQ ID NO: 257004 - DNA, 459 bp, Artificial Sequence
  derived and/or modified sequence
atgcggtttaaaactactgccaaggacgggcttctcctgtggcggggtgattcaccaatgcggcctaacagcgattttatcagcttgggcctgagggacggagccttggtctttagttataatctcgggtcaggcgttgctagtatcatggtcaacggatcctttaacgacggcaggtggcatagagtcaaagctgttagagatggccagtccggcaaaatcaccgtggatgactacggtgcacgcactggcaaatcacctgggatgatgcgtcagttgaacattaacggagcactctacgtcggtggcatgaaagaaattgcattacatacaaatagacagtatatgcgcggattagtggggtgtatctcgcactttaccctgagtactgactatcacatcagtctggtggaggacgctgttgacggtaaaaacatcaacacctgtggtgccaagtag

SEQ ID NO: 257005 - DNA, 459 bp, Artificial Sequence
  derived and/or modified sequence
atgcggtttaaaacgacggccaaagatggcctcctgctgtggcggggtgatagcccaatgcgcccaaattcggactttatctctctgggtctgagggatggtgccctagtgtttagctacaaccttggtagcggcgtcgcaagtattatggtcaacgggtcttttaacgacgggcgatggcacagggttaaggcggtcagagatggtcagtccgggaagattacagtggatgactacggtgccagaacaggtaagagccctggcatgatgagacaacttaacattaatggtgctctttacgtgggcggaatgaaggagatcgccctacatactaatcgacagtacatgagagggctggtcggatgtatctcacacttcactctttctaccgattatcatatttctctggtggaggacgccgtcgatggcaagaatatcaacacctgcggcgcaaagtag

SEQ ID NO: 257006 - DNA, 339 bp, Artificial Sequence
  derived and/or modified sequence
atgcggttcaagacgactgcgaaggatggccttttactgtggcgcggagactcccccatgagacccaatagtgatttcatcagtttggggctccgggacggcgctctcgttttctcatataatctcggctcgggggtggctagcattatggtgaacggttcgtttaacgacggcaggtggcaccgcgttaaggcagtaagagatgggcagtccgggaagataactgtggatgattacggagccaggacaggcaagagtcctggaatgatgagacagctaaacattaacggggctctctatgtggggggaatgaaggagatagcactccacacgaactag

SEQ ID NO: 257007 - DNA, 459 bp, Artificial Sequence
  derived and/or modified sequence
atgagatttaaaaccactgctaaggatgggctgctgctgtggaggggggactccccaatgcggcctaattcagattttatctcccttggcctccgggatggggctttggtctttagttataatctcggatccggggtcgccagcattatggttaatgggagctttaacgatggccgttggcaccgggtgaaggcagtgagagacggccagtcaggcaaaattaccgtcgacgattatggggctcgtactggtaagtcccccggaatgatgcgccagcttaacattaatggagctctttacgttggcggaatgaaggagattgccctacacacaaaccgccagtatatgcgagggctggtagggtgtatcagccacttcacactgtctaccgattatcatatcagcctcgtggaggacgccgtcgacggtaagaacattaatacatgtggcgctaaatag

SEQ ID NO: 257008 - DNA, 459 bp, Artificial Sequence
  derived and/or modified sequence
atgaggtttaagacgactgccaaagatggcctgttactctggcggggtgactcacctatgaggcccaactccgattttatctctctgggactgagggacggcgcactagtcttctcatataatctgggtagcggagtggcatcaattatggtcaatgggtccttcaatgacggacgctggcatcgagttaaggcagttcgagatgggcagtctggtaaaataaccgtcgatgactatggagctagaaccggtaaatccccagggatgatgagacagctgaacatcaacggcgcactctacgtaggagggatgaaagagatagcactgcacactaataggcaatacatgcgtggactcgttggttgcatcagtcactttacactttccacagattatcatattagcctcgttgaagatgcagtggacggcaagaatattaacacctgcggagcgaagtag

SEQ ID NO: 257009 - DNA, 459 bp, Artificial Sequence
  derived and/or modified sequence
atgcgattcaagactactgccaaggatggacttctgctctggaggggggattcaccaatgagaccaaactccgattttatatctctgggcctgcgggatggagctctcgtgttttcttataatctcggatcaggagttgcatctattatggttaatggaagttttaatgacggtagatggcacagggtaaaagctgttcgtgatggtcagagcgggaaaattactgtggacgattacggggctcgcacaggcaaaagtccggggatgatgcgacagctgaacattaatggtgctctctacgttgggggcatgaaagaaattgcgctgcatacaaaccgacaatatatgagaggcctggtgggatgtataagccatttcacattgagtacggactaccatattagtctagttgaagatgccgtggacggtaagaatatcaacacttgcggtgccaaatag

SEQ ID NO: 257010 - DNA, 339 bp, Artificial Sequence
  derived and/or modified sequence
atgagattcaaaactaccgccaaggatggtctgttattgtggagaggcgattcaccaatgcgtcccaacagtgactttatttcactgggtctccgcgacggcgccctcgtgttttcttacaatctggggagtggagtagctagcattatggttaatggatcatttaacgacggccgttggcatcgggtgaaggcagttcgcgacggtcagtctggcaagataacagtcgacgattacggtgcccgcacaggcaaatctccaggcatgatgagacagttaaacatcaatggggcattatacgtaggcggcatgaaagaaatcgctcttcatacaaactag

SEQ ID NO: 257011 - DNA, 459 bp, Artificial Sequence
  derived and/or modified sequence
atgcgttttaagacaacagccaaggatggactgctgttgtggaggggagattctcctatgcggcctaacagcgacttcatatctctcgggctaagggacggggcattagtcttttcatacaatcttgggtcaggtgtagccagcattatggtgaacggaagcttcaatgatggccgctggcatagagtcaaagctgtgagggatggccagtcggggaaaataacagttgacgattacggtgctcgcacaggcaaatctccaggcatgatgcggcagctgaatatcaacggggctttgtatgtcggaggaatgaaggagatcgccctgcacacgaaccgccagtacatgagaggcctggtgggctgcatatcacactttacactttccacggattaccacatatcattggtggaagatgcagtggacggaaagaatattaacacctgtggtgctaagtag

SEQ ID NO: 257012 - DNA, 459 bp, Artificial Sequence
  derived and/or modified sequence
atgcgattcaagactactgccaaggatggacttctgctctggaggggggattcaccaatgagaccaaactccgattttatatctctgggcctgcgggatggagctctcgtgttttcttataatctcggatcaggagttgcatctattatggttaatggaagttttaatgacggtagatggcacagggtaaaagctgttcgtgatggtcagagcgggaaaattactgtggacgattacggggctcgcacaggcaaaagtccggggatgatgcgacagctgaacattaatggtgctctctacgtcgggggcatgaaagaaatcgcccttcacaccaacagacaatatatgagaggactggtaggctgtatctcacactttaccctgagcacggattatcacataagtctcgtggaggatgcagtggacgggaagaacatcaacacttgcggagcgaaatag

SEQ ID NO: 257013 - DNA, 339 bp, Artificial Sequence
  derived and/or modified sequence
atgagattcaaaacaaccgctaaggatggactgttattgtggaggggagactcacctatgcgcccaaattcagattttatttccctgggcctgagagatggcgctcttgtgttctcctacaaccttgggtctggtgtagcttctattatggtgaacggctcctttaatgacggacgatggcacagggttaaggcagttagagacggacagtccggtaagatcacagtcgacgactatggagctcgtaccggcaagtctccaggaatgatgaggcaattgaacatcaatggtgccttgtacgtcggaggcatgaaagagatcgcactacacactaattag

SEQ ID NO: 257014 - DNA, 459 bp, Artificial Sequence
  derived and/or modified sequence
atgcgcttcaagactaccgcgaaagacgggttactgctttggcgaggcgacagcccaatgagaccaaacagtgacttcatatctttgggactccgggatggtgccctagttttctcttacaaccttggatcaggagttgcaagcatcatggttaatggttcctttaatgatgggaggtggcacagggtgaaggccgttcgagatggacaaagtggcaaaataaccgtcgacgattacggcgctcgcacagggaagagcccaggaatgatgcgacagcttaacatcaatggggccctgtatgttggcgggatgaaggaaatcgcactccacacaaacaggcagtacatgagggggctggtcggctgcatcagtcacttcacattgtccactgattatcatatctcacttgtagaagacgctgtagacggtaagaatataaatacctgtggtgcaaagtag

SEQ ID NO: 257015 - DNA, 889 bp, Artificial Sequence
  derived and/or modified sequence
agagaaacaaggctggcttcaagtgatctgcaaccagagtaattgggatttgacaaggactgtgaaaggctgactctccctgttctctttcatgctggcaccgggcagagtgtgggaactactgcctcaatacgatcatagaagccattgagatcccgcagtttatcggccgcagttacctgacgtatgacaacccagatatcttgaagaggtaataagcttcaacaggcaccttcctcagctttctggggggtgtcaggatcaagatcaaatgtgttcatgaggtttaaaacaactgccaaggatggccttttgctgtggaggggagacagccccatgagacccaacagcgacttcatttccttgggccttcgggatggagccctcgtgttcagctataacctgggcagtggtgtggcatccatcatggtgaatggctccttcaacgatggtcggtggcaccgagttaaggccgttagggatggccagtcaggaaagataaccgtggatgactatggagccagaacaggcaaatccccaggcatgatgcggcagcttaacatcaatggagctctgtatgtgggtggaatgaaggaaattgctctgcacactaacaggcaatatatgagagggctcgtgggctgtatctctcacttcaccctgtccaccgattaccacatttccctcgtggaagatgccgtggatgggaaaaacatcaacacttgtggagccaagtaacaccagctggccttgtccaagggacagagccttctattctgagaatcccaggggccctcagaccctgcctgatgctatatgcagaggcccagggaccaggtgtgtttcctctcaccaagaagaaagtacacactgatgagaaactgagaac

SEQ ID NO: 257016 - DNA, 459 bp, Artificial Sequence
  derived and/or modified sequence
atgagattcaagaccaccgccaaggacggcctgctgctgtggagaggcgacagccccatgagacccaacagcgacttcatcagcctgggcctgagagacggcgccctggtgttcagctacaacctgggcagcggcgtggccagcatcatggtgaacggcagcttcaacgacggcagatggcacagagtgaaggccgtgagagacggccagagcggcaagatcaccgtggacgactacggcgccagaaccggcaagagccccggcatgatgagacagctgaacatcaacggcgccctgtacgtgggcggcatgaaggagatcgccctgcacaccaacagacagtacatgagaggcctggtgggctgcatcagccacttcaccctgagcaccgactaccacatcagcctggtggaggacgccgtggacggcaagaacatcaacacctgcggcgccaagtag

SEQ ID NO: 257017 - DNA, 339 bp, Artificial Sequence
  derived and/or modified sequence
atgagattcaagaccaccgccaaggacggcctgctgctgtggagaggcgacagccccatgagacccaacagcgacttcatcagcctgggcctgagagacggcgccctggtgttcagctacaacctgggcagcggcgtggccagcatcatggtgaacggcagcttcaacgacggcagatggcacagagtgaaggccgtgagagacggccagagcggcaagatcaccgtggacgactacggcgccagaaccggcaagagccccggcatgatgagacagctgaacatcaacggcgccctgtacgtgggcggcatgaaggagatcgccctgcacaccaactag

SEQ ID NO: 257018 - DNA, 459 bp, Artificial Sequence
  derived and/or modified sequence
atgcggtttaagactacagccaaggatgggttgctcctgtggcgaggcgactctcccatgcggcctaactccgacttcatcagtttggggcttcgtgatggggcactggtgttttcctacaacctaggctccggtgttgcttccattatggtgaatggttcttttaacgatggacgttggcatagagtgaaagcagtgagggatggccaatccggcaaaatcaccgtggatgattacggggccagaactggcaaatctcctggaatgatgcggcaactgaacataaacggtgccctgtatgtcggcggtatgaaggagatcgccctgcacacaaataggcagtacatgcgcggccttgtcgggtgcattagccactttaccttatcaacagactaccatatctccttggttgaggacgcagtggatgggaagaatataaacacctgtggagccaagtag

SEQ ID NO: 257019 - DNA, 459 bp, Artificial Sequence
  derived and/or modified sequence
atgcggttcaaaactacagctaaggacgggttgcttctgtggcgcggcgattcccctatgcggccaaacagtgacttcatcagcttgggcttgcgggacggcgcccttgtgtttagctacaatctcgggagcggagtggcgtccatcatggtaaatgggtcatttaatgatggtcgttggcatagggtgaaagcagttcgcgatgggcagtcaggcaaaatcaccgtggacgattatggtgctcgcacaggcaaatcgcccggtatgatgaggcaactcaatatcaacggagccctttacgtgggcggcatgaaggagattgctctgcacaccaaccgtcagtatatgaggggcttagtgggctgtatctcacatttcaccttatccactgattatcatataagtctagtagaagacgccgtggacggaaagaatattaatacatgtggggcaaagtag

SEQ ID NO: 257020 - DNA, 339 bp, Artificial Sequence
  derived and/or modified sequence
atgaggtttaagacgaccgccaaggatggcctgctattatggcgcggggattcgccaatgcggccaaactctgatttcatttcattgggccttcgcgatggagcgctggttttcagttataacctcgggtcaggtgtagcttctatcatggtgaatgggagctttaacgacggaagatggcacagggtgaaggcggtgcgagacggccagtcaggaaagatcacagtggacgattatggcgctcgtacagggaagagccctggtatgatgcgtcaactaaatatcaatggggctttgtacgtggggggcatgaaggagatcgccctgcacacgaattag

SEQ ID NO: 257021 - DNA, 459 bp, Artificial Sequence
  derived and/or modified sequence
atgagatttaaaactaccgccaaggacggacttcttctgtggcggggagatagccccatgcgtccaaacagcgatttcatttctttgggcctgagagacggtgcactcgtgttctcatacaacctcggcagcggggtggcctccattatggttaatggctcatttaacgacgggagatggcatcgggtgaaagccgtgcgcgatggccagtcgggcaagatcacagtggacgactacggcgctcggacaggcaaatccccaggcatgatgaggcagctgaatatcaacggcgcgctctacgtgggcggcatgaaggaaattgccctgcatacaaaccgccaatacatgaggggactcgtggggtgcatttcgcactttactctgtctactgattaccatatttcactagttgaggatgcagttgatggtaaaaatattaacacatgcggagcgaagtag

SEQ ID NO: 257022 - DNA, 459 bp, Artificial Sequence
  derived and/or modified sequence
atgaggttcaagaccacagccaaggatggcctgctgctgtggaggggggacagccccatgaggcccaacagcgacttcatcagcctgggcctgagagatggagccctggtgttctcctacaacctgggcagcggcgtggccagcatcatggtgaatggcagcttcaatgatggccgctggcaccgggtgaaggctgtgagagatggccagagcggcaagatcaccgtggatgattatggagccaggacaggcaagagccctggcatgatgaggcagctgaacatcaacggggccctgtatgtgggcggcatgaaggagatcgccctgcacaccaaccggcagtacatgaggggcctggtgggctgcatcagccacttcaccctgagcacagactaccacatcagcctggtggaggatgctgtggatggcaagaacatcaacacctgtggggccaagtag

SEQ ID NO: 257023 - DNA, 339 bp, Artificial Sequence
  derived and/or modified sequence
atgaggttcaagaccacagccaaggatggcctgctgctgtggaggggggacagccccatgaggcccaacagcgacttcatcagcctgggcctgagagatggagccctggtgttctcctacaacctgggcagcggcgtggccagcatcatggtgaatggcagcttcaatgatggccgctggcaccgggtgaaggctgtgagagatggccagagcggcaagatcaccgtggatgattatggagccaggacaggcaagagccctggcatgatgaggcagctgaacatcaacggggccctgtatgtgggcggcatgaaggagatcgccctgcacaccaactag

SEQ ID NO: 257024 - DNA, 459 bp, Artificial Sequence
  derived and/or modified sequence
atgcggttcaagaccaccgccaaggacggcctgctgctgtggcggggtgactccccaatgcggccgaactccgattttatctccttgggcctcagggatggcgccctggtgttcagctacaacctgggtagtggagtggcatcaataatggtgaacggcagttttaacgacgggcggtggcaccgtgtaaaagctgtaagggacgggcagtcaggcaagatcacagtggacgattacggggctagaacgggcaaatcacccggaatgatgcgtcagcttaatataaacggcgccctgtacgtggggggcatgaaggagatagccctgcatactaaccggcaatatatgcgcggcctggtaggatgcataagtcatttcactctgtctaccgattaccatatttctctggtcgaggacgctgttgacggtaaaaatatcaatacatgcggagcgaagtag

SEQ ID NO: 257025 - DNA, 459 bp, Artificial Sequence
  derived and/or modified sequence
atgcggttcaagaccaccgccaaggacggcctgctgctgtggcggggagacagccccatgagaccaaattcagacttcatctccctgggcctccgcgacggagctctagtcttctcgtacaatctggggagcggtgtggcaagcatcatggtcaacggatcattcaacgacggtcgttggcatagagttaaagccgtgcgcgatggtcagtccggtaaaataaccgtggatgattacggggcaaggaccggcaagtctcccggtatgatgagacagcttaacatcaatggcgctctatacgtgggtgggatgaaggagattgccctgcatacaaatcggcagtatatgcgcggactggttggctgcatttcccattttacccttagcacagactatcatataagccttgtcgaggatgcagtcgatgggaagaacattaacacatgcggcgccaagtag

SEQ ID NO: 257026 - DNA, 339 bp, Artificial Sequence
  derived and/or modified sequence
atgcggttcaagaccaccgccaaggacggcctgctgctgtggcggggcgattctcccatgcgcccaaacagtgatttcatatcccttggtctcagagatggagctttggtttttagctacaatctggggtccggggtcgccagcattatggtcaacggaagcttcaacgacgggcggtggcatcgggtcaaagccgtcagggacggacagtcgggaaaaatcacagtagacgattacggggctcggacaggcaagagccccggcatgatgcggcagctgaacataaatggggccctgtacgtgggcggaatgaaagaaattgcccttcataccaactag

SEQ ID NO: 257027 - DNA, 459 bp, Artificial Sequence
  derived and/or modified sequence
atgcggttcaagaccaccgccaaggacggcctgctgctgtggcggggggatagtcctatgagaccaaatagtgatttcatatcactgggcctgagggacggggctttggtctttagctataatttgggatctggagtggcttctatcatggtgaacggctccttcaatgacggccgttggcaccgagtcaaggccgtcagagacggacagtcaggaaagattacagtggacgattacggcgcccgcactggcaaatcccctggcatgatgaggcagttgaacattaatggcgcgctctacgtgggcggaatgaaggagatcgcactacacaccaataggcagtacatgcgcggtctcgtgggatgcatttctcattttaccctgtccaccgactaccatattagtctggttgaggacgcagtggatggcaaaaacatcaacacgtgtggggctaagtag

SEQ ID NO: 257028 - RNA, 459 nt, Artificial Sequence
  derived and/or modified sequence
augagguuuaagacgacugccaaagauggccuguuacucuggcggggugacucaccuaugaggcccaacuccgauuuuaucucucugggacugagggacggcgcacuagucuucucauauaaucuggguagcggaguggcaucaauuauggucaauggguccuucaaugacggacgcuggcaucgaguuaaggcaguucgagaugggcagucugguaaaauaaccgucgaugacuauggagcuagaaccgguaaauccccagggaugaugagacagcugaacaucaacggcgcacucuacguaggagggaugaaagagauagcacugcacacuaauaggcaauacaugcguggacucguugguugcaucagucacuuuacacuuuccacagauuaucauauuagccucguugaagaugcaguggacggcaagaauauuaacaccugcggagcgaaguag

SEQ ID NO: 257029 - RNA, 459 nt, Artificial Sequence
  derived and/or modified sequence
augcgauucaagacuacugccaaggauggacuucugcucuggaggggggauucaccaaugagaccaaacuccgauuuuauaucucugggccugcgggauggagcucucguguuuucuuauaaucucggaucaggaguugcaucuauuaugguuaauggaaguuuuaaugacgguagauggcacaggguaaaagcuguucgugauggucagagcgggaaaauuacuguggacgauuacggggcucgcacaggcaaaaguccggggaugaugcgacagcugaacauuaauggugcucucuacguugggggcaugaaagaaauugcgcugcauacaaaccgacaauauaugagaggccuggugggauguauaagccauuucacauugaguacggacuaccauauuagucuaguugaagaugccguggacgguaagaauaucaacacuugcggugccaaauag

SEQ ID NO: 257030 - RNA, 339 nt, Artificial Sequence
  derived and/or modified sequence
augagauucaaaacuaccgccaaggauggucuguuauuguggagaggcgauucaccaaugcgucccaacagugacuuuauuucacugggucuccgcgacggcgcccucguguuuucuuacaaucuggggaguggaguagcuagcauuaugguuaauggaucauuuaacgacggccguuggcaucgggugaaggcaguucgcgacggucagucuggcaagauaacagucgacgauuacggugcccgcacaggcaaaucuccaggcaugaugagacaguuaaacaucaauggggcauuauacguaggcggcaugaaagaaaucgcucuucauacaaacuag

SEQ ID NO: 257031 - RNA, 459 nt, Artificial Sequence
  derived and/or modified sequence
augcguuuuaagacaacagccaaggauggacugcuguuguggaggggagauucuccuaugcggccuaacagcgacuucauaucucucgggcuaagggacggggcauuagucuuuucauacaaucuugggucagguguagccagcauuauggugaacggaagcuucaaugauggccgcuggcauagagucaaagcugugagggauggccagucggggaaaauaacaguugacgauuacggugcucgcacaggcaaaucuccaggcaugaugcggcagcugaauaucaacggggcuuuguaugucggaggaaugaaggagaucgcccugcacacgaaccgccaguacaugagaggccuggugggcugcauaucacacuuuacacuuuccacggauuaccacauaucauugguggaagaugcaguggacggaaagaauauuaacaccuguggugcuaaguag

SEQ ID NO: 257032 - RNA, 459 nt, Artificial Sequence
  derived and/or modified sequence
augcgauucaagacuacugccaaggauggacuucugcucuggaggggggauucaccaaugagaccaaacuccgauuuuauaucucugggccugcgggauggagcucucguguuuucuuauaaucucggaucaggaguugcaucuauuaugguuaauggaaguuuuaaugacgguagauggcacaggguaaaagcuguucgugauggucagagcgggaaaauuacuguggacgauuacggggcucgcacaggcaaaaguccggggaugaugcgacagcugaacauuaauggugcucucuacgucgggggcaugaaagaaaucgcccuucacaccaacagacaauauaugagaggacugguaggcuguaucucacacuuuacccugagcacggauuaucacauaagucucguggaggaugcaguggacgggaagaacaucaacacuugcggagcgaaauag

SEQ ID NO: 257033 - RNA, 339 nt, Artificial Sequence
  derived and/or modified sequence
augagauucaaaacaaccgcuaaggauggacuguuauuguggaggggagacucaccuaugcgcccaaauucagauuuuauuucccugggccugagagauggcgcucuuguguucuccuacaaccuugggucugguguagcuucuauuauggugaacggcuccuuuaaugacggacgauggcacaggguuaaggcaguuagagacggacaguccgguaagaucacagucgacgacuauggagcucguaccggcaagucuccaggaaugaugaggcaauugaacaucaauggugccuuguacgucggaggcaugaaagagaucgcacuacacacuaauuag

SEQ ID NO: 257034 - RNA, 459 nt, Artificial Sequence
  derived and/or modified sequence
augcgcuucaagacuaccgcgaaagacggguuacugcuuuggcgaggcgacagcccaaugagaccaaacagugacuucauaucuuugggacuccgggauggugcccuaguuuucucuuacaaccuuggaucaggaguugcaagcaucaugguuaaugguuccuuuaaugaugggagguggcacagggugaaggccguucgagauggacaaaguggcaaaauaaccgucgacgauuacggcgcucgcacagggaagagcccaggaaugaugcgacagcuuaacaucaauggggcccuguauguuggcgggaugaaggaaaucgcacuccacacaaacaggcaguacaugagggggcuggucggcugcaucagucacuucacauuguccacugauuaucauaucucacuuguagaagacgcuguagacgguaagaauauaaauaccuguggugcaaaguag

SEQ ID NO: 257035 - protein, 824 aa, Artificial Sequence
  derived and/or modified sequence
MNGEYRGRGFGRGRFQSWKRGRGGGNFSGKWREREHRPDLSKTTGKRTSEQTPQFLLSTKTPQSMQSTLDRFIPYKGWKLYFSEVYSDSSPLIEKIQAFEKFFTRHIDLYDKDEIERKGSILVDFKELTEGGEVTNLIPDIATELRDAPEKTLACMGLAIHQVLTKDLERHAAELQAQEGLSNDGETMVNVPHIHARVYNYEPLTQLKNVRANYYGKYIALRGTVVRVSNIKPLCTKMAFLCAACGEIQSFPLPDGKYSLPTKCPVPVCRGRSFTALRSSPLTVTMDWQSIKIQELMSDDQREAGRIPRTIECELVHDLVDSCVPGDTVTITGIVKVSNAEEANSISNSKGQKTKSSEDGCKHGMLMEFSLKDLYAIQEIQAEENLFKLIVNSLCPVIFGHELVKAGLALALFGGSQKYADDKNRIPIRGDPHILVVGDPGLGKSQMLQAACNVAPRGVYVCGNTTTTSGLTVTLSKDSSSGDFALEAGALVLGDQGICGIDEFDKMGNQHQALLEAMEQQSISLAKAGVVCSLPARTSIIAAANPVGGHYNKAKTVSENLKMGSALLSRFDLVFILLDTPNEHHDHLLSEHVIAIRAGKQRTISSATVARMNSQDSNTSVLEVVSEKPLSERLKVVPGETIDPIPHQLLRKYIGYARQYVYPRLSTEAARVLQDFYLELRKQSQRLNSSPITTRQLESLIRLTEARARLELREEATKEDAEDIVEIMKYSMLGTYSDEFGNLDFERSQHGSGMSNRSTAKRFISALNNVAERTYNNIFQFHQLRQIAKELNIQVADFENFIGSLNDQGYLLKKGPKVYQLQTM

SEQ ID NO: 257036 - DNA, 2475 bp, Artificial Sequence
  derived and/or modified sequence
atgaatggagagtataggggaaggggcttcgggagaggcaggttccagtcttggaaacgggggagaggaggcggcaacttttccggcaaatggcgcgagcgggaacatcgcccggatctgtcaaagactaccggaaagaggacctcagagcagacccctcagtttctgctttccacgaaaactccccaatcaatgcagtccacactggaccgtttcatcccctataaagggtggaagctgtacttttccgaggtgtactccgattcctctccactcatcgaaaagattcaggccttcgagaaatttttcacccgccacattgatctctatgataaggatgaaattgaacgaaaggggagtattctggttgacttcaaagaactaaccgagggaggagaagtgacaaacctcatacccgatatagccactgaactgagggacgctcccgagaaaactttagcctgtatgggtctggccatccaccaggtgcttactaaagatctggagagacacgcagctgagctgcaggcacaggaagggctgtccaacgacggagaaacaatggtcaacgtacctcatatccatgcccgcgtctataattacgagccactcacacagcttaagaacgtccgcgcgaactactacggaaaatatatcgccctgagagggactgtggtgcgcgtgtccaatatcaaaccattatgtactaagatggctttcctttgtgcagcatgtggtgagatccagagcttcccgttaccggatggtaaatactcccttcccaccaagtgccctgtgcccgtgtgccgcggccgctccttcaccgccctgcggagctctcccctcactgtaactatggactggcagagcatcaagatccaggagctgatgagcgacgatcagagagaggcaggccgcatccctcgcacaatcgaatgtgaactggtacacgaccttgtggattcatgtgtccccggcgacaccgtgacaataactggcatcgtgaaggtcagcaatgctgaagaagcgaattcgatctctaactccaaagggcagaaaactaaaagctccgaggatggatgtaaacatggtatgctgatggaatttagcttaaaggacctttacgctattcaggaaatccaggctgaggaaaacctgttcaagctaatcgtgaattctctgtgtccagtaatttttggtcacgaattagtcaaagctggattggcactggctttgttcggaggcagtcaaaagtacgcagacgacaaaaataggattcccattaggggagatccccacattctcgtcgttggcgacccaggactgggcaagagtcagatgcttcaggctgcatgcaatgtggccccgcgtggcgtatatgtgtgtggaaataccaccacgacaagcggtttgaccgtcacattgtcaaaagactctagcagcggagacttcgccttggaggcgggggcacttgtgctgggcgatcaaggcatatgcggcattgatgaattcgataaaatgggcaaccagcaccaggcactgctggaggccatggagcaacagagcatctcgctagcgaaggcaggcgtggtgtgcagcctaccagctcggacatcaattatcgccgccgccaatcccgtaggcgggcattataacaaggccaaaaccgtgtccgaaaacctgaaaatgggatcagctctcctcagccgttttgacctcgtctttatccttcttgacaccccaaatgagcatcatgatcatctacttagcgagcacgtaatagctatccgggcaggcaagcagcgcactatctcttcagctacagttgctaggatgaactcccaggattccaacacctccgtactggaagtggtgagcgaaaagcccctcagcgagagactgaaggtggtgcctggcgaaaccattgatcctatcccacaccaactgttgcgcaagtatatcgggtatgctagacagtacgtctacccgcgcttgagcacagaggcagctagagtcctgcaggacttttaccttgagcttcggaagcagtcgcagcgactaaacagctcacctatcacaacccggcagttggagtctctgatacgactcacagaggcacgcgcccgacttgaattacgggaggaggccacaaaagaagacgctgaggacatcgtggagatcatgaaatacagcatgttaggtacctactcagacgaattcggaaatttggacttcgagcgcagtcagcacggttcaggtatgtccaacaggtccacagcaaagcggtttatcagcgctctgaacaatgttgccgaaagaacgtacaacaatatatttcagtttcaccagctgaggcagatcgcgaaagaacttaacattcaagttgcagactttgagaattttattggcagtctgaatgaccagggatatttgctgaaaaaaggtccaaaagtctaccagctgcagaccatgtag

SEQ ID NO: 257037 - DNA, 2475 bp, Artificial Sequence
  derived and/or modified sequence
atgaatggagagtaccggggccggggcttcggccggggccgcttccagagctggaagaggggccggggcggcggcaacttcagcggcaagtggagggagcgggagcacaggccagacctgagcaagaccaccgggaagaggaccagcgagcagaccccccagttcctgctgagcaccaagaccccccagagcatgcagagcaccctggaccgcttcatcccctacaagggctggaagctgtacttcagcgaggtgtacagcgacagcagccccctgattgagaagatccaggcctttgagaagttcttcaccaggcacatcgacctgtatgacaaggatgaaattgaaaggaagggcagcatcctggtggacttcaaggagctgacagaaggaggagaggtgaccaacctgatcccagacatcgccacagagctgagagatgcccctgagaagaccctggcctgcatgggcctggccatccaccaggtgctgaccaaggacctggagagacatgctgctgagctgcaggcccaggagggcctgagcaatgatggagagaccatggtgaatgtgccccacatccacgcccgggtgtacaactatgagcccctgacccagctgaagaatgtgcgggccaactactacggcaagtacatcgccctgcggggcaccgtggtgcgggtgagcaacatcaagcccctgtgcaccaagatggccttcctgtgtgccgcctgtggggagatccagagcttccccctgcctgatggcaagtacagcctgcccaccaagtgccctgtgcctgtgtgccggggccgctccttcaccgccctgcggagcagccccctgactgtgaccatggactggcagagcatcaagatccaggagctgatgtctgatgaccagcgggaggccggccgcatccccaggaccattgaatgtgagctggtgcatgacctggtggacagctgtgtgcctggggacacagtgaccatcaccggcatcgtgaaggtgtccaatgctgaggaggccaacagcatcagcaacagcaagggccagaagaccaagagcagtgaagatggctgcaagcacggcatgctgatggagttcagcctgaaggacctgtatgccatccaggagatccaggccgaggagaacctcttcaagctgattgtgaacagcctgtgccctgtgatctttggacatgagctggtgaaggccggcctggccctggccctgtttggaggcagccagaagtatgcagatgacaagaaccgcatccccatccggggggacccccacatcctggtggtgggggaccccggcctgggcaagagccagatgctgcaggccgcctgcaatgtggccccccggggcgtgtatgtgtgtggcaacaccaccaccaccagcggcctgactgtgaccctgagcaaggacagcagcagcggggactttgccctggaggccggggccctggtgctgggggaccagggcatctgtggcattgatgaatttgacaagatgggcaaccagcaccaggccctgctggaggccatggagcagcagagcatcagcctggccaaggccggcgtggtgtgcagcctgcctgcccggaccagcatcatcgctgctgccaaccctgtgggcggccactacaacaaggccaagacagtgtctgagaacctgaagatgggcagcgccctgctgagcagatttgacctggtgttcatcctgctggacaccccaaatgagcaccacgaccacctgctgtctgagcacgtgattgccatccgggccggcaagcagaggaccatcagcagcgccaccgtggccaggatgaacagccaggacagcaacacctctgtgctggaggtggtgtctgagaagcccctgtctgagcggctgaaggtggtgcctggagagaccatcgaccccatcccccaccagctgctgaggaagtacatcggctacgcccggcagtatgtgtacccccggctgagcacagaagctgcccgggtgctgcaggacttctacctggagctgaggaagcagagccagaggctgaacagcagccccatcaccacccggcagctggagagcctcatccggctgacagaggcccgggcccggctggagctgcgggaggaggccaccaaggaggatgctgaggacatcgtggagatcatgaagtacagcatgctgggcacctacagtgatgaatttggaaacctggactttgagaggagccagcacggcagcggcatgagcaacagaagcacagccaagcgcttcatcagcgccctgaacaacgtggccgagaggacctacaacaacatcttccagttccaccagctgcggcagatcgccaaggagctgaacatccaggtggccgactttgagaacttcatcggcagcctgaatgaccagggctacctgctgaagaagggccccaaggtgtaccagctgcagaccatgtag

SEQ ID NO: 257038 - DNA, 3442 bp, Artificial Sequence
  derived and/or modified sequence
agggagggagaatccggccggacagatctgcgcgtatcctggagccggcccagttgtgaactaggagagctttgggacctctgtcccaagcaagtaagaactttagccttaggagatgtaaataaagtagtatttgaagaagcacaggagagatgaatggagagtatagaggcagaggatttggacgaggaagatttcaaagctggaaaaggggaagaggtggtgggaacttctcaggaaaatggagagaaagagaacacagacctgatctgagtaaaaccacaggaaaacgtacttctgaacaaaccccacagtttttgctttcaacaaagaccccacagtcaatgcagtcaacattggatcgattcataccatataaaggctggaagctttatttctctgaagtttacagcgatagctctcctttgattgagaagattcaagcatttgaaaaatttttcacaaggcatattgatttgtatgacaaggatgaaatagaaagaaagggaagtattttggtagattttaaagaactgacagaaggtggtgaagtaactaacttgataccagatatagcaactgaactaagagatgcacctgagaaaaccttggcttgcatgggtttggcaatacatcaggtgttaactaaggaccttgaaaggcatgcagctgagttacaagcccaggaaggattgtctaatgatggagaaacaatggtaaatgtgccacatattcatgcaagggtgtacaactatgagcctttgacacagctcaagaatgtcagagcaaattactatggaaaatacattgctctaagagggacagtggttcgtgtcagtaatataaagcctctttgcaccaagatggcttttctttgtgctgcatgtggagaaattcagagctttcctcttccagatggaaaatacagtcttcccacaaagtgtcctgtgcctgtgtgtcgaggcaggtcatttactgctctccgcagctctcctctcacagttacgatggactggcagtcaatcaaaatccaggaattgatgtctgatgatcagagagaagcaggtcggattccacgaacaatagaatgtgagcttgttcatgatcttgtggatagctgtgtcccgggagacacagtgactattactggaattgtcaaagtctcaaatgcggaagaagcaaattctattagtaatagcaaaggacagaaaacaaagagttctgaggatgggtgtaagcatggaatgttgatggagttctcacttaaagacctttatgccatccaagagattcaagctgaagaaaacctgtttaaactcattgtcaactcgctttgccctgtcatttttggtcatgaacttgttaaagcaggtttggcattagcactctttggaggaagccagaaatacgcagatgacaaaaacagaattccaattcggggagacccccacatccttgttgttggagatccaggcctaggaaaaagtcaaatgctacaggcagcgtgcaatgttgccccacgtggcgtgtatgtttgtggtaacaccacgaccacctctggtctgacggtaactctttcaaaagatagttcctctggagattttgctttggaagctggtgccctggtacttggtgatcaaggtatttgtggaatcgatgaatttgataagatggggaatcaacatcaagccttgttggaagccatggagcagcaaagtattagtcttgctaaggctggtgtggtttgtagccttcctgcaagaacttccattattgctgctgcaaatccagttggaggacattacaataaagccaaaacagtttctgagaatttaaaaatggggagtgcactactatccagatttgatttggtctttatcctgttagatactccaaatgagcatcatgatcacttactctctgaacatgtgattgcaataagagctggaaagcagagaaccattagcagtgccacagtagctcgtatgaatagtcaagattcaaatacttccgtacttgaagtagtttctgagaagccattatcagaaagactaaaggtggttcctggagaaacaatagatcccattccccaccagctattgagaaagtacattggctatgctcggcagtatgtgtacccaaggctatccacagaagctgctcgagttcttcaagatttttaccttgagctccggaaacagagccagaggttaaatagctcaccaatcactaccaggcagctggaatctttgattcgtctgacagaggcacgagcaaggttggaattgagagaggaagcaaccaaagaagacgctgaggatatagtggaaattatgaaatatagcatgctaggaacttactctgatgaatttgggaacctagattttgagcgatcccagcatggttctggaatgagcaacaggtcaacagcgaaaagatttatttctgctctcaacaacgttgctgaaagaacttataataatatatttcaatttcatcaacttcggcagattgccaaagaactaaacattcaggttgctgattttgaaaattttattggatcactaaatgaccagggttacctcttgaaaaaaggcccaaaagtttaccagcttcaaactatgtaaaaggacttcaccaagttagggcctcctgggtttattgcagattaaagccatctcagtgaagatatgcgtgcacgcacagacagacagacacacacacacacacacacacacacacacacacacacacacacagtcaaatactgttctctgaaaaatgatgtcccaaaagtattataataggaaaaaagcattaaatataataaactaatttaagaagtgataaagtctccagatgcagtagctcacactgtaatcacagtgactcaggaggctgaggtgagaggattccttgaggccagggttcgagaccaaccttgggcaacatagcaagaccccatttcttaaaaaaaaaaaaaaaaaatttaaacttagctgggtatggtggcacatgcctatagtctcagctacttgtgaggctgaggcaggaggattctttgagcccaggagtttgaggttacagtgagccacaatcacaccaatcactgcactccagcctgggcaataaagtaactcttgactcaaaaaaataaaaaaaattgtagtggtagccatgtgttaattgttaaataaattctccaaagggctaaaagtaaattacttataaattttttatagttgtatttttgacctgccttttatatgtatgaatatttcatagttttgcatatcagatgtaggcatacagacaaatacataaaccaatgaatatattacatattctgtgttccaataaaactttatttatggacactaaaatttgaatttcataaaattttcccatgtcaagaatacaaaatacttgagttttgttttta

SEQ ID NO: 257039 - DNA, 2475 bp, Artificial Sequence
  derived and/or modified sequence
atgaacggcgagtaccggggccggggcttcggccggggccggttccaatcatggaaacgcggccggggtggcggtaactttagtgggaagtggagggaacgtgagcaccgaccagacctttctaagacgaccggaaagagaacaagcgagcagacgccccagttcctgctgtccacaaagacgcctcagtctatgcagagtactctggaccgattcattccttacaagggatggaagctctacttctcggaggtgtattctgatagttcgccacttatcgaaaagatacaggccttcgaaaagtttttcacaagacacattgatctgtatgataaagatgaaatcgagcggaagggatccatcctggtcgatttcaaagagctgactgaaggcggggaggtcacgaacctgattcctgatatcgcaaccgagctgcgtgacgcccccgagaagacgctcgcttgtatgggactggccatccaccaggtgttgacaaaagacctggaacgtcatgccgccgaactgcaggcgcaagagggactttcaaacgacggggagacgatggtgaacgtcccccacattcacgcgagagtgtacaactatgagcccctgactcagctgaaaaacgttcgcgcgaattactacggcaaatatatcgccctgcgagggactgtggtcagggtcagtaatataaagcctttgtgcacaaaaatggcttttctctgcgcagcctgcggggagatccagtcattccccctcccagatggaaaatattcacttccgacaaaatgcccagttcccgtatgtaggggaaggagtttcacggccttgcgcagctcacccctcacagttaccatggactggcaaagcattaaaattcaggagctgatgagcgatgaccaaagagaggccgggaggatccccagaacgatcgaatgtgagttggtacacgatctggtggattcatgtgtgcccggcgatactgtgacgatcaccgggattgtcaaagtctcaaacgctgaagaagcaaatagtatttccaatagcaagggacagaagactaagtcatccgaagatggatgtaagcacggcatgctaatggaattcagcctcaaggatctatatgccatccaagagatacaagccgaggagaatctttttaaattgatcgtcaactctctctgccccgttatcttcggccatgaacttgtgaaagccggtctcgctctggcactgtttggaggtagtcagaaatacgcagacgacaaaaatcggattcctatccgaggcgacccacatatacttgtcgtgggagaccccggcctagggaaatcacagatgctgcaggcggcgtgcaacgttgctcctagaggcgtctatgtctgtgggaatactacaactactagtggtctgacagttaccttatcaaaggactcttcttctggggacttcgccctcgaggctggggcattagtgctgggagatcagggcatatgtggaatcgatgagttcgacaagatggggaatcaacaccaggctctgttagaagctatggagcagcaaagcatctctcttgcgaaagccggggtggtgtgctcactccccgcgcgtacctcaatcattgctgccgccaacccagtgggcggtcactataacaaagcgaagacagtgtccgagaatttaaaaatgggcagcgccctgttatcccgcttcgacttggtctttattttactggatacgcccaacgagcaccacgaccatctgctgtctgaacatgtgattgccattagggctgggaaacagcgcaccatctcctcagctacagtcgcccggatgaattctcaagattctaacacatcagtcttggaagttgtatccgagaaaccattgtctgagaggttaaaggtcgtccctggcgagacaattgacccgatcccccaccaactcttgcgtaagtacatcgggtatgccagacaatacgtgtatcctagattgagtacagaagccgctcgggtattgcaggatttttacctggaactgcgtaagcagtcacagcgacttaatagtagtcctatcactactcgacagcttgaatctctgataagactcacagaggctcgcgccagattggagttaagagaagaagccactaaagaagatgctgaggacattgttgagatcatgaagtactcaatgctgggtacatattcagacgagttcggcaacctagattttgagcgctcacagcatggctcagggatgtctaacagaagcactgctaagagattcatatccgctctgaacaatgtagcagagaggacctataataacatttttcagtttcatcaactgcgccagatcgcaaaggagctgaatatccaagtggcagactttgaaaatttcatcgggagccttaacgatcagggatacctgctgaaaaaaggcccaaaggtttatcagctgcaaaccatgtag

SEQ ID NO: 257040 - DNA, 2475 bp, Artificial Sequence
  derived and/or modified sequence
atgaacggcgaatatcggggacgcggtttcgggcgtggccgatttcagtcctggaaaagaggccgagggggtggcaactttagcggaaaatggcgcgagagagagcatcgaccagatctgagcaagacaaccggcaagcggacctccgaacagacacctcaatttctcctgtcaacaaagaccccccagtccatgcaatccactctggatcgctttatcccttacaaggggtggaagttatatttctccgaagtttatagtgactcgagcccccttattgagaaaatccaagcctttgaaaagttctttacaaggcacatcgatctgtacgacaaagatgaaattgagcgtaaaggctctattttggtcgacttcaaagagcttaccgaaggcggagaagtgaccaatctcatcccagatattgccacggaacttcgggatgcgcctgagaagaccctggcatgtatgggcctcgccattcatcaagtcctcacaaaggacttggaaagacatgcagcagagctccaggcccaggaaggtctctcaaacgacggcgagaccatggtcaacgtcccccatattcatgcccgagtttataattatgagcctctgacacaactgaagaacgtaagagcaaactattacggcaagtacattgcccttagaggcacagttgtgcgggtcagcaacatcaagccactctgtactaagatggcctttctgtgcgccgcttgcggggagatccagtcatttcccttacctgacgggaaatacagcctgcctacaaagtgccccgtgccagtgtgcagagggcgatccttcaccgccttgaggagctcaccgctgacagttaccatggactggcaatctatcaagatccaggagctgatgagtgatgatcagcgggaagctgggaggataccgagaacaatcgaatgcgaactggtacatgacctcgtggattcatgtgtgcccggtgatacagtgaccatcacaggcattgtgaaggtgtccaatgcagaagaagcgaactctatatccaattcgaagggccagaaaacgaagagttctgaggatggctgtaagcatggcatgctgatggaattttcactgaaggacctttatgcaattcaagaaattcaggctgaagaaaatctctttaaattaattgtcaacagtctctgcccagtgatatttggccatgaactcgtgaaggctggcctagcgctggccctctttggaggctcacagaagtatgcagatgataagaatcggatccccattagaggcgatccccatatcctggtcgtgggagacccaggactgggtaagagccagatgctgcaagccgcatgcaacgtggctcctcgaggggtgtatgtgtgtggtaatactaccacaacttccgggctaaccgtcaccctgtctaaggattcctctagtggcgacttcgccctcgaagcaggtgccctggtactgggagaccaggggatctgcggcatcgacgagttcgacaaaatgggtaatcagcatcaggctctgctggaagcaatggagcaacagagtatctctcttgccaaagccggagttgtgtgcagcctgccagccaggacgtcaatcatagcagctgccaacccagtgggtggccactacaataaggccaaaacggtatccgagaacttgaagatggggtccgccctgctgtccagatttgacctcgtgttcattctgctggacaccccaaatgaacaccatgatcatctgcttagcgaacatgtaattgctattagagctggcaagcagagaaccattagctccgctacagttgctaggatgaatagccaagactctaacacctccgtactggaagtggtcagcgagaagcccctcagcgagcgtctgaaggtggtgcctggcgagacgattgatcccatacctcaccagctgttgaggaagtacattggctatgcccgacagtatgtctatccacggttaagcaccgaggccgcacgtgtgttgcaggacttctacctggagctgagaaagcagagccagagactcaattcttctccaatcacgacgcggcaactggagagcctgattcggttaacagaagcgagggcgagactcgaactacgtgaagaggcgaccaaggaggatgcggaggacatcgtcgagatcatgaaatacagcatgctggggacttacagcgatgagtttggcaacctcgatttcgagcggagtcagcacggtagcgggatgagtaatcggtccacagcaaagaggtttatctccgctttaaataatgtcgcggagcgaacatacaacaatatcttccagtttcaccagctccggcagattgccaaagagttaaatattcaggtcgccgattttgagaacttcattggctccttgaatgaccaaggctaccttctcaagaaaggcccaaaggtctaccagctgcagacaatgtag

SEQ ID NO: 257041 - DNA, 2475 bp, Artificial Sequence
  derived and/or modified sequence
atgaacggcgagtacagaggcagaggcttcggcagaggcagattccagagctggaagagaggcagaggcggcggcaacttcagcggcaagtggagagagagagagcacagacccgacctgagcaagaccaccggcaagagaaccagcgagcagaccccccagttcctgctgagcaccaagaccccccagagcatgcagagcaccctggacagattcatcccctacaagggctggaagctgtacttcagcgaggtgtacagcgacagcagccccctgatcgagaagatccaggccttcgagaagttcttcaccagacacatcgacctgtacgacaaggacgagatcgagagaaagggcagcatcctggtggacttcaaggagctgaccgagggcggcgaggtgaccaacctgatccccgacatcgccaccgagctgagagacgcccccgagaagaccctggcctgcatgggcctggccatccaccaggtgctgaccaaggacctggagagacacgccgccgagctgcaggcccaggagggcctgagcaacgacggcgagaccatggtgaacgtgccccacatccacgccagagtgtacaactacgagcccctgacccagctgaagaacgtgagagccaactactacggcaagtacatcgccctgagaggcaccgtggtgagagtgagcaacatcaagcccctgtgcaccaagatggccttcctgtgcgccgcctgcggcgagatccagagcttccccctgcccgacggcaagtacagcctgcccaccaagtgccccgtgcccgtgtgcagaggcagaagcttcaccgccctgagaagcagccccctgaccgtgaccatggactggcagagcatcaagatccaggagctgatgagcgacgaccagagagaggccggcagaatccccagaaccatcgagtgcgagctggtgcacgacctggtggacagctgcgtgcccggcgacaccgtgaccatcaccggcatcgtgaaggtgagcaacgccgaggaggccaacagcatcagcaacagcaagggccagaagaccaagagcagcgaggacggctgcaagcacggcatgctgatggagttcagcctgaaggacctgtacgccatccaggagatccaggccgaggagaacctgttcaagctgatcgtgaacagcctgtgccccgtgatcttcggccacgagctggtgaaggccggcctggccctggccctgttcggcggcagccagaagtacgccgacgacaagaacagaatccccatcagaggcgacccccacatcctggtggtgggcgaccccggcctgggcaagagccagatgctgcaggccgcctgcaacgtggcccccagaggcgtgtacgtgtgcggcaacaccaccaccaccagcggcctgaccgtgaccctgagcaaggacagcagcagcggcgacttcgccctggaggccggcgccctggtgctgggcgaccagggcatctgcggcatcgacgagttcgacaagatgggcaaccagcaccaggccctgctggaggccatggagcagcagagcatcagcctggccaaggccggcgtggtgtgcagcctgcccgccagaaccagcatcatcgccgccgccaaccccgtgggcggccactacaacaaggccaagaccgtgagcgagaacctgaagatgggcagcgccctgctgagcagattcgacctggtgttcatcctgctggacacccccaacgagcaccacgaccacctgctgagcgagcacgtgatcgccatcagagccggcaagcagagaaccatcagcagcgccaccgtggccagaatgaacagccaggacagcaacaccagcgtgctggaggtggtgagcgagaagcccctgagcgagagactgaaggtggtgcccggcgagaccatcgaccccatcccccaccagctgctgagaaagtacatcggctacgccagacagtacgtgtaccccagactgagcaccgaggccgccagagtgctgcaggacttctacctggagctgagaaagcagagccagagactgaacagcagccccatcaccaccagacagctggagagcctgatcagactgaccgaggccagagccagactggagctgagagaggaggccaccaaggaggacgccgaggacatcgtggagatcatgaagtacagcatgctgggcacctacagcgacgagttcggcaacctggacttcgagagaagccagcacggcagcggcatgagcaacagaagcaccgccaagagattcatcagcgccctgaacaacgtggccgagagaacctacaacaacatcttccagttccaccagctgagacagatcgccaaggagctgaacatccaggtggccgacttcgagaacttcatcggcagcctgaacgaccagggctacctgctgaagaagggccccaaggtgtaccagctgcagaccatgtag

SEQ ID NO: 257042 - protein, 1290 aa, Artificial Sequence
  derived and/or modified sequence
MAGAASPCANGCGPGAPSDAEVLHLCRSLEVGTVMTLFYSKKSQRPERKTFQVKLETRQITWSRGADKIEGAIDIREIKEIRPGKTSRDFDRYQEDPAFRPDQSHCFVILYGMEFRLKTLSLQATSEDEVNMWIKGLTWLMEDTLQAPTPLQIERWLRKQFYSVDRNREDRISAKDLKNMLSQVNYRVPNMRFLRERLTDLEQRSGDITYGQFAQLYRSLMYSAQKTMDLPFLEASTLRAGERPELCRVSLPEFQQFLLDYQGELWAVDRLQVQEFMLSFLRDPLREIEEPYFFLDEFVTFLFSKENSVWNSQLDAVCPDTMNNPLSHYWISSSHNTYLTGDQFSSESSLEAYARCLRMGCRCIELDCWDGPDGMPVIYHGHTLTTKIKFSDVLHTIKEHAFVASEYPVILSIEDHCSIAQQRNMAQYFKKVLGDTLLTKPVEISADGLPSPNQLKRKILIKHKKLAEGSAYEEVPTSMMYSENDISNSIKNGILYLEDPVNHEWYPHYFVLTSSKIYYSEETSSDQGNEDEEEPKEVSSSTELHSNEKWFHGKLGAGRDGRHIAERLLTEYCIETGAPDGSFLVRESETFVGDYTLSFWRNGKVQHCRIHSRQDAGTPKFFLTDNLVFDSLYDLITHYQQVPLRCNEFEMRLSEPVPQTNAHESKEWYHASLTRAQAEHMLMRVPRDGAFLVRKRNEPNSYAISFRAEGKIKHCRVQQEGQTVMLGNSEFDSLVDLISYYEKHPLYRKMKLRYPINEEALEKIGTAEPDYGALYEGRNPGFYVEANPMPTFKCAVKALFDYKAQREDELTFIKSAIIQNVEKQEGGWWRGDYGGKKQLWFPSNYVEEMVNPVALEPEREHLDENSPLGDLLRGVLDVPACQIAIRPEGKNNRLFVFSISMASVAHWSLDVAADSQEELQDWVKKIREVAQTADARLTEGKIMERRKKIALELSELVVYCRPVPFDEEKIGTERACYRDMSSFPETKAEKYVNKAKGKKFLQYNRLQLSRIYPKGQRLDSSNYDPLPMWICGSQLVALNFQTPDKPMQMNQALFMTGRHCGYVLQPSTMRDEAFDPFDKSSLRGLEPCAISIEVLGARHLPKNGRGIVCPFVEIEVAGAEYDSTKQKTEFVVDNGLNPVWPAKPFHFQISNPEFAFLRFVVYEEDMFSDQNFLAQATFPVKGLKTGYRAVPLKNNYSEDLELASLLIKIDIFPAKENGDLSPFSGTSLRERGSDASGQLFHGRAREGSFESRYQQPFEDFRISQEHLADHFDSRERRAPRRTRVNGDNRL

SEQ ID NO: 257043 - DNA, 3873 bp, Artificial Sequence
  derived and/or modified sequence
atggccggcgccgccagcccctgcgccaacggctgcggccccggcgcccccagcgacgccgaggtgctgcacctgtgcagaagcctggaggtgggcaccgtgatgaccctgttctacagcaagaagagccagagacccgagagaaagaccttccaggtgaagctggagaccagacagatcacctggagcagaggcgccgacaagatcgagggcgccatcgacatcagagagatcaaggagatcagacccggcaagaccagcagagacttcgacagataccaggaggaccccgccttcagacccgaccagagccactgcttcgtgatcctgtacggcatggagttcagactgaagaccctgagcctgcaggccaccagcgaggacgaggtgaacatgtggatcaagggcctgacctggctgatggaggacaccctgcaggcccccacccccctgcagatcgagagatggctgagaaagcagttctacagcgtggacagaaacagagaggacagaatcagcgccaaggacctgaagaacatgctgagccaggtgaactacagagtgcccaacatgagattcctgagagagagactgaccgacctggagcagagaagcggcgacatcacctacggccagttcgcccagctgtacagaagcctgatgtacagcgcccagaagaccatggacctgcccttcctggaggccagcaccctgagagccggcgagagacccgagctgtgcagagtgagcctgcccgagttccagcagttcctgctggactaccagggcgagctgtgggccgtggacagactgcaggtgcaggagttcatgctgagcttcctgagagaccccctgagagagatcgaggagccctacttcttcctggacgagttcgtgaccttcctgttcagcaaggagaacagcgtgtggaacagccagctggacgccgtgtgccccgacaccatgaacaaccccctgagccactactggatcagcagcagccacaacacctacctgaccggcgaccagttcagcagcgagagcagcctggaggcctacgccagatgcctgagaatgggctgcagatgcatcgagctggactgctgggacggccccgacggcatgcccgtgatctaccacggccacaccctgaccaccaagatcaagttcagcgacgtgctgcacaccatcaaggagcacgccttcgtggccagcgagtaccccgtgatcctgagcatcgaggaccactgcagcatcgcccagcagagaaacatggcccagtacttcaagaaggtgctgggcgacaccctgctgaccaagcccgtggagatcagcgccgacggcctgcccagccccaaccagctgaagagaaagatcctgatcaagcacaagaagctggccgagggcagcgcctacgaggaggtgcccaccagcatgatgtacagcgagaacgacatcagcaacagcatcaagaacggcatcctgtacctggaggaccccgtgaaccacgagtggtacccccactacttcgtgctgaccagcagcaagatctactacagcgaggagaccagcagcgaccagggcaacgaggacgaggaggagcccaaggaggtgagcagcagcaccgagctgcacagcaacgagaagtggttccacggcaagctgggcgccggcagagacggcagacacatcgccgagagactgctgaccgagtactgcatcgagaccggcgcccccgacggcagcttcctggtgagagagagcgagaccttcgtgggcgactacaccctgagcttctggagaaacggcaaggtgcagcactgcagaatccacagcagacaggacgccggcacccccaagttcttcctgaccgacaacctggtgttcgacagcctgtacgacctgatcacccactaccagcaggtgcccctgagatgcaacgagttcgagatgagactgagcgagcccgtgccccagaccaacgcccacgagagcaaggagtggtaccacgccagcctgaccagagcccaggccgagcacatgctgatgagagtgcccagagacggcgccttcctggtgagaaagagaaacgagcccaacagctacgccatcagcttcagagccgagggcaagatcaagcactgcagagtgcagcaggagggccagaccgtgatgctgggcaacagcgagttcgacagcctggtggacctgatcagctactacgagaagcaccccctgtacagaaagatgaagctgagataccccatcaacgaggaggccctggagaagatcggcaccgccgagcccgactacggcgccctgtacgagggcagaaaccccggcttctacgtggaggccaaccccatgcccaccttcaagtgcgccgtgaaggccctgttcgactacaaggcccagagagaggacgagctgaccttcatcaagagcgccatcatccagaacgtggagaagcaggagggcggctggtggagaggcgactacggcggcaagaagcagctgtggttccccagcaactacgtggaggagatggtgaaccccgtggccctggagcccgagagagagcacctggacgagaacagccccctgggcgacctgctgagaggcgtgctggacgtgcccgcctgccagatcgccatcagacccgagggcaagaacaacagactgttcgtgttcagcatcagcatggccagcgtggcccactggagcctggacgtggccgccgacagccaggaggagctgcaggactgggtgaagaagatcagagaggtggcccagaccgccgacgccagactgaccgagggcaagatcatggagagaagaaagaagatcgccctggagctgagcgagctggtggtgtactgcagacccgtgcccttcgacgaggagaagatcggcaccgagagagcctgctacagagacatgagcagcttccccgagaccaaggccgagaagtacgtgaacaaggccaagggcaagaagttcctgcagtacaacagactgcagctgagcagaatctaccccaagggccagagactggacagcagcaactacgaccccctgcccatgtggatctgcggcagccagctggtggccctgaacttccagacccccgacaagcccatgcagatgaaccaggccctgttcatgaccggcagacactgcggctacgtgctgcagcccagcaccatgagagacgaggccttcgaccccttcgacaagagcagcctgagaggcctggagccctgcgccatcagcatcgaggtgctgggcgccagacacctgcccaagaacggcagaggcatcgtgtgccccttcgtggagatcgaggtggccggcgccgagtacgacagcaccaagcagaagaccgagttcgtggtggacaacggcctgaaccccgtgtggcccgccaagcccttccacttccagatcagcaaccccgagttcgccttcctgagattcgtggtgtacgaggaggacatgttcagcgaccagaacttcctggcccaggccaccttccccgtgaagggcctgaagaccggctacagagccgtgcccctgaagaacaactacagcgaggacctggagctggccagcctgctgatcaagatcgacatcttccccgccaaggagaacggcgacctgagccccttcagcggcaccagcctgagagagagaggcagcgacgccagcggccagctgttccacggcagagccagagagggcagcttcgagagcagataccagcagcccttcgaggacttcagaatcagccaggagcacctggccgaccacttcgacagcagagagagaagagcccccagaagaaccagagtgaacggcgacaacagactgtag

SEQ ID NO: 257044 - DNA, 3873 bp, Artificial Sequence
  derived and/or modified sequence
atggcaggagccgcctcaccatgtgcaaatggatgtggcccaggcgcaccaagcgacgcagaggttctgcatctgtgccgcagtttggaggtgggtaccgtgatgacactgttttacagtaaaaaatcgcagcggccagaacggaagacattccaggtgaaactggagaccaggcaaattacatggagccggggtgccgataaaatcgagggggccatcgatattagagagatcaaagagattcggcccggaaaaacctcccgggatttcgataggtatcaggaagaccccgcatttcggcccgaccaatctcactgcttcgtaattctgtacggaatggaattccggcttaaaacactgagccttcaagctacaagcgaagacgaagtgaacatgtggattaagggactgacatggctgatggaggacactcttcaggcacccactcctttacagattgagcggtggcttcggaaacaattctacagcgtggacaggaacagggaagacagaattagcgccaaagacctcaaaaatatgctgtctcaggtcaactaccgggtgccgaacatgaggtttctgcgtgagaggttgaccgacttggaacaacgatccggcgacattacctacggacagtttgctcagctctataggtctctcatgtactctgcacaaaagacaatggacttgccttttctagaggccagcaccttgcgcgccggcgagagacctgaactgtgccgcgtcagtctgcccgagttccagcaatttctcctggactaccagggggagctgtgggccgtagatagactccaggtgcaggagttcatgttatcattcctgcgtgatcctctgagggagatcgaagaaccatacttcttcctcgatgaattcgtcaccttcttattttccaaggagaacagtgtgtggaattcgcagctagacgccgtgtgccccgacacaatgaataatccactgtcccattactggatatcctccagccacaatacttatttaacaggagaccagttttctagtgagtctagtcttgaagcatacgccaggtgtctacggatgggctgtcgctgtatagagcttgactgctgggatggacctgatgggatgcctgtaatttatcatgggcataccttgacaacgaagataaagttttcagatgtacttcacaccattaaggagcatgcgttcgtggcgagtgaatacccagtgatcctgagcattgaggatcactgtagtattgcccagcagcgaaacatggctcagtatttcaagaaggtgctgggcgacacactcctgaccaagccagttgaaatttcagccgatggcctgccctcaccaaatcagctcaagaggaaaattctcattaagcacaagaagttggccgaaggttctgcttacgaagaggtcccaacctcaatgatgtactcggaaaatgacatcagcaatagcatcaaaaatggcatactatacctggaggatcccgtgaaccacgaatggtatcctcactactttgtgctaacatcttcgaagatctattactcagaagaaacaagtagtgatcaaggcaatgaggatgaagaggaacccaaggaggtcagcagtagcactgagctgcattctaatgagaaatggtttcacggcaagctcggagccggacgagatgggcggcatatcgcggaacgcctgttaacagaatattgtattgaaaccggcgcccctgacggctcgttcctggtacgggagtctgagacttttgtgggagactacaccctctccttctggcgtaacgggaaagttcagcactgcaggattcatagtcgtcaggacgcggggacacctaagttcttcctgactgacaaccttgtcttcgattccttatacgacctaattactcactatcagcaggtgcccctcagatgcaacgagtttgagatgcggctaagtgagccggtgccacagacaaatgcacacgagtccaaagaatggtaccatgcttcccttacaagggcacaagccgagcatatgttgatgcgggtcccacgagacggcgccttcctggttagaaaaagaaatgagccgaattcctacgctattagcttccgcgccgagggcaaaattaagcactgtcgggtgcagcaggaaggccagaccgtcatgctggggaactctgaatttgattctctcgtagatctgatttcctactacgagaaacacccgttgtatcgtaagatgaagctacgttacccaatcaatgaagaagcgctggagaagatagggactgccgagccggactatggagcactctacgagggccgaaacccaggcttttatgtcgaggcgaacccaatgccaacattcaagtgtgccgtgaaggcattgttcgactacaaagcacaacgcgaagacgagctgaccttcatcaaaagcgcgatcattcagaacgtcgagaaacaggaaggaggttggtggcgaggtgattacgggggtaagaagcagctgtggtttcccagcaattacgtcgaagagatggtgaacccagtggcccttgagccggagagagagcacttggacgagaactcccctctgggcgaccttctgcggggtgtccttgatgtgccagcctgtcagattgccattcggcccgagggtaagaacaatcgcctatttgtcttttccatttcaatggcctcggtcgcccattggagcctcgacgtggcggccgattcccaggaagagttgcaggattgggtcaagaagattagggaagtcgcccagactgctgacgctcgcctgacagaaggtaaaatcatggagcgccggaagaaaatcgctctggagctgtcggagctcgtggtttactgtagacctgtgccttttgatgaagagaagataggcacagagagggcttgctatagagacatgagcagttttcccgaaaccaaggccgagaaatatgtgaataaagcaaagggaaagaaattcctccagtacaatcggctgcagctttcccgtatctaccccaaggggcagcgtctggacagctctaactatgaccccctgccaatgtggatatgcggcagccagctggtggctcttaatttccaaacgcccgacaagccaatgcaaatgaatcaggccctgttcatgaccggtcgccactgtggatatgtgctgcagccaagtaccatgagagacgaagcattcgatcctttcgacaaatcgtcactaagaggtctcgagccctgcgctataagcattgaggtgctcggagcaagacacttgcctaagaacggtcgggggatcgtgtgcccgttcgtagagatcgaagttgcgggtgccgaatacgactctaccaagcaaaagactgaatttgtcgtagataacggactgaatcccgtctggcctgccaaaccttttcactttcaaatcagcaatccagagttcgcttttctgagattcgttgtatacgaggaggatatgttcagcgaccaaaatttcctggctcaggcaacctttcccgttaagggactcaaaacaggctaccgcgcggtgcccctgaaaaacaactacagcgaggatttggagctcgcttccctgctgattaagatcgatatcttccctgccaaagaaaacggagatctgtctcccttttctggaacctcccttagagaaaggggctctgacgcctctggacagctgtttcacgggcgtgctagagaaggttcttttgagtcaagataccagcagcccttcgaggatttcagaatctctcaggagcatcttgcagatcacttcgactctcgcgaaagacgcgccccccggcgaacccgcgtcaacggagacaaccggctgtag

SEQ ID NO: 257045 - DNA, 3873 bp, Artificial Sequence
  derived and/or modified sequence
atggccggggccgccagcccctgtgccaacggctgcggccctggggcccccagtgatgctgaggtgctgcacctgtgccgcagcctggaggtgggcaccgtgatgaccctcttctacagcaagaagagccagaggcctgagaggaagaccttccaggtgaagctggagacccggcagatcacctggagcagaggagctgacaagattgaaggagccatcgacatccgggagatcaaggagatccggcctgggaagaccagccgggactttgaccgctaccaggaggaccctgccttccggccagaccagagccactgctttgtgatcctgtatggcatggagttccggctgaagaccctgagcctgcaggccaccagtgaagatgaggtgaacatgtggatcaagggcctgacctggctgatggaggacaccctgcaggcccccacccccctgcagatcgagcgctggctgaggaagcagttctacagcgtggacaggaacagagaagatcgcatcagcgccaaggacctgaagaacatgctgagccaggtgaactacagagtgcccaacatgaggttcctgcgggagcggctgacagacctggagcagaggtctggggacatcacctacggccagtttgcccagctgtaccgcagcctgatgtacagcgcccagaagaccatggacctgcccttcctggaggccagcaccctgcgggccggggagaggcctgagctgtgccgggtgtccctgcctgagttccagcagttcctgctggactaccagggcgagctgtgggccgtggaccggctgcaggtgcaggagttcatgctgtccttcctgcgggaccccctgcgggagattgaggagccctacttcttcctggatgaatttgtgaccttcctgttcagcaaggagaacagcgtgtggaacagccagctggatgctgtgtgcccagacaccatgaacaaccccctgagccactactggatcagcagcagccacaacacctacctgaccggggaccagttcagcagcgagagcagcctggaggcctatgcccgctgcctgaggatgggctgccgctgcatcgagctggactgctgggatggcccagatggcatgcctgtgatctaccacggccacaccctgaccaccaagatcaagttcagtgatgtgctgcacaccatcaaggagcacgcctttgtggccagcgagtaccctgtgatcctgagcattgaggaccactgcagcatcgcccagcagaggaacatggcccagtacttcaagaaggtgctgggggacaccctgctgaccaagcctgtggagatctctgcagatggcctgcccagccccaaccagctgaagaggaagatcctgatcaagcacaagaagctggccgagggcagcgcctatgaggaggtgcccacctccatgatgtacagtgaaaatgacatcagcaacagcatcaagaatggcatcctgtacctggaggaccctgtgaaccacgagtggtacccccactactttgtgctgaccagcagcaagatctactacagcgaggagaccagcagtgaccagggcaatgaagatgaggaggagcccaaggaggtgagcagcagcacagagctgcacagcaatgagaagtggttccacggcaagctgggcgccggcagagatggccgccacatcgccgagcggctgctgacagagtactgcatcgagaccggggccccagatggcagcttcctggtgcgggagagcgagacctttgtgggggactacaccctgtccttctggagaaatggcaaggtgcagcactgccgcatccacagccggcaggatgctggcacccccaagttcttcctgacagacaacctggtgtttgacagcctgtatgacctgatcacccactaccagcaggtgcccctgcgctgcaatgaatttgagatgaggctgtctgagcctgtgccccagaccaatgcccacgagagcaaggagtggtaccacgccagcctgacccgggcccaggccgagcacatgctgatgagggtgcccagagatggagccttcctggtgaggaagagaaatgagcccaacagctatgccatctccttccgggcagagggcaagatcaagcactgccgggtgcagcaggagggccagacagtgatgctgggcaacagcgagtttgacagcctggtggacctgatctcctactatgagaagcaccccctgtacaggaagatgaagctgcgctaccccatcaatgaggaggccctggagaagattggaacagctgagccagactatggagccctgtatgagggcaggaaccctggcttctacgtggaggccaaccccatgcccaccttcaagtgtgctgtgaaggccctgtttgactacaaggcccagagagaagatgagctgaccttcatcaagagcgccatcatccagaatgtggagaagcaggagggcggctggtggaggggggactatggaggcaagaagcagctgtggttccccagcaactacgtggaggagatggtgaaccctgtggccctggagcctgagcgggagcacctggatgagaacagccccctgggggacctgctgcggggcgtgctggatgtgcctgcctgccagatcgccatccggcctgagggcaagaacaaccggctgtttgtgttcagcatctccatggcctctgtggcccactggagcctggatgtggccgctgacagccaggaggagctgcaggactgggtgaagaagatccgggaggtggcccagacagcagatgcccggctgacagagggcaagatcatggagaggaggaagaagatcgccctggagctgtctgagctggtggtgtactgcaggcctgtgccctttgatgaggagaagattggaacagagcgggcctgctacagagacatgagcagcttccctgagaccaaggccgagaagtatgtgaacaaggccaagggcaagaagttcctgcagtacaaccggctgcagctgagccgcatctaccccaagggccagaggctggacagcagcaactatgaccccctgcccatgtggatctgtggcagccagctggtggccctgaacttccagaccccagacaagcccatgcagatgaaccaggccctcttcatgacaggccgccactgcggctacgtgctgcagcccagcaccatgagagatgaggcctttgacccctttgacaagagcagcctgcggggcctggagccctgtgccatcagcattgaggtgctgggcgcccggcacctgcccaagaatggccggggcatcgtgtgcccctttgtggagattgaggtggccggggctgaatatgacagcaccaagcagaagacagaatttgtggtggacaatggcctgaaccctgtgtggccagccaagcccttccacttccagatcagcaaccctgagtttgccttcctgcgctttgtggtgtatgaggaggacatgttcagtgaccagaacttcctggcccaggccaccttccctgtgaagggcctgaagacaggctacagagctgtgcccctgaagaacaactacagcgaggacctggagctggccagcctgctgatcaagattgacatcttccctgccaaggaaaatggagacctgagccccttcagcggcaccagcctgcgggagcggggcagtgatgccagcggccagctgttccacggccgggcccgggagggcagctttgagagccgctaccagcagccctttgaggacttccgcatcagccaggagcacctggccgaccactttgacagccgggagcggcgggcccccaggaggaccagggtgaatggagacaaccggctgtag

SEQ ID NO: 257046 - DNA, 3873 bp, Artificial Sequence
  derived and/or modified sequence
atggccggcgccgccagcccctgcgccaacggctgcggccccggcgctccgagcgacgcagaagtgctgcacctttgcagaagcctggaagtcggtactgtgatgactctgttctacagtaaaaaatcccagagacccgagagaaagacattccaggtgaagctcgagactcgacaaattacctggtccagaggagcagataagatcgaaggggcgatcgatatacgcgagatcaaggaaatcagacctggaaaaactagccgcgactttgaccggtaccaagaagacccggcctttcgccctgatcagtctcattgtttcgtgattctgtatgggatggagttccggcttaagacactgagtctgcaggccacctccgaagatgaagtgaatatgtggatcaagggcctgacatggctgatggaggatactctgcaggcgcctactccattgcagatcgaacggtggctgaggaagcagttttattcagtggaccgaaatcgtgaagataggatctcagcaaaggacctgaagaatatgctatcccaggtgaactaccgggttcccaatatgcgctttttgagagaaagacttaccgacctcgagcagaggagcggggacatcacttacggacagttcgcccagctgtaccggtcccttatgtacagtgctcagaaaactatggacctgccttttcttgaggcttcaactctacgggccggggaacgcccggaactgtgtagagtgagtcttccagagtttcagcagttcttgttggattatcaaggagaattgtgggccgtcgaccgtctccaagtacaggaattcatgctgagctttctccgagacccactccgcgaaattgaggagccatactttttccttgatgagttcgtcactttcttgttcagcaaagaaaattcggtctggaactcccaactggacgccgtttgccccgacactatgaataatcccctatctcattactggatttcctcctctcacaacacctacttgaccggggaccagtttagttccgagtcaagcctggaggcttacgcccggtgcctaagaatggggtgccgttgcattgagctggattgttgggacggccctgatggcatgcctgtaatatatcacggtcacacgctcacaacaaagatcaaattctcagacgtgttgcacacaattaaagagcacgctttcgtggctagcgagtacccggtcatcctatcgattgaagaccattgcagcatagcccagcagcgtaatatggcgcagtatttcaagaaagttcttggagacaccctcctgacgaagccagtggaaatatccgcagacggactgccctctccaaaccagcttaagcggaaaatcctgattaagcataagaaactcgccgagggttctgcttacgaggaagtcccaactagcatgatgtattcggagaatgatatttcaaactctattaaaaacggcatcttgtatctggaggatcctgtgaatcacgaatggtacccccactatttcgtcctcacaagctcaaaaatctattattccgaagagacctctagtgatcaaggcaacgaggacgaggaggaaccgaaggaggtatcttcctcaaccgaactgcatagtaatgaaaagtggttccacggaaaactaggggcagggcgagatggtcggcatatcgctgagagattattgacagagtactgcattgagactggagccccagatgggtcattcctggtgagagaatccgagacttttgtgggcgattacaccctgagcttttggcggaacggaaaggtgcaacactgcaggatccatagccggcaagacgcaggaacaccgaagttcttccttacggataatctggtgtttgatagtctgtatgatctgattacccattaccagcaggtgccactccgctgtaatgagtttgagatgcgcctgtccgagccggtgccccagaccaacgcccacgagtcgaaagagtggtaccatgcatcactgacccgggcccaagctgagcacatgctgatgagggtgccaagggacggcgccttcctggtccggaagagaaacgaacccaattcgtacgccatctcctttagagccgagggaaagattaagcactgcagggttcagcaggagggacagactgtgatgcttggcaactccgagttcgactctcttgtggatctaattagctattacgagaagcatcccctgtatcgaaagatgaagctccgatatcctatcaacgaggaagcactagagaagatcggcacagctgagcccgattacggcgcgctttacgaaggaagaaaccctggattctatgttgaggcaaatcctatgccaacttttaaatgcgccgtgaaggccttattcgactacaaagcccaacgagaagatgaactaaccttcatcaagtccgcaataatccaaaacgtcgaaaaacaagaggggggatggtggcgcggtgattatggtgggaagaagcagctgtggttcccatccaactatgtggaggaaatggtcaacccagttgctctggagcctgaaagagagcacttggacgaaaactccccacttggggacctgctgcggggagtgctggacgttcccgcctgtcagatagcgattaggcctgaaggtaagaacaacagactcttcgtgttttccatcagcatggcctcagtggcacactggtctctggacgtcgctgccgattcccaggaggaactgcaagactgggtaaagaagattagagaggtagcccagacggcggacgcaaggctcacggagggtaaaatcatggagcgacgcaagaaaatagccctggagttatctgaactggtggtgtattgccgtccagttccttttgatgaggagaaaatcggaactgagcgagcttgttacagggacatgagctctttccctgaaactaaggcagagaagtatgtcaacaaagccaaaggaaagaagttcctgcagtataaccggctacagctaagcagaatctatcctaagggtcagcggttagattcaagtaactacgatcctctgcccatgtggatttgcgggagccagttggtagctttgaactttcagacgcctgataaaccaatgcaaatgaatcaggcactgttcatgacaggacgccactgcggatatgtgctccagccttcaaccatgagggatgaggcattcgatcccttcgacaagagctctctccgaggcctagagccatgcgctatctctatcgaggtcctcggggcccgccacctcccaaagaacggtagagggattgtatgtcccttcgttgaaatcgaagttgctggcgctgagtacgacagtacgaagcagaagaccgagtttgtcgttgacaacggtttgaatcccgtgtggcccgctaagcccttccactttcagatctccaatcccgagttcgcttttctgcggttcgtcgtgtacgaagaggacatgttctccgaccaaaactttctcgcacaggcgactttccctgtcaaaggcctgaagacgggataccgcgcagttcctttaaaaaataactattctgaggacctcgagttggccagtctgctgattaagattgatattttcccagcaaaagagaacggcgatttgagccctttctcaggcacaagcctccgcgaacgggggtccgatgcctccgggcagttgtttcacggaagggctcgtgaggggtcctttgaatccaggtatcaacaaccattcgaagatttccggatcagccaggaacatctggcggaccacttcgactcacgcgagcgcagagccccccggcggacaagggtgaacggggataatagactttag

SEQ ID NO: 257047 - DNA, 3873 bp, Artificial Sequence
  derived and/or modified sequence
atggccggagccgcttcaccctgcgccaacggctgtggacctggcgctccttccgatgccgaggttcttcacctttgccggagtcttgaagtcggaactgtcatgacactattttactccaaaaaatcacaacggccagaaaggaagacttttcaagtgaaattggagactagacagatcacatggtctcgcggtgcggacaagatcgagggagccattgatatcagggagatcaaagaaattcgaccgggaaagacctcacgcgactttgatcgttatcaggaggacccagccttcagacccgatcaatctcattgctttgtgatcctctacggcatggaatttcgcttaaaaacactgagcctccaggccacctcggaagacgaggtgaacatgtggattaaaggtttgacctggctcatggaggacactttgcaggcgcctacaccactgcagatagaaagatggctccgtaagcagttttacagtgtcgataggaaccgcgaagataggatttccgctaaggacttaaagaatatgctctcccaggtcaactatcgagtcccaaacatgcgctttcttagagaacggttaacagacttggagcagagatcgggagatatcacatatggtcaattcgcccaactgtacagatcattaatgtattcggctcagaagaccatggatctgcccttcctggaggcatcaacgctgcgagctggcgagcgccctgaactgtgtcgggtaagtttacccgaattccaacaattcttgttggattaccagggggaactttgggccgttgacaggttgcaggtccaggaatttatgctttcctttctgcgggatccgctcagggagattgaggagccctatttcttcttggacgagttcgtcaccttcttgttttcgaaggaaaacagcgtgtggaactcacaattggatgctgtctgcccagacacaatgaataaccctctgtctcattattggatttcctcatcccacaacacatacctgacgggagaccaatttagcagcgaatcctcccttgaggcctacgcacggtgcttgcgcatggggtgccggtgcattgaactcgattgttgggatgggcctgatgggatgccagtgatttaccatgggcacaccctgacgactaaaatcaagttcagtgacgtgttgcacacgatcaaagaacatgccttcgttgctagcgagtaccccgtgatcctgtccattgaagatcattgttcgatcgcccagcagagaaacatggcccagtacttcaagaaggtgctaggtgatacactgctgaccaaacctgtagaaatctctgcagatggcctgcccagcccgaaccagctaaagcgaaaaattcttatcaagcataaaaagctcgcagaaggcagcgcttatgaagaggtgcccacgtcaatgatgtatagcgagaacgacattagcaattcaattaagaacggcattctctacctcgaggacccggttaatcatgaatggtatcctcattacttcgttttgacgtccagcaaaatttattactctgaagagacaagttccgatcaaggcaatgaggacgaagaagagcctaaggaagtatccagcagcaccgaacttcactccaacgaaaagtggttccacgggaagttgggagctggcagggacggccgacatatcgctgagcgacttttgacagagtattgtatcgaaacaggagcacctgacggctcatttctagtaagagaatcagaaaccttcgtgggagattataccttgagcttctggcggaacgggaaggtgcagcactgccgcatacactctcgccaagatgctggcaccccaaaattttttttgaccgataatttggtgtttgattccctctacgatttgattacccattatcagcaggtccccctgcggtgtaacgaattcgagatgcgattgagtgagcctgtgccccagaccaacgcacatgaatcaaaggaatggtatcacgcctcactcacgagggctcaggcagagcacatgctgatgagagtcccaagagatggggcatttctcgtgagaaaaaggaacgagcccaattcatatgccatttccttcagggctgaaggaaagatcaagcattgtagagtgcagcaagaaggccagactgtgatgcttggaaactctgaatttgacagtcttgttgatcttatatcatactacgaaaaacaccctttatacaggaagatgaagcttagatatcccattaatgaggaggccctggagaagattggaaccgccgaaccagactacggggctttgtacgaaggcagaaatcccggtttttatgttgaggccaaccctatgcccacctttaaatgtgctgtcaaagccctcttcgactacaaggcccaaagggaagatgagctaacattcatcaaatctgcaatcatccagaatgtggaaaaacaagaggggggatggtggcgtggcgattacggtgggaaaaagcagctgtggtttccttcgaactatgtagaggagatggtgaacccagtggcacttgagccagagcgcgaacacttagatgagaatagccccctaggagacctgctccgcggagtgctggacgtacctgcgtgccaaatcgcgattcggccagagggcaaaaacaacaggttgtttgttttcagtattagcatggcatccgtcgctcactggtctctggacgtcgccgctgatagccaagaggagctccaggactgggtgaagaaaatccgcgaagtagcacaaacggcggacgccagactgactgaaggtaaaatcatggagcggagaaaaaaaatcgccttagagttgtctgaactggtggtgtattgtcgcccagtgccttttgacgaggaaaagatcggtaccgaacgggcatgttaccgggacatgtcttcctttccggagaccaaagcagagaagtatgtcaataaagccaaagggaagaaattcctccaatacaatcgcttgcagctctcccggatctaccctaagggccagcggttggacagttctaactacgaccctctgcctatgtggatttgcggttcacagctggtggctttgaacttccagacaccggataaacctatgcaaatgaaccaagcactcttcatgaccgggaggcattgcgggtatgttttgcagccctccactatgagggatgaggcgtttgatccatttgacaaatcttcacttcggggacttgagccatgcgcgatcagcattgaagtcttgggtgcccgacacctacctaagaatggcagaggtatcgtgtgtccctttgtcgaaattgaggtggctggagccgagtatgacagtacaaagcagaaaaccgagttcgtcgtggataacggactcaatccagtctggccagctaaacccttccattttcaaatatcgaatcctgagttcgcgtttctgcggtttgtggtatatgaagaggacatgttcagtgaccagaatttcttagctcaagcaaccttccccgtaaaggggttaaaaaccggctatcgggctgtacccctgaagaacaattattccgaggacctggaactcgcctcactgctgatcaagatcgatatctttcctgccaaggagaatggtgatctctcccccttctctggcaccagcctgagagaacggggttcagatgcttctgggcagctgttccatggtcgggcaagggaggggtcttttgaaagtcgataccagcagccattcgaagacttcagaatctcccaggagcatctcgccgatcacttcgatagccgggaaagacgggctcctcgcagaacaagggttaatggggataataggctgtag

SEQ ID NO: 257048 - DNA, 5490 bp, Artificial Sequence
  derived and/or modified sequence
gccgctcgtggccgccgggctgtgtccggggccgcgtgagaaagctctgcgggactgagggctgggtgggtcgaccgggaacggcgcgcgctcccgccgccatcgcgcctccgtccccgcctgcggcctgtctgggggtcgcggggcgcaggcgcggcgggccgacgggcgggggtcctccccacgggtgcgcgggcgcctttgttcccggcgccgaagcggggtggggcctcagggcagccccgccccgccgcgctgaggccccgccccgtgtccgcctgcaggagccgccgccgggtcccgctcgtctgccgcctcagcctcagccccaacctcagccgccgccgttgcgcttgctcccgggcggtcctggcctgtgccgccgccgcccccagcgtcggagccatggcgggcgccgcgtccccttgcgccaacggctgcgggcccggcgcgccctcggacgccgaggtgctgcacctctgccgcagcctcgaggtgggcaccgtcatgactttgttctactccaagaagtcgcagcgacccgagcggaagaccttccaggtcaagctggagacgcgccagatcacgtggagccggggcgccgacaagatcgagggggccattgacattcgtgaaattaaggagatccgcccagggaagacctcacgggactttgatcgctatcaagaggacccagctttccggccggaccagtcacattgctttgtcattctctatggaatggaatttcgcctgaaaacgctgagcctgcaagccacatctgaggatgaagtgaacatgtggatcaagggcttaacttggctgatggaggatacattgcaggcacccacacccctgcagattgagaggtggctccggaagcagttttactcagtggatcggaatcgtgaggatcgtatatcagccaaggacctgaagaacatgctgtcccaggtcaactaccgggtccccaacatgcgcttcctccgagagcggctgacggacctggagcagcgcagcggggacatcacctacgggcagtttgctcagctgtaccgcagcctcatgtacagcgcccagaagacgatggacctccccttcttggaagccagtactctgagggctggggagcggccggagctttgccgagtgtcccttcctgagttccagcagttccttcttgactaccagggggagctgtgggctgttgatcgcctccaggtgcaggagttcatgctcagcttcctccgagaccccttacgagagatcgaggagccatacttcttcctggatgagtttgtcaccttcctgttctccaaagagaacagtgtgtggaactcgcagctggatgcagtatgcccggacaccatgaacaaccctctttcccactactggatctcctcctcgcacaacacgtacctgaccggggaccagttctccagtgagtcctccttggaagcctatgctcgctgcctgcggatgggctgtcgctgcattgagttggactgctgggacggcccggatgggatgccagttatttaccatgggcacacccttaccaccaagatcaagttctcagatgtcctgcacaccatcaaggagcatgcctttgtggcctcagagtacccagtcatcctgtccattgaggaccactgcagcattgcccagcagagaaacatggcccaatacttcaagaaggtgctgggggacacactcctcaccaagcccgtggagatctctgccgacgggctcccctcacccaaccagcttaagaggaagatcctcatcaagcacaagaagctggctgagggcagtgcctacgaggaggtgcctacatccatgatgtactctgagaacgacatcagcaactctatcaagaatggcatcctctacctggaggaccctgtgaaccacgaatggtatccccactactttgttctgaccagcagcaagatctactactctgaggagaccagcagtgaccagggcaacgaggatgaggaggagcccaaggaggtcagcagcagcacagagctgcactccaatgagaagtggttccatgggaagctaggggcagggcgtgacgggcgtcacatcgctgagcgcctgcttactgagtactgcatcgagaccggagcccctgacggctccttcctcgtgcgagagagtgagaccttcgtgggcgactacacgctctctttctggcggaacgggaaagtccagcactgccgtatccactcccggcaagatgctgggacccccaagttcttcttgacagacaacctcgtctttgactccctctatgacctcatcacgcactaccagcaggtgcccctgcgctgtaatgagtttgagatgcgactttcagagcctgtcccacagaccaacgcccacgagagcaaagagtggtaccacgcgagcctgaccagagcacaggctgagcacatgctaatgcgcgtccctcgtgatggggccttcctggtgcggaagcggaatgaacccaactcatatgccatctctttccgggctgagggcaagatcaagcattgccgtgtccagcaagagggccagacagtgatgctagggaactcggagttcgacagccttgttgacctcatcagctactatgagaaacacccgctataccgcaagatgaagctgcgctatcccatcaacgaggaggcactggagaagattggcacagctgagcctgactacggggccctgtatgagggacgcaaccctggcttctatgtagaggcaaaccctatgccaactttcaagtgtgcagtcaaagccctctttgactacaaggcccagagggaggacgagctgaccttcatcaagagcgccatcatccagaatgtggagaagcaagagggaggctggtggcgaggggactacggagggaagaagcagctgtggttcccatcaaactacgtggaagagatggtcaaccccgtggccctggagccggagagggagcacttggacgagaacagccccctaggggacttgctgcggggggtcttggatgtgccggcttgtcagattgccatccgtcctgagggcaagaacaaccggctcttcgtcttctccatcagcatggcgtcggtggcccactggtccctggatgttgctgccgactcacaggaggagctgcaggactgggtgaaaaagatccgtgaagtggcccagacagcagacgccaggctcactgaagggaagataatggaacggaggaagaagattgccctggagctctctgaacttgtcgtctactgccggcctgttccctttgatgaagagaagattggcacagaacgtgcttgctaccgggacatgtcatccttcccggaaaccaaggctgagaaatacgtgaacaaggccaaaggcaagaagttccttcagtacaatcgactgcagctctcccgcatctaccccaagggccagcgactggattcctccaactacgatcctttgcccatgtggatctgtggcagtcagcttgtggccctcaacttccagacccctgacaagcctatgcagatgaaccaggccctcttcatgacgggcaggcactgtggctacgtgctgcagccaagcaccatgcgggatgaggccttcgacccctttgacaagagcagcctccgcgggctggagccatgtgccatctctattgaggtgctgggggcccgacatctgccaaagaatggccgaggcattgtgtgtccttttgtggagattgaggtggctggagctgagtatgacagcaccaagcagaagacagagtttgtggtggacaatggactcaaccctgtatggccagccaagcccttccacttccagatcagtaaccctgaatttgcctttctgcgcttcgtggtgtatgaggaagacatgtttagtgaccagaatttcctggctcaggctactttcccagtaaaaggcctgaagacaggatacagagcagtgcctttgaagaacaactacagtgaggacctggagttggcctccctgctgatcaagattgacattttccctgccaaggagaatggtgacctcagtcccttcagtggtacgtccctgcgggagcggggctcagatgcctcaggccagctgtttcatggccgagcccgggaaggctcctttgaatcccgctaccagcagccgtttgaggacttccgcatctcccaggagcatctcgcagaccattttgacagtcgagaacgaagggccccaagaaggactcgggtcaatggagacaaccgcctctagttgtaccccagcctcgttggagagcagcaggtgctgtgcgccttgtagaatgccgcgaactgggttctttggaagcagccccctgtggcggccttccgggtctcgcagcctgaagcctggattccagcagtgaatgctagacagaaaccaagccattaatgagatgttattactgttttgggcctccatgccccagctctggatgaaggcaaaaactgtactgtgtttcgcattaagcacacacatctggccctgacttctggagatggatccttccatcttgtggggccaggaccatggccgaagccccttggagagagaggctgcctcagccagtggcacaggagactccaaggagctactgacattcctaagagtggaggaggaggaggagccttgctgggccagggaaacaaagtttacattgtcctgtagctttaaaaccacagctgggcagggtgagaagctagatgcccctgcagtttggccctggagccagggcagaggaatgtagggcctgcatggagaagggttctgccctgcctgaggaggaggacacagcacaagggcacattgcccatggctgggaacatgacccagcctgaaagatacaggggatcatgttaaaaatagcagtattatttttcgtctcaatggtattgtaactaagttatttactcctcctgctcctcacccctgtagggaaaccttggagaggagagtggcaggtgggctgcctgctgtgttaagaggacttagtttgtgatgtaaggcactgtcaggaatggggggcgggccagggtgggaagagaagaaatagcagagcctattttggtgaggttttttgtttttaagtcaaagaagactcagtatgctttccctgaggaatgaaaaagggattgaggagttgcctgactcctgggtgggtggggtacaggcagttaggtgctgaatgaagctgccatccttgctgcagcttctaactggtaaaaagatccagggatggagatgggaaggttagaaaggcagccctcacctctgaggacagaggccggggtccaggcccgtgggcgcaaaggtgcctcatagcatagccagcattcagcacacacaaacctactgcccacatttgggctcagggttggccatttgctagttctgctgccctcttaagatctgactgccaaataaatcatcctcatgtcctttttc

SEQ ID NO: 257049 - protein, 466 aa, Artificial Sequence
  derived and/or modified sequence
MKVRSAGGDGDALCVTEEDLAGDDEDMPTFPCTQKGRPGPRCSRCQKNLSLHTSVRILYLFLALLLVAVAVLASLVFRKVDSLSEDISLTQSIYDKKLVLMQKNLQGLDPKALNNCSFCHEAGQLGPEIRKLQEELEGIQKLLLAQEVQLDQTLQAQEVLSTTSRQISQEMGSCSFSIHQVNQSLGLFLAQVRGWQATTAGLDLSLKDLTQECYDVKAAVHQINFTVGQTSEWIHGIQRKTDEETLTLQKIVTDWQNYTRLFSGLRTTSTKTGEAVKNIQATLGASSQRISQNSESMHDLVLQVMGLQLQLDNISSFLDDHEENMHDLQYHTHYAQNRTVERFESLEGRMASHEIEIGTIFTNINATDNHVHSMLKYLDDVRLSCTLGFHTHAEELYYLNKSVSIMLGTTDLLRERFSLLSARLDLNVRNLSMIVEEMKAVDTQHGEILRNVTILRGHTLFSHNRI

SEQ ID NO: 257050 - DNA, 1401 bp, Artificial Sequence
  derived and/or modified sequence
atgaaggtccgtagcgctggcggagacggagacgccttatgtgtgactgaagaggacctggccggcgacgacgaagatatgccaacgtttccatgcactcaaaagggtaggcccggccctcgctgtagtaggtgccagaagaacctctcactgcacacgtctgtccggattctgtacctttttctcgctctcctgctcgttgcggtggcagtattggcgtctctcgtttttagaaaagtggacagtctttccgaagatatctcccttacacaaagcatttatgacaagaagctcgtgctcatgcagaaaaatcttcaggggctagatccaaaggccctgaacaactgttcattttgccacgaggctggtcaacttgggccagaaatccggaagctccaagaggaattggaagggatccagaagctactgctggcccaggaggtgcagcttgatcagaccttacaggcccaggaagtgctctccacgacctcacgacaaatcagccaagaaatgggttcctgctccttctccatccaccaggtaaaccaatcactgggactgtttcttgcccaggtcagaggctggcaggcaacaacggcaggcctcgatctatccctgaaggacctgacgcaggagtgttacgacgtcaaagccgcagtccatcagatcaatttcactgtcggtcagactagcgagtggatccacggcattcagcgtaagacagatgaggagaccctaactctacagaagatcgttaccgactggcagaattacactaggctgttctcaggactgaggacgacgagtactaaaactggcgaggctgtcaagaatatacaggccactcttggtgccagttcccagcgcatcagccagaattctgagagtatgcatgacctcgttctgcaagttatgggcctgcagttgcaacttgacaatatcagctcatttcttgatgatcatgaagagaatatgcacgatctccaatatcacacccattacgcacagaatcgcactgtcgagagatttgagagtctcgagggcaggatggcatcccacgagatagaaataggcactatttttactaacattaacgccacagacaaccacgttcacagtatgctgaaatacctggacgatgtgcgtctctcctgcacgttaggctttcatactcacgccgaagaattgtattacttgaataaatctgtgagtataatgctgggaaccactgatctgttaagggagcgattctcactactctcagccaggctggatcttaatgtgcgaaacctgtccatgatcgtagaagaaatgaaagctgtggacacgcagcacggggagatcctgcgcaatgttacaattttgcggggccacacccttttctcacacaatcgtatatag

SEQ ID NO: 257051 - DNA, 1401 bp, Artificial Sequence
  derived and/or modified sequence
atgaaggtgcgctctgctggaggagatggagatgccctgtgtgtgacagaggaggacctggccggagatgatgaggacatgcccaccttcccctgcacccagaagggccggcccggcccccgctgcagccgctgccagaagaacctgagcctgcacacctctgtgcgcatcctgtacctgttcctggccctgctgctggtggccgtggccgtgctggccagcctggtgttcaggaaggtggacagcctgtctgaggacatcagcctgacccagagcatctatgacaagaagctggtgctgatgcagaagaacctgcagggcctggaccccaaggccctgaacaactgcagcttctgccacgaggccggccagctgggccctgagatcaggaagctgcaggaggagctggagggcatccagaagctgctgctggcccaggaggtgcagctggaccagaccctgcaggcccaggaggtgctgagcaccaccagccggcagatcagccaggagatgggcagctgcagcttcagcatccaccaggtgaaccagagcctgggcctcttcctggcccaggtgcggggctggcaggccaccacagctggcctggacctgagcctgaaggacctgacccaggagtgctatgatgtgaaggctgctgtgcaccagatcaacttcaccgtgggccagaccagcgagtggattcatggcatccagaggaagacagatgaggagaccctgaccctgcagaagatcgtgacagactggcagaactacaccaggctcttcagcggcctgcggaccaccagcaccaagacaggagaggccgtgaagaacatccaggccaccctgggcgccagcagccagaggatcagccagaacagcgagagcatgcatgacctggtgctgcaggtgatgggcctgcagctgcagctggacaacatcagcagcttcctggatgaccacgaggagaacatgcatgacctgcagtaccacacccactacgcccagaacagaacagtggagagatttgagagcctggagggccgcatggccagccatgaaattgaaattggcaccatcttcaccaacatcaatgccacagacaaccacgtgcacagcatgctgaagtacctggatgatgtgcggctgagctgcaccctgggcttccacacccatgctgaggagctgtactacctgaacaagtctgtgtccatcatgctgggcaccacagacctgctgcgggagcgcttcagcctgctgagcgcccggctggacctgaatgtgaggaacctgtccatgattgtggaggagatgaaggctgtggacacccagcacggggagatcctgagaaatgtgaccatcctgcggggccacaccctcttcagccacaaccgcatctag

SEQ ID NO: 257052 - DNA, 1401 bp, Artificial Sequence
  derived and/or modified sequence
atgaaggtgcggagcgccggcggcgacggcgacgccctgtgcgtgacggaggaagacttagctggcgacgacgaggatatgcctaccttcccctgcacccaaaagggtcgaccaggcccacgatgcagcagatgccagaaaaacctgtctctccacacatccgtgcggattttgtacttgtttctcgcactgttactggtcgctgttgccgtcctggcctcacttgtattcaggaaagtggattctcttagtgaagacatctcgttgactcaaagtatttacgacaaaaagctagtattaatgcagaagaatctgcagggccttgaccccaaggctctgaataattgttccttttgtcatgaagctggccagcttgggccagagatcagaaaactgcaggaggaactcgagggaatccagaaactgttgctggcccaagaggttcagctcgaccagaccctgcaggcccaagaggtgctgtccaccacctctcgccaaatttctcaggagatgggtagctgttcgttctctatccatcaggttaatcagtctctagggctgttcctggcccaggtgaggggctggcaggcaactacagcgggactcgacctgtccttaaaagatttgactcaagaatgttacgacgtgaaagctgctgtccaccaaatcaacttcaccgtggggcagacaagcgaatggatacatgggatccaacgcaaaactgatgaagaaaccctgaccttgcaaaagattgttacagactggcaaaactatacccgcctgttctcaggtcttcggaccaccagcaccaagaccggcgaagcagtgaagaacattcaggccacattgggtgcctccagtcagcggatttcgcaaaattccgagagcatgcacgatttagtgctgcaagtgatgggcctgcaactgcagcttgacaatattagcagtttcctggacgaccacgaagagaacatgcatgacctgcagtatcacacccattatgctcaaaatagaaccgtagagcgctttgaatccctcgaggggaggatggcctcccatgagatcgaaatcgggaccatcttcactaatatcaacgcaaccgataaccatgttcacagcatgttaaaatacctggatgacgtgcgcctgagctgtacactgggttttcatacccatgcggaagagctgtactacctgaataaatcggtcagcattatgctgggcaccactgatctcctgagggagagattctccctcctcagtgcaaggctggacctgaatgtcaggaacctgtccatgatagtggaagagatgaaggctgtggatacccagcatggcgagatcctgcggaacgtgacaattctgcgaggacacacactattcagccataatcgaatatag

SEQ ID NO: 257053 - DNA, 1401 bp, Artificial Sequence
  derived and/or modified sequence
atgaaagtccgctcggctggaggagacggagatgcattatgcgtgaccgaggaagacttagcaggcgatgatgaggatatgcctacctttccttgcacgcagaagggacgtcccggaccacgctgtagtcgctgtcagaaaaacttatctctgcacacctcagtgcgtatattgtatctatttctcgcgctgttgcttgtcgctgtggccgtcttggcttctttggtgtttcgcaaagtagactccctgagtgaggacatcagtctaacccagtctatatacgacaagaagttggtcttgatgcaaaaaaacttacagggactggaccccaaggctctcaataactgttcattttgccatgaagccggacagctcggacctgaaattcgaaagctccaagaggagttagaggggattcagaaactgctccttgcccaggaagtacagctggatcagaccctgcaggcgcaggaggtcctgagcacaacgagtcgccaaatcagccaggaaatgggatcctgcagcttttccatccatcaggtgaatcaatctctgggcctgttcctcgcacaggtccgtggatggcaggctacgaccgcagggttggatctttccctgaaagacctgacacaagaatgctatgacgtgaaagctgccgtacatcaaataaattttaccgtgggccaaacgtctgaatggatacatggaatccagagaaaaactgatgaggagactctgactcttcagaagattgtgactgattggcagaactacacaagactgtttagtgggctccgaacgaccagcacgaaaactggtgaagccgtcaagaatatccaggcaaccctgggcgcttctagccagcgaatttcccagaacagcgagagcatgcacgaccttgttctgcaagtgatgggcttgcagctgcagctggacaacatttcttcttttctcgatgatcatgaggaaaatatgcatgacctgcagtatcacacacactacgcacagaataggactgttgaaagattcgagagtctggagggcagaatggccagccacgagattgagatcgggactatcttcacaaatataaatgctacagataaccatgtgcattcaatgctgaagtatcttgacgacgtgcgcctgagttgcaccctgggattccatactcatgcagaagagctgtattacctcaataagagcgtctcaattatgctcggcactacggatcttctgcgtgaacgattcagcctgctcagcgcaaggctggacctgaacgtaagaaacctgtctatgattgtggaggaaatgaaagccgttgacacacagcatggagagattctaagaaacgtgaccattctgcgagggcacacactgttttctcataaccgcatttag

SEQ ID NO: 257054 - DNA, 1807 bp, Artificial Sequence
  derived and/or modified sequence
gggaggaagggtgcgcggggcgaggggcggcggcagacctcgcggggccccagcgggaagcgcgggcggcggcgggatgcgcgctctgggcggcggggcgcggcgctaggcgcccggcggggcttccccaggctgcgaccccgcgggaccctccactcctcccgccgcctccgcagcccgcgcgccggagcatgagtcccggccggagccccacggccgcgggcggcgcctaggacggcgatccgcgccctggaggatccgccggccgcccggctccactacagctccagccgcctgcagcggggccctcctgaggccccagaggaagagaccatgaaagtgaggtcggccggcggcgatggagatgccttgtgcgttacagaagaggacctggcgggtgacgacgaggacatgccgaccttcccatgcacccagaagggccggccagggccccgctgcagccgctgccagaagaacctatctttgcacacatcggtgcggattctttacctcttcctggccctgctcctggtggccgtggctgtgttggcctctctggttttcagaaaagtggactctctctccgaagacatctccttgacccagtctatttatgacaagaagcttgtgttaatgcagaaaaatctccagggcctggatccgaaagccctgaacaactgctctttctgccatgaagctgggcagctggggccagagatccgaaaactgcaggaggagctggagggaattcagaagctgcttctggcccaggaggtgcagctggaccagaccttacaggcccaggaggtgctctccaccaccagcagacaaatctcccaggagatgggcagttgctccttctccatccaccaggttaaccagtctctggggctcttcctggcccaggtgagaggctggcaggccaccacagctggcctggacctctctctgaaggacctcacccaggagtgctacgatgtcaaggctgcagtgcaccagatcaacttcaccgtggggcagacttccgagtggatccacgggatccagcggaagacagacgaggagaccctgaccctccagaagattgtcaccgactggcagaactacacacggctcttcagcggcctgcgcaccacctccaccaagactggagaggcggtcaagaacatccaggccaccctgggggcctcctcacagcgcatcagccagaactcagagagcatgcacgacctggtactccaggtcatgggcttgcagctgcagctggataacatctcgtccttcctggatgaccacgaagagaacatgcatgatcttcagtaccatacccactacgcccagaaccgcactgtggagaggtttgagtctctggaaggacgcatggcttctcacgagattgaaattggcaccatcttcaccaacatcaatgccaccgacaaccacgtgcacagcatgctcaagtacctggatgacgtgcggctctcctgcacgctgggcttccacacccatgccgaggagctctactacctgaacaagtctgtctccatcatgctgggcaccacagacctgctccgggagcgcttcagcctgctcagtgcccggctggacctcaacgtccggaacctctccatgatcgtggaggagatgaaggcagtggacacacagcatggagaaatccttcgcaatgtcaccatcctacgaggtcacactttgttttcacataatcggatatgatatgaagccagccataaagcccaggatgaccaagaatataatttgaaaatgaatttgtttactatccttaatg

SEQ ID NO: 257055 - DNA, 1401 bp, Artificial Sequence
  derived and/or modified sequence
atgaaggtgagaagcgccggcggcgacggcgacgccctgtgcgtgaccgaggaggacctggccggcgacgacgaggacatgcccaccttcccctgcacccagaagggcagacccggccccagatgcagcagatgccagaagaacctgagcctgcacaccagcgtgagaatcctgtacctgttcctggccctgctgctggtggccgtggccgtgctggccagcctggtgttcagaaaggtggacagcctgagcgaggacatcagcctgacccagagcatctacgacaagaagctggtgctgatgcagaagaacctgcagggcctggaccccaaggccctgaacaactgcagcttctgccacgaggccggccagctgggccccgagatcagaaagctgcaggaggagctggagggcatccagaagctgctgctggcccaggaggtgcagctggaccagaccctgcaggcccaggaggtgctgagcaccaccagcagacagatcagccaggagatgggcagctgcagcttcagcatccaccaggtgaaccagagcctgggcctgttcctggcccaggtgagaggctggcaggccaccaccgccggcctggacctgagcctgaaggacctgacccaggagtgctacgacgtgaaggccgccgtgcaccagatcaacttcaccgtgggccagaccagcgagtggatccacggcatccagagaaagaccgacgaggagaccctgaccctgcagaagatcgtgaccgactggcagaactacaccagactgttcagcggcctgagaaccaccagcaccaagaccggcgaggccgtgaagaacatccaggccaccctgggcgccagcagccagagaatcagccagaacagcgagagcatgcacgacctggtgctgcaggtgatgggcctgcagctgcagctggacaacatcagcagcttcctggacgaccacgaggagaacatgcacgacctgcagtaccacacccactacgcccagaacagaaccgtggagagattcgagagcctggagggcagaatggccagccacgagatcgagatcggcaccatcttcaccaacatcaacgccaccgacaaccacgtgcacagcatgctgaagtacctggacgacgtgagactgagctgcaccctgggcttccacacccacgccgaggagctgtactacctgaacaagagcgtgagcatcatgctgggcaccaccgacctgctgagagagagattcagcctgctgagcgccagactggacctgaacgtgagaaacctgagcatgatcgtggaggagatgaaggccgtggacacccagcacggcgagatcctgagaaacgtgaccatcctgagaggccacaccctgttcagccacaacagaatctag

SEQ ID NO: 257056 - protein, 450 aa, Artificial Sequence
  derived and/or modified sequence
MDLSAAAALCLWLLSACRPRDGLEAAAVLRAAGAGPVRSPGGGGGGGGGGRTLAQAAGAAAVPAAAVPRARAARRAAGSGFRNGSVVPHHFMMSLYRSLAGRAPAGAAAVSASGHGRADTITGFTDQATQDESAAETGQSFLFDVSSLNDADEVVGAELRVLRRGSPESGPGSWTSPPLLLLSTCPGAARAPRLLYSRAAEPLVGQRWEAFDVADAMRRHRREPRPPRAFCLLLRAVAGPVPSPLALRRLGFGWPGGGGSAAEERAVLVVSSRTQRKESLFREIRAQARALGAALASEPLPDPGTGTASPRAVIGGRRRRRTALAGTRTAQGSGGGAGRGHGRRGRSRCSRKPLHVDFKELGWDDWIIAPLDYEAYHCEGLCDFPLRSHLEPTNHAIIQTLLNSMAPDAAPASCCVPARLSPISILYIDAANNVVYKQYEDMVVEACGCR

SEQ ID NO: 257057 - DNA, 1353 bp, Artificial Sequence
  derived and/or modified sequence
atggacttgagtgccgcagccgccctttgcctctggctcttgagtgcttgcagacctcgggacggcttagaggccgcagctgtcctccgggcagcgggtgctggacccgtcagaagccctggcggcggcggaggcggcggtgggggaggcaggactctagcccaagcagccggagccgctgctgtccctgcagccgcagtgccccgcgcacgggccgccagacgggccgctggatcaggctttagaaacggctcggtcgtccctcatcattttatgatgtcgttgtaccgatccctggcaggacgcgcaccagccggggcagcagccgtcagcgcctccggccatgggcgcgctgatacaataactggcttcactgaccaggccacacaggacgagtccgcagccgagacaggtcagtctttcctgttcgatgtttctagtttgaacgatgccgacgaggtcgtgggcgcagagctgcgcgtgctaaggcggggaagcccggaaagtggccccggctcgtggacaagtccaccactgttgctgctgtcaacatgccccggtgctgcaagagcccccagactgctgtacagccgagcagccgagcctctggttggtcagcgttgggaagcctttgatgtcgccgacgccatgcgtagacaccggcgcgagcctcgccctccacgcgcattctgtctgctgctgcgcgcggtggctggcccagttccaagccccttagcattacgacgacttggatttggctggccgggaggcggcggaagcgccgccgaggagagagccgtgctggtcgtcagttcgcggacacagagaaaagaatccctttttcgtgaaatccgggctcaagccagagctctgggcgcagccctggcctcagaacctttacctgacccaggaacagggactgcctcgcccagagccgtcattggtggtcgccgcaggcgcagaactgcccttgccggaacccgtacagcgcaaggctctggcggaggagctggcagaggacacggacgccgaggaaggtcccgctgctcgagaaaaccactgcacgtcgactttaaagagctggggtgggacgactggattatcgcacccttagactacgaggcgtatcactgcgaaggtttgtgcgacttccccctccgctctcacctagagccaacaaatcacgcaatcatccagacgctgcttaattccatggcccccgacgcagcgccagctagttgttgcgtcccagctcgattgtcccctattagcattctgtacatagacgctgccaataacgtcgtgtataagcagtatgaagatatggtggtagaggcgtgtgggtgccgctag

SEQ ID NO: 257058 - DNA, 4162 bp, Artificial Sequence
  derived and/or modified sequence
ctttgaggccgccgggagcatcctgtggcctctctctgcgcggccacccggccgcggcgcgaagcggtctggagggcgagcccttccgcggccccaactctgccgccccgttcccggcattgggaaccagggcagggagggggcgggtgtttctctgcgggggagtggggaggaagctgggcgggtgcgcgcggtgccccgagcctggaaccacggagggcgcgttggtcttgggcggatggagggggtgtcgcactgccgcggggaggcgtgtcgggaggctggggccagtggcagtcgcttggcgagggtgggggcgtagcgctgcggtgggaggaggcggctccggccctggtctccactctaggccggggtggggggcgcatagcggccgccggagctttcagcagggggcgctgctccgggcgttgggcgggggtggggtgggccaggagggggggccgcgggctggccgcgcacacttcccccattattaaacactatgttcaaaaggcgccgggggacttcccggagccacggagcccgcgccgcccgcccgcccggcccacggagcccatggacctgagcgccgccgccgcgctgtgcctttggctgctgagcgcctgccgcccccgcgacgggctggaagcggccgccgtgctgcgagcggcgggggctgggccggtccggagcccagggggcggcggcggcggcggcggcggcgggcggactcttgcccaggctgcgggcgccgcggctgtcccggccgccgcggttccccgggcccgcgccgcgcgccgcgccgcgggctccggcttcaggaacggctcggtggtgccgcaccacttcatgatgtcgctttaccggagcctggccgggagggctccggccggggcagccgctgtctccgcctcgggccatggtcgcgcggacacgatcaccggcttcacagaccaggcgacccaagacgaatcggcagccgaaacaggccagagcttcctgttcgacgtgtccagccttaacgacgcagacgaggtggtgggtgccgagctgcgcgtgctgcgccggggatctccagagtcgggcccaggcagctggacttctccgccgttgctgctgctgtccacgtgcccgggcgccgcccgagcgccacgcctgctgtactcgcgggcagctgagcccctagtcggtcagcgctgggaggcgttcgacgtggcggacgccatgaggcgccaccgtcgtgaaccgcgccccccccgcgcgttctgcctcttgctgcgcgcagtggcaggcccggtgccgagcccgttggcactgcggcggctgggcttcggctggccgggcggagggggctctgcggcagaggagcgcgcggtgctagtcgtctcctcccgcacgcagaggaaagagagcttattccgggagatccgcgcccaggcccgcgcgctcggggccgctctggcctcagagccgctgcccgacccaggaaccggcaccgcgtcgccaagggcagtcattggcggccgcagacggaggaggacggcgttggccgggacgcggacagcgcagggcagcggcgggggcgcgggccggggccacgggcgcaggggccggagccgctgcagccgcaagccgttgcacgtggacttcaaggagctcggctgggacgactggatcatcgcgccgctggactacgaggcgtaccactgcgagggcctttgcgacttccctttgcgttcgcacctcgagcccaccaaccatgccatcattcagacgctgctcaactccatggcaccagacgcggcgccggcctcctgctgtgtgccagcgcgcctcagccccatcagcatcctctacatcgacgccgccaacaacgttgtctacaagcaatacgaggacatggtggtggaggcctgcggctgcaggtagcgcgagggccggggagggggcagccacgcggccgaggatccccagctgatgagcagcagcgggccaccctgtcaccgagcgtgggtgcatgtccgatgtgacccagcaccctctcagaggagggagagcacacgttcacactcacacacactcgtgcagtcacgcacacatttaccggggacagcatgtgaaagccttgggaagagatgacctgccggtaccgaatgtcaaagccctgtgtattttgcaaacagataaccatggcgcccactgcccccatttagggagaggaaggtgtttgtgctgatgttgcagttagaggcacgaaaatcaggtagcaacaacgggttaggaaattcgaagttccagaatgggagaaccaaaggggtactcgagcatgctttatctcacccccttttgtttctggcccgatgtggggcatcgcttccctggggggctgagcgccgcgtggtgcactccgtgacccactgcaaggctgtaatgcccttcccgagggtttgtgttgcatggggccgtttaccctggaactgctgcaaaaagcatctttctttttttaacttttaaaatttaacgtgcccctgcttcatttttgaaagggaagttttgtctgaaagtagctgttgtggagcttcccagatttctgcaaaggtcggtaccgccacccccccccccccccccgccttttttttttttttttttaatcaattccaataggaaatgttatggaaagtggaaaggatatttttcttttaaacggctgagtctgatctaacaggatattggggtgggataggatctgccaggttcggaagctccccagttggtcagggggaggtgggagccatgcctcgggtggctcaggaggaagttagtgcaatggcccggaatggggaaggtggggctgggggaggggagctactgcttttcctagagacctgccaggaggttttcctaagaagccagggaagaggctctcagggcttgaaaggcaaggaggtgtcctggggcccactccagccgaggactccggcttgccggccaggtaggcggaagctcccggggccgactcgggcttgtgctagttatcaagtaagtcggcctccgctttttacctgctttcgctgtgttgttgctgtagttgttggcagtgtgatagtaacgggaagtgaagccactcaaaaatgcttttgtcagacttcaactcacaacccagacctttagagcagggggaaggtctgccccttcccctcatcggctccctggcttggctgctgtgcccttggaagggcagggccttggtgtgggggagcagaggtggaatatcccccagttcccttatttggccccaaagggtcttattgatgggaggattttctaggcatgtaaaagtgagttcgaacattcagacttcactgtttgatttgatttgtttatgcctgggaatcctttgtggctttttgtcaataggctgggagagggaacctagttggactccagctgtccggggtgggggcttcttagaacagccccgcagccctctcggtgcatctgtgtgatgttgtgtaggactttccccttcagagtcctggggagcattatttccaccctgtgttggatgcaggacaattcatacacattttgattctcagtgattacactcttgagagagagaagacagacttacgatttagatacagctaatttacttaggggccctacctgaatcggttttcatcctgtaaaattctcccaaaagaaaaaaaaatacacgtgtaaattactcttaaaattaagattccccccttcctcctattatgtgaatttatattctgtggctgtatgagtagctataaataaccagaacatgaacagtctcttcaggttaaaaattttaaaaatatccaaaagtggctgctctggtacaattccatcttattttagtgactgggcaaagatggtccctaaatttgtggattttgccagagatgcctcactctcgtttttaaaatgaagcttgtcataatgaagaattatatattaaaaaaagcactgaagtgttgaaagttgtagtattagaaggtttagaaaggaagttaatgacaaagtgcagttaaatgttattttgaggaaggtctggggtatttaatatctttggataaaagcaaacattttgatacttttttagtgactagtaaaaacaattttttgggca

SEQ ID NO: 257059 - DNA, 1353 bp, Artificial Sequence
  derived and/or modified sequence
atggacctgtctgctgctgctgccctgtgcctgtggctgctgagcgcctgccggcccagagatggcctggaggccgctgctgtgctgcgggccgccggggccggccctgtgcgcagccctgggggcggcggcggcggcggcggcggcggccgcaccctggcccaggccgccggggctgctgctgtgcctgctgctgctgtgccccgggcccgggccgcccggcgggctgctggcagcggcttcagaaatggatctgtggtgccccaccacttcatgatgagcctgtaccgcagcctggccggccgggccccagctggagctgctgctgtgtctgccagcggccacggccgggctgacaccatcaccggcttcacagaccaggccacccaggatgaatctgctgctgagaccggccagagcttcctgtttgatgtgagcagcctgaatgatgctgatgaggtggtgggcgctgagctgcgggtgctgcggcggggcagccctgagagcggccctggctcctggaccagcccccccctgctgctgctgagcacctgccctggggccgcccgggccccccggctgctgtacagcagagctgctgagcccctggtgggccagcgctgggaggcctttgatgtggctgatgccatgaggaggcacagaagagagccccggcccccccgggccttctgcctgctgctgcgggctgtggccggccctgtgcccagccccctggccctgcggcggctgggcttcggctggccaggcggcggcggcagcgctgctgaggagagagctgtgctggtggtgagcagcaggacccagaggaaggagagcctcttccgggagatccgggcccaggcccgggccctgggcgccgccctggccagcgagcccctgcctgaccccggcactggaacagccagcccccgggccgtcatcggcggcagaagaagaagaagaacagccctggccggcaccaggacagcccagggcagcggcggcggggccggccggggccatggaagaagaggccgcagccgctgcagcaggaagcccctgcacgtggacttcaaggagctgggctgggatgactggatcatcgcccccctggactatgaggcctaccactgtgagggcctgtgtgacttccccctgcggagccacctggagcccaccaaccacgccatcatccagaccctgctgaacagcatggccccagatgctgccccagccagctgctgcgtgcctgcccggctgagccccatcagcatcctgtacattgatgctgccaacaacgtggtgtacaagcagtatgaggacatggtggtggaggcctgtggctgcaggtag

SEQ ID NO: 257060 - DNA, 1353 bp, Artificial Sequence
  derived and/or modified sequence
atggacctgagcgccgccgccgccctgtgcctgtggctgctgagcgcttgccgcccccgcgatggactggaagctgcagcagtgctgagggcggcaggcgccggtcccgtgagatccccaggagggggtggtggcggtggcggtgggggacgaactctggcccaagcagccggtgctgccgccgtcccggctgctgccgtgccacgagccagggccgcaagaagagcagccggctcaggctttcggaatgggtcggtggtgccgcatcactttatgatgtccttgtaccgaagtctcgcaggtcgtgcaccggcaggggccgcggcagtatctgcctccgggcacggccgggccgataccatcaccggtttcacagaccaggctactcaggatgagagtgcggccgagaccggtcagtcattcctctttgatgtgagctctctcaatgatgccgacgaagtcgtgggcgcggaattacgggtcctgcgtagaggttcacctgagagcgggcctggctcatggactagccctcctcttctcctgctatctacttgccccggcgccgcgagggctccccgtctcctgtactcacgcgcagccgaacctcttgtgggccagagatgggaagccttcgacgtggctgatgctatgcggcgccatcgacgcgagccaagaccacccagagcgttttgtctcttactgcgtgccgttgcagggcctgtgccctcccctcttgccctgagacgcttaggctttgggtggcctggtgggggagggagcgctgctgaggagcgggccgtgctagtggtgagctctcggacccagagaaaagaatccctgttcagagagatcagggcccaggccagggctctgggggccgctcttgcttctgagccacttccagacccgggtactgggacagcatcacccagggcagtgatcggaggcaggagacgcagaagaacggctctagcaggcactcgaacggctcaggggtctggcgggggggccgggcgcgggcacgggagaagggggagatctaggtgttcaagaaaacccttgcatgtcgattttaaggaacttggttgggatgactggataatcgctccactcgactatgaggcgtatcattgcgagggcctatgtgattttcctttacggtcccacctcgagccgaccaatcacgcgatcattcagactctgctgaactccatggcgcctgacgccgccccagctagctgctgtgtgcccgctagactttctcctattagcattctgtatatcgatgcagcaaataacgtggtttataaacagtacgaagacatggtagtcgaagcatgtggatgtcggtag

SEQ ID NO: 257061 - DNA, 1353 bp, Artificial Sequence
  derived and/or modified sequence
atggacttgtcggccgctgcagccctgtgcctgtggcttctgtccgcctgccgaccacgcgatggccttgaagcagctgctgtgctacgcgctgccggagccggtcccgtgcggtctcctggcggtggtggcggtggtgggggagggggacggacactagcgcaagccgctggcgctgccgctgtacccgctgctgcagtgccgagggcacgtgctgcccgacgcgctgccggtagtggtttccgcaatggcagtgtggtgcctcaccatttcatgatgtctctctaccggtcgctcgctggcagagcccctgccggtgccgctgccgtgagcgcaagcggccatggccgtgccgacactatcacggggttcacagatcaggccacccaagacgagtcggccgcagaaactggccagtcttttctctttgacgtgtcatctttgaacgacgccgatgaggttgtcggagccgagctgagggtgttgagacggggaagtccggagtccggacccggatcctggacaagtcctccgctgctgcttctgtcaacctgtcccggtgcggctagagctcccaggttattatactcccgcgcagccgagccactggtcgggcagcggtgggaggcttttgacgtggctgacgccatgcgcagacatagaagagaaccccgacctcccagagcattctgcctgttgctgagggctgtggcaggtcccgtgccatctccactagctcttcggagactcggttttgggtggcctggcggaggcggaagcgccgcagaggagcgcgcagtgttagttgtctctagtagaacgcagaggaaagagtccttattccgagaaataagggcacaggcccgagccctcggtgcagcactggcctccgagcccttaccagatccagggactggcaccgcatcacctagagctgtgatcggtggaagaaggcgtcggcgaacagccctggctggcactaggacagcacaggggtcaggcggaggcgctggcagaggccatggcaggaggggacgcagccgctgctcccgcaagcccctccatgtggattttaaggaattaggttgggatgactggatcatcgcccctctcgattacgaggcctaccactgcgaaggcctgtgcgactttccactccgcagccatcttgagccaacaaatcacgctatcatccagacgctgctgaatagtatggcgccagatgccgcacccgcaagctgttgcgttcctgccagactgtctcccatttccatcttatatattgacgctgctaacaatgttgtctacaaacaatacgaagatatggtcgtggaggcctgcgggtgccggtag

SEQ ID NO: 257062 - DNA, 1353 bp, Artificial Sequence
  derived and/or modified sequence
atggacctgagcgccgccgccgccctgtgcctgtggctgctgagcgcctgcagacccagagacggcctggaggccgccgccgtgctgagagccgccggcgccggccccgtgagaagccccggcggcggcggcggcggcggcggcggcggcagaaccctggcccaggccgccggcgccgccgccgtgcccgccgccgccgtgcccagagccagagccgccagaagagccgccggcagcggcttcagaaacggcagcgtggtgccccaccacttcatgatgagcctgtacagaagcctggccggcagagcccccgccggcgccgccgccgtgagcgccagcggccacggcagagccgacaccatcaccggcttcaccgaccaggccacccaggacgagagcgccgccgagaccggccagagcttcctgttcgacgtgagcagcctgaacgacgccgacgaggtggtgggcgccgagctgagagtgctgagaagaggcagccccgagagcggccccggcagctggaccagcccccccctgctgctgctgagcacctgccccggcgccgccagagcccccagactgctgtacagcagagccgccgagcccctggtgggccagagatgggaggccttcgacgtggccgacgccatgagaagacacagaagagagcccagaccccccagagccttctgcctgctgctgagagccgtggccggccccgtgcccagccccctggccctgagaagactgggcttcggctggcccggcggcggcggcagcgccgccgaggagagagccgtgctggtggtgagcagcagaacccagagaaaggagagcctgttcagagagatcagagcccaggccagagccctgggcgccgccctggccagcgagcccctgcccgaccccggcaccggcaccgccagccccagagccgtgatcggcggcagaagaagaagaagaaccgccctggccggcaccagaaccgcccagggcagcggcggcggcgccggcagaggccacggcagaagaggcagaagcagatgcagcagaaagcccctgcacgtggacttcaaggagctgggctgggacgactggatcatcgcccccctggactacgaggcctaccactgcgagggcctgtgcgacttccccctgagaagccacctggagcccaccaaccacgccatcatccagaccctgctgaacagcatggcccccgacgccgcccccgccagctgctgcgtgcccgccagactgagccccatcagcatcctgtacatcgacgccgccaacaacgtggtgtacaagcagtacgaggacatggtggtggaggcctgcggctgcagatag

SEQ ID NO: 257063 - protein, 727 aa, Artificial Sequence
  derived and/or modified sequence
MVSFRLSNKTASPSIKLLVDDPIVVNPGEAITLVCVTTGGEPAPSLTWVRSFGTLPEKTVLNGGTLTIPAITSDDAGTYSCIANNNVGNPAKKSTNIIVRALKKGRFWITPDPYHKDDNIQIGREVKISCQVEAVPSEELTFSWFKNGRPLRSSERMVITQTDPDVSPGTTNLDIIDLKFTDFGTYTCVASLKGGGISDISIDVNISSSTVPPNLTVPQEKSPLVTREGDTIELQCQVTGKPKPIILWSRADKEVAMPDGSMQMESYDGTLRIVNVSREMSGMYRCQTSQYNGFNVKPREALVQLIVQYPPAVEPAFLEIRQGQDRSVTMSCRVLRAYPIRVLTYEWRLGNKLLRTGQFDSQEYTEYAVKSLSNENYGVYNCSIINEAGAGRCSFLVTGKAYAPEFYYDTYNPVWQNRHRVYSYSLQWTQMNPDAVDRIVAYRLGIRQAGQQRWWEQEIKINGNIQKGELITYNLTELIKPEAYEVRLTPLTKFGEGDSTIRVIKYSAPVNPHLREFHCGFEDGNICLFTQDDTDNFDWTKQSTATRNTKYTPNTGPNADRSGSKEGFYMYIETSRPRLEGEKARLLSPVFSIAPKNPYGPTNTAYCFSFFYHMYGQHIGVLNVYLRLKGQTTIENPLWSSSGNKGQRWNEAHVNIYPITSFQLIFEGIRGPGIEGDIAIDDVSIAEGECAKQDLATKNSVDGAVGILVHIWLFPIIVLISILSPRR

SEQ ID NO: 257064 - protein, 647 aa, Artificial Sequence
  derived and/or modified sequence
MLSGAAGAARRGGAALAPSLTRSLAGTHAGADSCAGADKGSHKETIEERDKRQQRQQRQRQHQGCGAAGSGSDSPTSGPHPVPVLFPLALSLEEQPLPPLPLGRAPGLLAREGQGREALASPSSRGQMPIEIVCKIKFAEEDAKPKEKEAGDEQSLLGAVAPGAAPRDLATFASTSTLHGLGRACGPGPHGLRRTLWALALLTSLAAFLYQAAGLARGYLTRPHLVAMDPAAPAPVAGFPAVTLCNINRFRHSALSDADIFHLANLTGLPPKDRDGHRAAGLRYPEPDMVDILNRTGHQLADMLKSCNFSGHHCSASNFSVVYTRYGKCYTFNADPRSSLPSRAGGMGSGLEIMLDIQQEEYLPIWRETNETSFEAGIRVQIHSQEEPPYIHQLGFGVSPGFQTFVSCQEQRLTYLPQPWGNCRAESELREPELQGYSAYSVSACRLRCEKEAVLQRCHCRMVHMPDSLGGGPEGPCFCPTPCNLTRYGKEISMVRIPNRGSARYLARKYNRNETYIRENFLVLDVFFEALTSEAMEQRAAYGLSALLGDLGGQMGLFIGASILTLLEILDYIYEVSWDRLKRVWRRPKTPLRTSTGGISTLGLQELKEQSPCPSRGRVEGGGVSSLLPNHHHPHGPPGGLFEDFAC

SEQ ID NO: 257065 - DNA, 1944 bp, Artificial Sequence
  derived and/or modified sequence
atgttgtccggcgcggctggcgctgctaggagaggaggcgcagctcttgccccaagcctcacaaggtctctggccgggacccatgccggggctgattcgtgtgctggtgcagacaaggggagccataaagagacaattgaggagcgagataaacgacaacagagacagcagcggcagcggcagcaccagggctgcggagccgctgggtctgggtcagattctcccacgagtgggccacaccccgttcccgttcttttccctcttgcgttgtctctggaggagcaacctttgccgccgttgcctctcggtcgggcgcccggtttgctcgcacgcgagggacaggggcgcgaggctctcgccagcccttcctcccgcggtcagatgcccatcgaaatcgtatgtaagatcaaattcgcagaggaggatgcgaaacccaaagaaaaggaagccggagatgagcagagtctgctgggcgctgtggctcccggagcagctccgagagacctggccactttcgcctcaacttcaaccctgcatggtcttggccgcgcatgtggacccggccctcatggcctgcggaggaccctatgggccctcgccctcctgacatctctggccgcgtttctttatcaggccgcagggctggctagaggatatttgactcgcccacacttggtggcaatggacccggctgccccagcccctgttgccggctttccagctgtgactttgtgcaatattaatagattccgccacagcgccttgtccgatgctgatatcttccacttagccaatttgaccggtctgccacccaaagatagagacggccacagagcagctgggctgcggtatcctgagcctgatatggtggacattctgaaccgcacaggtcaccagttggctgacatgttaaagtcctgcaatttttctggacaccattgctccgcctctaactttagcgtcgtttacacacgatacggaaaatgttatacattcaatgcagaccctcgctccagcctgccgtcacgagctggaggtatgggctctggtctagagatcatgctcgatatccaacaagaagagtatctcccaatctggagagaaacgaacgagacgtcattcgaggctgggatccgtgtccagattcactcccaggaagagcctccctatatccaccaactgggatttggcgtatctcccggcttccaaaccttcgtaagctgccaggagcagcggcttacctatctgccgcagccctggggaaattgtagggccgagtccgaattgcgcgaaccagaacttcaaggctactccgcctactccgtttctgcttgtcgactgagatgtgaaaaggaagcagtcctgcagcgatgtcactgccgaatggtccatatgccagactccctgggggggggacccgaaggcccctgtttctgtcccactccgtgcaacttaacgaggtacggtaaagagatatcgatggtgcgtatcccaaacaggggcagcgcccgctacctcgcacggaagtacaaccggaatgagacctatattcgggagaactttctggtgctcgacgtctttttcgaagccttaacaagtgaggccatggagcagcgagcagcttacgggcttagtgccctgctaggggatctgggggggcagatggggttatttatcggggcaagcattcttacactccttgagatcctggactatatttatgaagtctcctgggatcgactgaagcgtgtgtggagacgcccaaagacccctctccgtacatctaccggaggcatatctaccctggggttgcaggaactaaaagaacagtctccctgtcctagcagagggagagtggagggcggaggtgtcagctcactcttacctaaccatcaccaccctcatggtccaccgggaggtcttttcgaggatttcgcctgctag

SEQ ID NO: 257066 - DNA, 1944 bp, Artificial Sequence
  derived and/or modified sequence
atgctgtctggagctgctggggccgcccggcggggcggggccgccctggcccccagcctgaccaggagcctggccggcacccatgctggagctgacagctgtgccggggctgacaagggcagccacaaggagaccatcgaggagcgggacaagaggcagcagaggcagcagaggcagaggcagcaccagggctgtggggccgccggcagcggcagtgacagccccaccagcggcccccaccctgtgcctgtgctcttccccctggccctgagcctggaggagcagcccctgccccccctgcccctgggccgggcccctggcctgctggcccgggagggccagggccgggaggccctggccagccccagcagccggggccagatgcccatcgagatcgtgtgcaagatcaagtttgctgaagaagatgccaagcccaaggagaaggaggccggagatgagcagagcctgctgggcgctgtggcccctggggccgccccccgggacctggccacctttgccagcaccagcaccctgcacggcctgggccgggcctgtggccctggcccccacggcctgcggaggaccctgtgggccctggccctgctgaccagcctggccgccttcctgtaccaggccgccggcctggcccggggctacctgacccggccccacctggtggccatggaccctgctgccccagcccctgtggccggcttccctgctgtgaccctgtgcaacatcaaccgcttccgccacagcgccctgagtgatgctgacatcttccacctggccaacctgaccggcctgccccccaaggacagagatggccacagagctgctggcctgcgctacccagagccagacatggtggacatcctgaacagaacaggccaccagctggccgacatgctgaagagctgcaacttcagcggccaccactgcagcgccagcaacttctctgtggtgtacaccaggtatggcaagtgctacaccttcaatgctgaccccaggagcagcctgcccagccgggccggcggcatgggcagcggcctggagatcatgctggacatccagcaggaggagtacctgcccatctggagggagaccaatgagaccagctttgaggccggcatccgggtgcagatccacagccaggaggagcccccctacatccaccagctgggcttcggcgtgtccccaggcttccagacctttgtgtcctgccaggagcagaggctgacctacctgccccagccctggggcaactgcagagctgagagcgagctgcgggagcctgagctgcagggctacagcgcctacagcgtgtctgcctgccgcctgcgctgtgagaaggaggccgtgctgcagcgctgccactgcaggatggtgcacatgccagacagcctgggcggcggccctgagggcccctgcttctgccccaccccctgcaacctgaccaggtatggcaaggagatctccatggtgcgcatccccaacagaggcagcgcccgctacctggccaggaagtacaacagaaatgagacctacatccgggagaacttcctggtgctggatgtgttctttgaggccctgaccagcgaggccatggagcagagagctgcctacggcctgagcgccctgctgggggacctgggcggccagatgggcctcttcatcggggccagcatcctgaccctgctggagatcctggactacatctatgaggtgtcctgggaccggctgaagagggtgtggaggcggcccaagacccccctgcggaccagcactggaggcatcagcaccctgggcctgcaggagctgaaggagcagagcccctgccccagccggggccgggtggagggcggcggcgtgagcagcctgctgcccaaccaccaccacccccacggccccccaggcggcctgtttgaagattttgcctgctag

SEQ ID NO: 257067 - DNA, 2684 bp, Artificial Sequence
  derived and/or modified sequence
gggctccggagcacatgctgagcggagcggctggggctgcgcggcgtggcggagcagcgctcgctccctcgctcactcgctcgctcgcagggacacacgcaggggctgacagctgtgctggtgctgataagggaagccacaaggagacgatcgaggagagagacaagcggcagcagaggcagcagcggcagaggcagcaccagggctgcggagctgctgggagtgggagtgactcccccacctcgggcccccaccctgtccctgtcctcttcccgcttgccctgagtttagaagagcagccgctgccaccactgccactcgggagggcaccagggctgctggctagggagggacagggcagggaggctctggccagtcccagcagccggggacagatgccgatcgagattgtgtgcaaaatcaaatttgctgaggaggatgcgaaacccaaggagaaggaggcaggggatgagcagagcctcctcggggctgttgcccctggagcagccccccgagacctggccacctttgccagcaccagcaccctgcatggactgggccgggcctgtggcccaggcccccacggactgcgcagaaccctgtgggcactggccctactcacctcgctggctgccttcctgtaccaggcggctggcctggcccggggctacctgacccggcctcacctggtggcaatggaccccgctgccccagccccagtggcgggcttcccggctgtcaccctctgcaatatcaaccgcttccggcattcggcactcagcgatgccgacatcttccacctggccaatctgacagggctgccccccaaagaccgggatgggcaccgtgcggctggcctgcgctacccagagcctgacatggtagacatcctcaaccgcactggccaccagctcgccgacatgcttaagagctgcaacttcagtgggcatcactgctccgccagcaacttctctgtggtctatactcgctatgggaagtgttacaccttcaacgcggacccgcggagctcgctgcccagccgggcagggggcatgggcagtggcctggagatcatgctggacatccagcaggaggagtacctgcccatctggagggagacaaatgagacgtcgtttgaggcaggtattcgggtgcagatccacagccaggaggagccgccctacatccaccagctggggttcggggtgtccccaggcttccagacctttgtgtcctgccaggaacagcggctgacctacctgccccagccctggggcaactgccgcgcagagagtgagctcagggagcctgagcttcagggctactcggcctacagtgtgtctgcctgccggctgcgctgtgaaaaggaggccgtgcttcagcgctgccactgccggatggtgcacatgccagactccctgggtgggggccctgagggcccgtgcttctgccccaccccctgcaacctgacacgctatgggaaagagatctccatggtcaggatccccaacaggggctcagcccggtacctggcgaggaagtacaaccgcaacgagacctacatacgggagaacttcctggtcctagatgtcttctttgaggccctgacctctgaagccatggagcagcgagcagcctatggcctgtcagccctgctgggagacctcgggggacagatgggcctgttcattggggccagcatcctcacgttgctggagatcctcgactacatctatgaggtgtcctgggatcgactgaagcgggtatggaggcgtcccaagacccccctgcggacctccactgggggcatctccactttggggcttcaggagctgaaggaacagagtccctgcccgagccggggccgagtggagggtgggggggtcagcagtctgctccccaatcaccaccacccccacggtcccccaggaggtctctttgaagattttgcttgctaggacggtgctgtgactgaaaggacccaggagtctgggacccctcctgggatccccagcacattctcctgctcctgggagaggcctgggggcggtgctcactgggagggccaggactcagttcctgctctcatcctcccctgccctgatgtcagctgctttgcacaaaggtccttcttgtccacaccccttatccccaggctggtgccccgggagggctggagaccaggccatgggccctcacggagaggaagggaaggaaggagagggagggggaggatagagcccatcccagccggggagggggagccctctgtacatttgtaaatatttagggaaagccgggtggggggaggggatacagatgtagaaggtgggtagggctacaggggtgggtgatttagggacagccagggtcccagccccaatgtcagcaggatagggagagccccaggactcaggagtgctgggctggtcctacttcctgcccctctccaggcccagctcccctcttggcagggggagaggatggcccagcaggcctggcccagctcccagttccccctgcaccagccccacccctagagtcccttctatagggagggggcaggagaccttccagacttcggctgagcttggagggtgggaagggagccttctcagtcctctctccctccagtctgattttataaagtgctgacgagattgggaataaagaggcataaagaa

SEQ ID NO: 257068 - DNA, 1944 bp, Artificial Sequence
  derived and/or modified sequence
atgctgagcggcgccgccggcgccgcccggcggggcggcgccgccttggcccctagccttacccgttccctcgcagggactcacgcaggggctgattcctgcgcgggcgccgataagggaagccacaaagagaccatagaggaacgggacaaacgacaacagcgccagcaacgacagcggcagcaccaggggtgtggggctgctggaagcggatcagattccccgacaagcggtccccacccagtcccggtcctcttcccgctcgccctgtctctcgaggagcaaccccttcctcccctgccgctggggcgggcaccagggcttcttgcccgtgagggacaaggccgggaggccctggcgtcacctagcagcagaggacaaatgcctatcgagatagtttgcaaaataaagttcgcggaggaagatgcaaagccaaaggagaaggaggccggagacgaacaatcactcttgggcgccgtggcgcctggagctgcaccacgcgatctggccacctttgcttccacgagcactcttcatggcttggggagagcttgcggaccagggccacatggcctccgacgcacactgtgggccctcgcgctacttacctctctcgccgcattcttataccaagccgcgggcctggctaggggttacctcactagacctcatttagtggctatggatcccgcagcgccagctcctgttgctggcttccccgccgttactctctgcaatattaaccggttcagacattcagctctttccgacgctgatattttccacctagctaacctcaccggtctgcctcccaaggacagagacggacaccgagctgccggattgcgatatcctgagccagatatggtcgatattttaaatagaactggacatcaactcgctgacatgctgaagagttgtaattttagtggtcaccattgctcagccagcaacttcagcgtggtatacacccggtatggcaagtgttatacatttaacgccgaccctcggtcctccttacctagccgagcgggaggaatggggtcaggactcgagatcatgctggacattcagcaggaggaatacctgcccatatggagagaaactaatgaaacaagcttcgaagccggaattcgcgtgcaaatccatagtcaagaggaaccgccctatatccaccagttgggcttcggcgtctcacctggattccaaaccttcgtcagctgccaggagcagcggctgacttacctgccccagccctggggcaactgccgagcagaatctgagctgagagagcctgaactacaggggtacagtgcctattcagtgtctgcctgccggctgagatgtgagaaggaggctgtgctgcaaagatgccactgtaggatggtgcatatgcccgactcactgggcggaggccccgaaggaccttgtttctgtcccactccctgtaatttgacccgctacggtaaagaaatctccatggtgagaatccccaataggggttctgcccgatatctggccagaaagtataatcgaaacgagacatacatccgggaaaacttccttgtgctggacgtgttttttgaggcccttacttccgaggccatggaacagcgcgcggcttacgggctgtcagcgttgcttggcgatctgggggggcagatgggtctttttatcggcgctagcatcctgactctcctcgaaatcctcgactacatttatgaagttagctgggaccgacttaaacgcgtctggaggcgacccaaaactccccttcggacctctacaggggggatcagcacacttggtctgcaggagctgaaagaacagagtccgtgccccagccggggacgagtggagggcggcggcgtgagtagtctgctgcctaatcaccatcatcctcatggccccccgggcgggttgttcgaagactttgcttgttag

SEQ ID NO: 257069 - DNA, 1944 bp, Artificial Sequence
  derived and/or modified sequence
atgctgtcaggagcagccggagctgccaggcggggaggcgcagccctggcaccatcattaacgaggagcctggcgggaacccatgccggtgctgattcatgcgcaggtgctgacaaaggcagccacaaggagaccatcgaggagagggacaaacgacagcaacggcagcagagacagagacagcatcagggatgcggtgctgctggatcaggcagcgatagcccaacatctggccctcaccccgtaccagtgctgttccctctcgccctgtcattagaagaacaacctttacctccgctaccgctggggagagccccaggcctgttggcacgggagggccagggaagggaagcgttggcgtctcctagcagtcgcggtcagatgcccattgaaattgtctgtaagatcaagttcgccgaggaggatgccaagcctaaagaaaaagaggcgggtgacgagcagtcgctgctaggcgctgtggccccaggcgctgctcccagggatctggctacatttgcatccacctctactctacacggactcggtagagcttgcggcccaggtccacacggtttgagaagaaccctgtgggctctcgcactgctgacttcgctggctgcgttcctgtatcaggctgccggactcgctcggggatatctaacgcggccacatttagtggcgatggaccctgccgctcccgctcccgtggccggttttcctgccgtcaccctatgcaacattaatagatttcgccatagcgccttaagcgacgcagatattttccacttggccaacctcacaggtttgcctcccaaggaccgcgatggacacagagccgcaggcttgcgctaccctgaacccgatatggtcgatatcctgaaccggacaggtcaccagctcgctgatatgcttaagagttgcaacttttctggtcaccactgtagcgcctccaatttcagtgttgtgtacacaaggtatggcaagtgttacacatttaatgcggatccacgcagtagcttgccttctcgggcaggcggaatgggctccggattagagattatgctcgatatccaacaggaggagtacctgcccatatggcgagagactaacgagactagctttgaggccggaattagagtgcaaatccattcacaagaagaaccaccatacattcatcagctcgggttcggagtgagcccaggattccagaccttcgtgtcttgccaggagcagcggctgacttacttaccgcagccatggggaaattgcagggccgagagtgagctccgtgaacccgaactgcagggttattcagcttactctgtgtccgcttgccggcttagatgtgagaaggaagccgtgctccagcgctgccactgccggatggtgcatatgcctgactctcttgggggtgggcctgagggtccttgtttctgccccaccccatgtaacctgacaagatatgggaaagaaatttcaatggtacggattccgaacagaggttcagctcgctatctagcacgaaagtataacaggaatgaaacctacatccgcgagaatttccttgtcttagacgtctttttcgaagctttgacaagcgaggccatggaacagcgcgcagcttacggactttccgcgcttttaggtgatctcgggggtcaaatgggacttttcattggcgctagtattctcacccttctggaaattctggactacatctacgaagtcagctgggatcgcctgaaacgtgtgtggaggagaccaaagacgccactgcgcacttctaccggaggcattagcacactgggcctgcaggagctgaaagaacagtcaccctgcccaagccgagggcgtgtcgagggcggtggggtctcatccttgctgcctaaccaccaccatcctcacggacccccaggagggctttttgaggactttgcctgctag

SEQ ID NO: 257070 - DNA, 1944 bp, Artificial Sequence
  derived and/or modified sequence
atgctgagcggcgccgccggcgccgccagaagaggcggcgccgccctggcccccagcctgaccagaagcctggccggcacccacgccggcgccgacagctgcgccggcgccgacaagggcagccacaaggagaccatcgaggagagagacaagagacagcagagacagcagagacagagacagcaccagggctgcggcgccgccggcagcggcagcgacagccccaccagcggcccccaccccgtgcccgtgctgttccccctggccctgagcctggaggagcagcccctgccccccctgcccctgggcagagcccccggcctgctggccagagagggccagggcagagaggccctggccagccccagcagcagaggccagatgcccatcgagatcgtgtgcaagatcaagttcgccgaggaggacgccaagcccaaggagaaggaggccggcgacgagcagagcctgctgggcgccgtggcccccggcgccgcccccagagacctggccaccttcgccagcaccagcaccctgcacggcctgggcagagcctgcggccccggcccccacggcctgagaagaaccctgtgggccctggccctgctgaccagcctggccgccttcctgtaccaggccgccggcctggccagaggctacctgaccagaccccacctggtggccatggaccccgccgcccccgcccccgtggccggcttccccgccgtgaccctgtgcaacatcaacagattcagacacagcgccctgagcgacgccgacatcttccacctggccaacctgaccggcctgccccccaaggacagagacggccacagagccgccggcctgagataccccgagcccgacatggtggacatcctgaacagaaccggccaccagctggccgacatgctgaagagctgcaacttcagcggccaccactgcagcgccagcaacttcagcgtggtgtacaccagatacggcaagtgctacaccttcaacgccgaccccagaagcagcctgcccagcagagccggcggcatgggcagcggcctggagatcatgctggacatccagcaggaggagtacctgcccatctggagagagaccaacgagaccagcttcgaggccggcatcagagtgcagatccacagccaggaggagcccccctacatccaccagctgggcttcggcgtgagccccggcttccagaccttcgtgagctgccaggagcagagactgacctacctgccccagccctggggcaactgcagagccgagagcgagctgagagagcccgagctgcagggctacagcgcctacagcgtgagcgcctgcagactgagatgcgagaaggaggccgtgctgcagagatgccactgcagaatggtgcacatgcccgacagcctgggcggcggccccgagggcccctgcttctgccccaccccctgcaacctgaccagatacggcaaggagatcagcatggtgagaatccccaacagaggcagcgccagatacctggccagaaagtacaacagaaacgagacctacatcagagagaacttcctggtgctggacgtgttcttcgaggccctgaccagcgaggccatggagcagagagccgcctacggcctgagcgccctgctgggcgacctgggcggccagatgggcctgttcatcggcgccagcatcctgaccctgctggagatcctggactacatctacgaggtgagctgggacagactgaagagagtgtggagaagacccaagacccccctgagaaccagcaccggcggcatcagcaccctgggcctgcaggagctgaaggagcagagcccctgccccagcagaggcagagtggagggcggcggcgtgagcagcctgctgcccaaccaccaccacccccacggcccccccggcggcctgttcgaggacttcgcctgctag

SEQ ID NO: 257071 - protein, 226 aa, Artificial Sequence
  derived and/or modified sequence
MSRAQIWALVSGVGGFGALVAATTSNEWKVTTRASSVITATWVYQGLWMNCAGNALGSFHCRPHFTIFKVAGYIQACRGLMIAAVSLGFFGSIFALFGMKCTKVGGSDKAKAKIACLAGIVFILSGLCSMTGCSLYANKITTEFFDPLFVEQKYELGAALFIGWAGASLCIIGGVIFCFSISDNNKTPRYTYNGATSVMSSRTKYHGGEDFKTTNPSKQFDKNAYV

SEQ ID NO: 257072 - DNA, 2549 bp, Artificial Sequence
  derived and/or modified sequence
atatccgtgtagaaaatcagaacgactctttcaggccatctttaaaatgtcattggtaaaccatacttgatcctaaattcctgtacttcctcaggccatccgagcatgaaacgctgtcacctacccacatccgctggctgtgacgcttgtcaaagtgttctctatcggctgcatgcctagaccaccaaagcgttctgaccggacagtgtcactggagaaggcggcgcgacatgtccagggcgcagatctgggctctggtgtctggtgtcggagggtttggagctctcgttgctgctaccacgtccaatgagtggaaagtgaccacgcgagcctcctcggtgataacagccacttgggtttaccagggtctgtggatgaactgcgcaggtaacgcgttgggttctttccattgccgaccgcattttactatcttcaaagtagcaggttatatacaggcatgtagaggacttatgatcgctgctgtcagcctgggcttctttggttccatatttgcgctctttggaatgaagtgtaccaaagtcggaggctccgataaagccaaagctaaaattgcttgtttggctgggattgtattcatactgtcagggctgtgctcaatgactggatgttccctatatgcaaacaaaatcacaacggaattctttgatcctctctttgttgagcaaaagtatgaattaggagccgctctgtttattggatgggcaggagcctcactgtgcataattggtggtgtcatattttgcttttcaatatctgacaacaacaaaacacccagatacacatacaacggggccacatctgtcatgtcttctcggacaaagtatcatggtggagaagattttaaaacaacaaacccttcaaaacagtttgataaaaatgcttatgtctaaaagagctcgctggcaagctgcctcttgagtttgttataaaagcgaactgttcacaaaatgatcccatcaaggccctcccataattaacactcaaaactatttttaaaatatgcatttgaagcatctgttgattgtatggatgtaagtgttcttacatagttagttatatactaatcattttctgttgtggctttctataaaaaataaacagtttatttacaggatttgtaaaatgttttctacatttatatagaacatgaaaagcatttagtaccaaaggttcaagaagtattcgtactctagcctttttaatcattcatagatagaagtctttgtacccactccttatgtttcttttcattcataaacaggtgtataaggaacaatgtcttataaacagcatgggggcaatctgagaatattcctcaaaaggtgtccaggttaaatagacatgttactggctgcacacaggcaaattctagtttgttttttttaagtattctacaacatttatttaaaaaggtaaatctttttgttgaagcagcaagttatctggtagaacttaacttctacaggatcagagaggatcttgctcattcatggccatatccacatgcccatggccactcagtagattgttgaaaaagcaaagccacaccattctctttgatgtatgcagagagttacgtagcaggggatgttctctgatttattccactggcaccattagtgaatatttagttgttttcataaacgatgctgtgatgaagactcatgtacatatttagcaaattttggtttcttacatgtgcctgtcatgactgtaattcattatgactgctccaggaagggctaatggggccaatatattattgcctgtcatgtggcacatccatgttaaggggctgaggcgtccctggcacggaatgcagagccctgagctagggcatcagcagaagctgagatagagatattggtcatggttgactgaggagccaattaaaacctgtttatgcctagtgttccattattggaacactaagcatgtgggagttatttatatcctactgctcaaggtcatcgccaaggtgtgattggaaaaattcaaaaaattgcaacctcaggcataaatgggttaaggacatcccaagcccaagtggtacgtgcctcactcagaactgacgggccgagttctatctaggtgtgtcttccagaacctgtttacggctaactggataactgagagacttgtcatttctaaagacatttaagttgctccagggatttctgaaaaaagacacaggcttcttcctagagccagccctatataacatgcccacaagggcaacagttatcacagttcatacacacctttcatgtcctgtctcactcactcctcacagccatcctaggagatacatattgttttcatcctgcatttacagaaaaagaaatgaaaacagagagcttaaataatttgccacagtaatgtcgaaactaggcctttgaaccaaggcagtctagggtaaaatatagtttcaaagtatgaataagaattggtatttgtgttatctttgagtaagaaactgtccgatatgaatcacaacgtgggtgaatgtagtattttcctgaagtgtg

SEQ ID NO: 257073 - DNA, 681 bp, Artificial Sequence
  derived and/or modified sequence
atgagcagagcccagatctgggccctggtgagcggcgtgggcggcttcggcgccctggtggccgccaccaccagcaacgagtggaaggtgaccaccagagccagcagcgtgatcaccgccacctgggtgtaccagggcctgtggatgaactgcgccggcaacgccctgggcagcttccactgcagaccccacttcaccatcttcaaggtggccggctacatccaggcctgcagaggcctgatgatcgccgccgtgagcctgggcttcttcggcagcatcttcgccctgttcggcatgaagtgcaccaaggtgggcggcagcgacaaggccaaggccaagatcgcctgcctggccggcatcgtgttcatcctgagcggcctgtgcagcatgaccggctgcagcctgtacgccaacaagatcaccaccgagttcttcgaccccctgttcgtggagcagaagtacgagctgggcgccgccctgttcatcggctgggccggcgccagcctgtgcatcatcggcggcgtgatcttctgcttcagcatcagcgacaacaacaagacccccagatacacctacaacggcgccaccagcgtgatgagcagcagaaccaagtaccacggcggcgaggacttcaagaccaccaaccccagcaagcagttcgacaagaacgcctacgtgtag

SEQ ID NO: 257074 - DNA, 681 bp, Artificial Sequence
  derived and/or modified sequence
atgtctagagctcagatttgggcattggtgtcaggggtaggcggatttggcgctttggtggccgctaccactagcaatgaatggaaagtcactacacgtgcttcctctgttattacagctacctgggtgtaccaaggactatggatgaattgtgctggcaatgcactcggatctttccactgtaggccacacttcacaatcttcaaggtggctggatacatccaggcctgccgcggactcatgatcgctgcagtttccttgggctttttcgggtccatatttgccctgtttgggatgaagtgcactaaagtgggcggctccgataaggccaaggccaaaatcgcctgcttagccggcattgtcttcatcttgagtggcttgtgttccatgaccgggtgctccttgtatgctaacaagatcacgactgaatttttcgaccccttgttcgtggaacagaagtatgagctgggcgcagcactgttcataggttgggccggagcatctctttgcatcatcggcggtgtaatattttgtttttccatcagtgataacaacaagacaccccgctatacttataatggtgcaacatctgtcatgagcagtagaaccaaataccacggaggggaagattttaaaaccaccaatccctctaagcaatttgataaaaacgcttacgtgtag

SEQ ID NO: 257075 - DNA, 681 bp, Artificial Sequence
  derived and/or modified sequence
atgagccgggcccagatctgggccctggtgtctggagtgggcggctttggagccctggtggccgccaccaccagcaatgagtggaaggtgaccacccgggccagcagcgtcatcacagccacctgggtgtaccagggcctgtggatgaactgtgctggaaatgccctgggcagcttccactgccggccccacttcaccatcttcaaggtggccggctacatccaggcctgccggggcctgatgattgctgctgtgtccctgggcttcttcggcagcatctttgccctgtttggcatgaagtgcaccaaggtgggcggcagtgacaaggccaaggccaagatcgcctgcctggccggcatcgtgttcatcctgagcggcctgtgcagcatgacaggctgcagcctgtatgccaacaagatcaccacagagttctttgaccccctgtttgtggagcagaagtatgagctgggcgccgccctcttcatcggctgggccggggccagcctgtgcatcatcggcggcgtcatcttctgcttcagcatcagtgacaacaacaagaccccccgctacacctacaatggagccacctctgtgatgagcagcaggaccaagtaccacggcggggaggacttcaagaccaccaaccccagcaagcagtttgacaagaatgcctacgtgtag

SEQ ID NO: 257076 - DNA, 681 bp, Artificial Sequence
  derived and/or modified sequence
atgagccgggcccagatctgggccctggtgagcggcgtgggcggctttggcgctctggtagccgcaacaacgtccaacgagtggaaggtaacaacacgagccagcagtgtcatcactgccacctgggtctaccagggcctttggatgaactgcgctgggaacgcactgggttcctttcactgccgtcctcactttacaatttttaaggtggcagggtatatccaggcctgtcgaggccttatgattgcagccgtttctctcgggttcttcgggtctatatttgccctcttcggtatgaaatgtacgaaggtggggggctcagacaaagcaaaagctaaaatcgcatgtctggccggaattgtctttatcttatctggactgtgctctatgactggttgttctttgtacgctaacaagattacgaccgaattttttgacccactgtttgtcgagcagaaatatgagctgggggccgccttgttcattggctgggccggagcctctctgtgcatcattgggggggttatcttctgcttttccatctccgataacaacaagaccccacgctacacttataatggggccacatccgtgatgagctctcgaactaagtaccatgggggagaggacttcaaaacaaccaatccttctaagcaatttgataaaaacgcctacgtttag

SEQ ID NO: 257077 - DNA, 681 bp, Artificial Sequence
  derived and/or modified sequence
atgagcagggcacagatttgggccctggtgagcggcgtcgggggattcggtgccctagtggcggcaaccacatcaaatgaatggaaggttacaactcgtgcttcttcagtcatcactgcgacgtgggtgtatcaaggcctgtggatgaactgcgctggaaacgccctcggatcttttcactgtagacctcattttactatcttcaaggtcgctggttacattcaggcctgccgtgggcttatgattgctgccgtgagcctcggctttttcggttccatatttgccctgttcggcatgaagtgcactaaagtgggcggttcggacaaggctaaagctaagattgcttgtctcgcgggtatcgtgtttatcttaagcggcctctgttcgatgaccggctgttccctgtacgcaaataagatcaccactgaattcttcgatcccctgttcgtggaacagaaatacgagctgggggcagctctgttcatcggctgggccggtgccagcctctgtatcattggaggagtgatattttgtttctcgattagcgacaataacaaaacccctcgctacacctataatggagcaacttccgtcatgtcaagccgtaccaagtaccatggcggtgaggactttaagactaccaatccaagtaaacaattcgataaaaatgcatacgtgtag

SEQ ID NO: 257078 - protein, 316 aa, Artificial Sequence
  derived and/or modified sequence
MASPEHPGSPGCMGPITQCTARTQQEAPATGPDLPHPGPDGHLDTHSGLSSNSSMTTRELQQYWQNQKCRWKHVKLLFEIASARIEERKVSKFVVYQIIVIQTGSFDNNKAVLERRYSDFAKLQKALLKTFREEIEDVEFPRKHLTGNFAEEMICERRRALQEYLGLLYAIRCVRRSREFLDFLTRPELREAFGCLRAGQYPRALELLLRVLPLQEKLTAHCPAAAVPALCAVLLCHRDLDRPAEAFAAGERALQRLQAREGHRYYAPLLDAMVRLAYALGKDFVTLQERLEESQLRRPTPRGITLKELTVREYLH

SEQ ID NO: 257079 - protein, 152 aa, Artificial Sequence
  derived and/or modified sequence
MASPEHPGSPGCMGPITQCTARTQQEAPATGPDLPHPGPDGHLDTHSGLSSNSSMTTRELQQYWQNQKCRWKHVKLLFEIASARIEERKVSKFVVYQIIVIQTGSFDNNKAVLERRYSDFVTLQERLEESQLRRPTPRGITLKELTVREYLH

SEQ ID NO: 257080 - DNA, 951 bp, Artificial Sequence
  derived and/or modified sequence
atggccagccccgagcaccccggcagccccggctgcatgggccccatcacccagtgcaccgccagaacccagcaggaggcccccgccaccggccccgacctgccccaccccggccccgacggccacctggacacccacagcggcctgagcagcaacagcagcatgaccaccagagagctgcagcagtactggcagaaccagaagtgcagatggaagcacgtgaagctgctgttcgagatcgccagcgccagaatcgaggagagaaaggtgagcaagttcgtggtgtaccagatcatcgtgatccagaccggcagcttcgacaacaacaaggccgtgctggagagaagatacagcgacttcgccaagctgcagaaggccctgctgaagaccttcagagaggagatcgaggacgtggagttccccagaaagcacctgaccggcaacttcgccgaggagatgatctgcgagagaagaagagccctgcaggagtacctgggcctgctgtacgccatcagatgcgtgagaagaagcagagagttcctggacttcctgaccagacccgagctgagagaggccttcggctgcctgagagccggccagtaccccagagccctggagctgctgctgagagtgctgcccctgcaggagaagctgaccgcccactgccccgccgccgccgtgcccgccctgtgcgccgtgctgctgtgccacagagacctggacagacccgccgaggccttcgccgccggcgagagagccctgcagagactgcaggccagagagggccacagatactacgcccccctgctggacgccatggtgagactggcctacgccctgggcaaggacttcgtgaccctgcaggagagactggaggagagccagctgagaagacccacccccagaggcatcaccctgaaggagctgaccgtgagagagtacctgcactag

SEQ ID NO: 257081 - DNA, 459 bp, Artificial Sequence
  derived and/or modified sequence
atggccagccccgagcaccccggcagccccggctgcatgggccccatcacccagtgcaccgccagaacccagcaggaggcccccgccaccggccccgacctgccccaccccggccccgacggccacctggacacccacagcggcctgagcagcaacagcagcatgaccaccagagagctgcagcagtactggcagaaccagaagtgcagatggaagcacgtgaagctgctgttcgagatcgccagcgccagaatcgaggagagaaaggtgagcaagttcgtggtgtaccagatcatcgtgatccagaccggcagcttcgacaacaacaaggccgtgctggagagaagatacagcgacttcgtgaccctgcaggagagactggaggagagccagctgagaagacccacccccagaggcatcaccctgaaggagctgaccgtgagagagtacctgcactag

SEQ ID NO: 257082 - DNA, 951 bp, Artificial Sequence
  derived and/or modified sequence
atggccagtccagagcatcctggctcacctggttgtatgggaccgatcacacagtgcacagcgcgcacacagcaggaggcccccgccaccggacctgatctgccccatcccggcccggacggacatttggacacacattctggcctaagttcgaactcaagcatgacaaccagagagctgcaacagtattggcagaaccagaaatgccgctggaagcacgtgaagctgctttttgaaatcgcttccgcccgcatagaggagcgcaaggtgtctaagttcgtggtctaccaaatcatcgtgattcagactggcagtttcgataacaataaagcagtgctggagagaaggtactctgatttcgccaagctgcaaaaggccctgctgaaaacattccgggaggagatcgaggatgttgagtttccccgaaagcatctgactggcaacttcgccgaagagatgatttgcgagagacggcgtgccttgcaggagtacctgggtctcctctacgccatcaggtgcgtgcgtcgaagcagggagttcctcgatttcttgacacgcccggaactcagggaggcctttggatgtttgcgggccggacagtacccccgggcattagaactgcttctcagggtgttgcctctacaggaaaagcttaccgcccactgcccagccgctgcggtcccagctctgtgcgccgtcctcctgtgtcaccgagaccttgacaggcctgcggaagcctttgctgccggcgaaagggccctgcagcgtctccaagcccgcgagggccacaggtactatgctccacttctcgacgctatggtgcgcttggcctatgccctggggaaagactttgtgaccctacaggagagactggaggagtcccagctccgccggcccacccctaggggtataacacttaaggagcttaccgtgcgcgagtacctgcattag

SEQ ID NO: 257083 - DNA, 459 bp, Artificial Sequence
  derived and/or modified sequence
atggctagtcctgagcacccaggaagccccggatgtatgggacccataacgcaatgcactgcgcgcacacagcaggaggctcccgctactgggcctgacctccctcatcctggcccggatgggcacctggacacacactcaggactttcctctaactcctctatgactaccagagagcttcagcagtattggcagaaccagaagtgtaggtggaaacatgtgaagctgttgtttgaaatagcgagtgcacgcattgaggaacggaaggtgagcaagtttgtggtgtatcagattatagtgatccagaccggcagctttgacaataataaagcagtcctggagcgacgctactctgatttcgtaacactgcaggagcggctcgaggagtcccagcttcgccgccctacccccaggggtattaccctgaaagagcttaccgtgcgagagtacctgcattag

SEQ ID NO: 257084 - DNA, 951 bp, Artificial Sequence
  derived and/or modified sequence
atggccagccctgagcaccctggcagccctggctgcatgggccccatcacccagtgcacagcccggacccagcaggaggccccagccaccggccctgacctgccccaccctggcccagatggccacctggacacccacagcggcctgagcagcaacagctccatgaccacccgggagctgcagcagtactggcagaaccagaagtgccgctggaagcacgtgaagctgctgtttgagatcgccagcgccagaattgaggagaggaaggtgtccaagtttgtggtgtaccagatcatcgtcatccagacaggcagctttgacaacaacaaggctgtgctggagcggcgctacagcgactttgccaagctgcagaaggccctgctgaagaccttccgggaggagattgaagatgtggagttccccaggaagcacctgaccggcaactttgctgaggagatgatctgtgaaagaagaagagccctgcaggagtacctgggcctgctgtatgccatccgctgtgtgagaagaagccgggagttcctggacttcctgaccaggcctgagctgcgggaggccttcggctgcctgcgggccggccagtacccccgggccctggagctgctgctgcgggtgctgcccctgcaggagaagctgacagcccactgcccagctgctgctgtgcctgccctgtgtgctgtgctgctgtgccaccgggacctggacaggcctgctgaggcctttgctgctggggagcgggccctgcagaggctgcaggcccgggagggccaccgctactatgcccccctgctggatgccatggtgcggctggcctatgccctgggcaaggactttgtgaccctgcaggagcggctggaggagagccagctgcggcggcccaccccccggggcatcaccctgaaggagctgactgtgcgggagtacctgcactag

SEQ ID NO: 257085 - DNA, 459 bp, Artificial Sequence
  derived and/or modified sequence
atggccagccctgagcaccctggcagccctggctgcatgggccccatcacccagtgcacagcccggacccagcaggaggccccagccaccggccctgacctgccccaccctggcccagatggccacctggacacccacagcggcctgagcagcaacagctccatgaccacccgggagctgcagcagtactggcagaaccagaagtgccgctggaagcacgtgaagctgctgtttgagatcgccagcgccagaattgaggagaggaaggtgtccaagtttgtggtgtaccagatcatcgtcatccagacaggcagctttgacaacaacaaggctgtgctggagcggcgctacagcgactttgtgaccctgcaggagcggctggaggagagccagctgcggcggcccaccccccggggcatcaccctgaaggagctgactgtgcgggagtacctgcactag

SEQ ID NO: 257086 - DNA, 951 bp, Artificial Sequence
  derived and/or modified sequence
atggccagccccgagcaccccggcagccccggctgcatgggccccatcacacagtgcaccgcacggacccaacaagaggctcccgccaccggtccagatctcccccatcccgggccagacggtcacctggatacccatagcggcctgtctagcaactcttctatgaccacgcgagagctgcagcaatattggcagaaccagaagtgcaggtggaaacacgtgaagttgctgtttgaaattgcgagcgcgagaatcgaggaaagaaaggtctcaaaattcgtggtctatcagataattgtaatacagacgggctcgttcgacaacaacaaggccgtgcttgagcggaggtacagcgacttcgccaagcttcagaaggcgctgttgaaaactttcagagaagaaattgaggatgtcgaattccccaggaagcatctcacggggaacttcgcagaagaaatgatatgtgaaagacgccgggccctacaagagtacctgggtctgttatacgcaatacggtgcgtcagaaggagtcgagagtttctggatttcctgacaaggcccgaactgagggaagcttttggctgcttgagggcaggccagtatccccgcgcactcgaacttttactgagagtactgcccctgcaggagaaactgacagctcactgccccgcagccgctgttccggcgctatgtgcagtcttgctgtgtcacagggacctggaccggccggctgaggcttttgcagctggtgaacgagccctgcagcgtctgcaggcccgagaagggcaccgctattacgctcctctgctggacgcaatggtacgcctggcatacgctttgggtaaggactttgtgacattgcaggaacgcctcgaggaaagtcagctgaggcggcctacgccccgtgggatcacgttgaaggaattaacagttagagagtatctacactag

SEQ ID NO: 257087 - DNA, 459 bp, Artificial Sequence
  derived and/or modified sequence
atggccagccccgagcaccccggcagccccggctgcatgggccccataactcagtgtaccgccagaacacagcaggaagcaccagccacaggacctgatctgcctcatccaggaccggatggacatctcgatacccacagtgggctgtctagtaatagctctatgactaccagggagttgcagcaatattggcaaaatcagaagtgccgctggaaacacgtcaagttgctgtttgagattgcaagtgcccgcatcgaagagaggaaagtttctaagttcgtcgtctaccagatcatagttatccaaacaggcagtttcgataacaacaaggcagttctggaacgacggtacagcgacttcgtgaccctgcaagagcgcctcgaggagagccagctgaggcgaccaacccccagaggtattacgctcaaagagctcacggtccgagagtatcttcattag

SEQ ID NO: 257088 - DNA, 951 bp, Artificial Sequence
  derived and/or modified sequence
atggcttcacccgagcaccctgggtcacccggatgcatggggccaatcactcagtgtaccgcacgaacccagcaggaggcgcctgccaccggcccagatctcccgcatcccggaccagatggccacctcgatacgcattcaggactatctagtaattcatcaatgactaccagagaacttcagcaatactggcagaatcagaaatgcaggtggaaacatgtgaaattactctttgaaatcgcctccgctaggatcgaggaacggaaggtgtccaagttcgtagtctaccagatcatcgttatccaaacaggatcattcgacaacaataaggcagtgctagagcgaagatactctgattttgcaaagctgcagaaagcacttttgaagactttccgcgaggagatcgaagacgtcgagttccccaggaagcacctgactggaaattttgccgaagagatgatctgcgaacgaagacgcgctctccaggagtatctcggcctcttgtacgctatccgatgcgtgcgcaggtctcgggagtttctggacttccttacccgcccagagctcagagaagcattcggttgtctgagggccggacagtaccccagggcattggaactgttgctccgcgtactccccctacaggaaaagctaacagctcactgccccgctgctgccgttcccgcactgtgcgccgtgctgctgtgccaccgcgacctggatcgccctgctgaggcttttgccgctggcgaaagggcactgcagagactgcaagctcgcgaaggccacaggtattacgctcctctgctcgatgcaatggtgaggctggcctacgcactcggtaaggactttgtgacgttgcaggagaggctcgaagaaagccagctgcgacgtccaacacccagggggattactttgaaggaactcactgttagggaatacctgcactag

SEQ ID NO: 257089 - DNA, 459 bp, Artificial Sequence
  derived and/or modified sequence
atggcttcgccagaacacccaggctcaccaggctgcatgggcccaattacacagtgtacagcacgcactcagcaggaggctcccgctactggtcctgatctccctcatcctgggcctgacggtcatctggacacccacagtggcctctcttctaactccagcatgaccaccagagagttacagcaatattggcagaaccaaaagtgtagatggaagcacgtgaaactcttgttcgagattgcttcagcacgaattgaggagcggaaggtcagtaagtttgtggtgtatcaaataatcgtgatccagacgggatccttcgataacaataaagctgtgttggagcggagatatagtgacttcgttaccctgcaggagagacttgaagagtcacagcttagacggcctacacccagagggatcactctgaaagaactgaccgtccgggagtatctgcattag

SEQ ID NO: 257090 - DNA, 2864 bp, Artificial Sequence
  derived and/or modified sequence
aaacggggaacttagaaagtggcagcccctcggcttgtcgccggagctgagaaccaagagctcgaaggggccatatgacactcctcccggacccctggacacacacagccctggagactggagccttggagcatggcaagtccagagcaccctgggagccctggctgcatgggacccataacccagtgcacggcaaggacccagcaggaagcaccagccactggccccgacctcccgcacccaggacctgacgggcacttagacacacacagtggcctgagctccaactccagcatgaccacgcgggagcttcagcagtactggcagaaccagaaatgccgctggaagcacgtcaaactgctctttgagatcgcttcagctcgcatcgaggagagaaaagtctctaagtttgtggtgtaccaaatcatcgtcatccagactgggagctttgacaacaacaaggccgtcctggaacggcgctattccgacttcgcgaagctccagaaagcgctgctgaagacgttcagggaggagatcgaagacgtggagtttcccaggaagcacctgactgggaacttcgctgaggagatgatctgtgagcgtcggcgcgccctgcaggagtacctgggcctgctctacgccatccgctgcgtgcgccgctcccgggagttcctggacttcctcacgcggccggagctgcgcgaggctttcggctgcctgcgggccggccagtacccgcgcgccctggagctgctgctgcgcgtgctgccgctgcaggagaagctcaccgcccactgccctgcggccgccgtcccggccctgtgcgccgtgctgctgtgccaccgcgacctcgaccgccccgccgaggccttcgcggccggagagagggccctgcagcgcctgcaggcccgggagggccatcgctactatgcgcctctgctggacgccatggtccgcctggcctacgcgctgggcaaggacttcgtgactctgcaggagaggctggaggagagccagctccggaggcccacgccccgaggcatcaccctgaaggagctcactgtgcgagaatacctgcactgagccggcctgggaccccgcagggacgctggagatttggggtcaccatggctcacagtgggctgtttggggttctttttttttatttttccttttcttttttgttatttgagacagtcttgctctgtcacccagactgaagtgcagtggctcaattatgtctcactgcagcctcaaactcctgggcacaagcaatcctcccacctcagcctcccaagtagctgggattacaggtgcacaccaccacaccaggctaatttttaattttttagtagagacagggtctctctgttgcccaggctggtctctaacttctgaccttaaatgatcttcctgcctcagcttcccaaaacactggggttacaagtgtgagccaccacccctggcctggggttcatttttaatgggaaaagccactgggggctctaactcgctgggtgactttggacaagcccctcctctggtcctcaatttctccatctgtattggacagaggtgctcctgggaccccttggaagcctctgcttgtgtcccacgtcctcttgatgccagggccacttcatctccaaaacacaaaaccaactgccaaaaccgtccagagcagtgtccaccccaccagtgtctttgtgggaagctggagaagaagtttacctcacacattctagacaaaacttagtccatttccttgaagacagttctctccagctgctccaaggcttttctctctgttccttccaccttggaattgctttaaaatatttccatccattatcctaatactatcttagtattctagcccttcccccttaccatgtagacctgacaaagcaaaacaaaagctcacctattgccctcaagaacagcctctacacacacacacacacacacacacacacacacacacacacacacggtgggagttgtatgccatccttttgaagggtgggaggaccctggaccagaaagcaataatggcataagattctgtgataccaggcatttttggcaagggaagttgccaacaatttttctggctgggatggcatagcacattgtctaggggtggattttcattcataaggcagctgttccctgaatggcttccctgggttatgtagaaacagcctggggaggaggtgatacaacatacttaatggggcctctgggcagaaaacagactgaatcctcaacactgccccttttgagggtctgtgatcctggaacttctctgatggactgggatgcccttaactgaggtctgctgtctggaaaggacaccacaggcccagaatgaaggggcatctggaccaatgacctagattcaacacagggcttggagctggtggtacaggctggttttggcccaatgtgtgttggaggctggaagcccctgaagacctaaactgcctggatgagcttattagggtgaattaatgagtctgtaatttgggaaccttaatgtgagacaccacttaaggagaggaacttggcccagcaagtgatcactctagaagtggacagctatgcactagactgcaccagaatctgttcaacagcgacaccttgtggtaaaaactgtagacgccccatcaggctggatgggaaactagaaacagactgtctcatctttggacagatatccctcaaatctcccaatctactccagggaaaagacacttcaagtgagagatattggacttcttgaaaatctaggcctatggaaaattaaagtgttaaatggaaaaattaaagagctatgagtctatttgtaatgatgaaacaga

SEQ ID NO: 257091 - DNA, 632 bp, Artificial Sequence
  derived and/or modified sequence
gggcgatcagaagcaggtcacacagcctgtttcctgttttcaaacggggaacttagaaagtggcagcccctcggcttgtcgccggagctgagaaccaagagctcgaaggggccatatgacactcctcccggacccctggacacacacagccctggagactggagccttggagcatggcaagtccagagcaccctgggagccctggctgcatgggacccataacccagtgcacggcaaggacccagcaggaagcaccagccactggccccgacctcccgcacccaggacctgacgggcacttagacacacacagtggcctgagctccaactccagcatgaccacgcgggagcttcagcagtactggcagaaccagaaatgccgctggaagcacgtcaaactgctctttgagatcgcttcagctcgcatcgaggagagaaaagtctctaagtttgtggtgtaccaaatcatcgtcatccagactgggagctttgacaacaacaaggccgtcctggaacggcgctattccgacttcgtgactctgcaggagaggctggaggagagccagctccggaggcccacgccccgaggcatcaccctgaaggagctcactgtgcgagaatacctgcactga

SEQ ID NO: 257092 - protein, 361 aa, Artificial Sequence
  derived and/or modified sequence
MTGKAGEALSKPKSETVAKSTSGGAPARCTGFGIQEILGLNKEPPSSHPRAALDGLAPGHLLAARSVLSPAGVGGMGLLGPGGLPGFYTQPTFLEVLSDPQSVHLQPLGRASGPLDTSQTASSDSEDVSSSDRKMSKSALNQTKKRKKRRHRTIFTSYQLEELEKAFNEAHYPDVYAREMLAMKTELPEDRIQVWFQNRRAKWRKREKCWGRSSVMAEYGLYGAMVRHSIPLPESILKSAKDGIMDSCAPWLLGMHKKSLEAAAESGRKPEGERQALPKLDKMEQDERGPDAQAAISQEELRENSIAVLRAKAQEHSTKVLGTVSGPDSLARSTEKPEEEEAMDEDRPAERLSPPQLEDMA

SEQ ID NO: 257093 - DNA, 1086 bp, Artificial Sequence
  derived and/or modified sequence
atgactggtaaggcaggcgaagcactcagcaagcccaagagtgagaccgtcgcaaaatctacctctgggggtgcccctgcccgctgtactgggtttggtattcaggagatcctgggactgaacaaagagccaccctcgagccatccacgcgctgcgttggatggactggctcctggccacttgctggctgcacgctccgtcctctccccagctggagtcggaggtatggggttactgggtcctggaggactgccaggattttatacccagccgacattcctggaggttctttctgatccacaaagcgttcatcttcaaccgcttggcagggccagcggtccactcgacacatcccaaacagcctcctctgattctgaggatgtgtcttcttccgacaggaaaatgtccaaatccgctctgaaccaaacaaagaagcggaagaagcgacgacatcgaacgatctttactagctaccagctagaggagctcgaaaaggctttcaacgaggctcactaccccgacgtgtacgcacgcgagatgttagctatgaaaaccgaacttcccgaggaccggatacaggtctggtttcagaatcgaagggcaaaatggagaaagcgagagaagtgttggggccggtccagtgtgatggcggaatacggcttgtatggggccatggtgcgccacagcattcctttacctgagagtattcttaagagcgcaaaggatggcatcatggactcctgtgcaccatggctgctcggaatgcacaagaaaagtctcgaggccgcagctgaatcaggcagaaaacctgagggagaaaggcaggctctgccaaaactggataaaatggaacaggacgagagaggccccgatgctcaggctgccatcagccaggaagagctccgggagaacagcatcgccgtccttagggccaaggcccaagaacactctacaaaagtgctcggcaccgtaagcggacctgacagcctcgccagatccaccgagaagccagaggaggaagaagccatggatgaggatcgcccagcggagcgtctctccccgccacagcttgaagatatggcatag

SEQ ID NO: 257094 - DNA, 1086 bp, Artificial Sequence
  derived and/or modified sequence
atgaccgggaaggccggggaggccctgagcaagcccaagtctgagaccgtggccaagagcaccagcggcggggccccagcccgctgcaccggcttcggcatccaggagatcctgggcctgaacaaggagccccccagcagccaccccagggctgccctggatggcctggcccctggccacctgctggccgcccggtctgtgctgagccctgctggggtgggcggcatgggcctgctgggccctgggggcctgcccggcttctacacccagcccaccttcctggaggtgctgagtgacccccagagcgtgcacctgcagcccctgggccgggccagcggccccctggacaccagccagacagccagcagtgacagtgaagatgtgagcagcagtgacaggaagatgagcaagagcgccctgaaccagaccaagaagaggaagaagagaagacacaggaccatcttcaccagctaccagctggaggagctggagaaggccttcaatgaggcccactacccagatgtgtatgcccgggagatgctggccatgaagacagagctgcctgaagatcgcatccaggtgtggttccagaacagaagagccaagtggaggaagcgggagaagtgctggggccgcagctctgtgatggccgagtatggcctgtatggagccatggtgcgccacagcatccccctgcctgagagcatcctgaagagcgccaaggatggcatcatggacagctgtgccccctggctgctgggcatgcacaagaagagcctggaggccgctgctgagagcggcaggaagccagagggggagcggcaggccctgcccaagctggacaagatggagcaggatgagcggggcccagatgcccaggccgccatcagccaggaggagctgagagaaaattccattgctgtgctgcgggccaaggcccaggagcacagcaccaaggtgctgggcaccgtgtctggccctgacagcctggcccggagcacagagaagccagaggaggaggaggccatggatgaagatagacctgctgagcggctgagccccccccagctggaggacatggcctag

SEQ ID NO: 257095 - DNA, 1086 bp, Artificial Sequence
  derived and/or modified sequence
atgaccggcaaggccggcgaggccctgagcaagcccaagagcgagaccgttgccaagtccacatccggaggagcgcccgccagatgcaccggctttggtatacaggaaatcctcggactgaataaagagccaccaagttctcacccgagggctgctctcgatggactggccccaggacacctgctcgccgccagatcggttctaagcccggcgggtgtaggaggaatgggacttctcggcccgggtggattacctggattttacacccaaccaacctttcttgaggtattgtccgacccccaatccgtgcatctacagccactgggaagagctagtggccctctggacaccagtcagactgcgtcatctgacagcgaagacgtgtcaagcagcgatcggaagatgagtaaaagcgcactgaaccagaccaaaaaaaggaaaaaacgccggcaccggacgatctttacttcctaccagcttgaagagctcgagaaggcttttaacgaggcccactatcccgatgtatatgctagagagatgttggctatgaagacagagctgcctgaagatcgaattcaggtttggttccagaatcggagggccaagtggagaaaaagggaaaagtgctggggcaggtctagtgtgatggccgagtacggattgtacggagctatggtgagacacagcattcctctgccagagtccatcctgaagtctgccaaggacggcattatggacagctgtgcgccatggttgctagggatgcacaaaaaatccctagaagcagccgcagaatcaggaaggaagccagaaggggaacggcaggcactgccgaaactggataagatggaacaggacgagagggggccagacgcacaggccgctataagccaggaggagctcagagagaacagtatagctgtgttacgtgctaaggcccaagaacactcaactaaggttctcggcactgtgtcaggaccggatagccttgcccgctccaccgagaagcccgaggaggaagaggccatggacgaagaccggccagccgagcggctgtccccacctcaattggaggacatggcatag

SEQ ID NO: 257096 - DNA, 1086 bp, Artificial Sequence
  derived and/or modified sequence
atgacaggcaaggcaggagaggccctatccaagcctaaaagcgaaactgtcgcaaaaagtacctcaggtggggcacccgctaggtgtaccggcttcgggattcaggagattctcggactcaacaaagaacctccctcttctcaccccagggctgcactggacggtctggctccaggccatcttctggcagcaaggtctgtgctttctccggctggtgtaggaggaatggggttgcttggccctgggggattgccaggtttctacacccagcccacatttctggaagtcctgagcgatccccagtcagttcaccttcagccacttgggagagcttccggtcctctggacactagccagaccgcgtcgagtgatagtgaggacgtgagttccagtgacagaaagatgtccaagtcagctttgaaccagacaaagaaacgcaagaaaaggcggcaccgaaccatatttacatcctaccaactagaggaactggagaaggccttcaatgaagcccattatcctgacgtatacgcgcgtgagatgttagctatgaagactgagctacccgaggaccggatacaggtatggttccaaaatagaagagctaagtggagaaaacgtgaaaaatgttggggcagaagcagtgtgatggccgaatacgggctgtacggggctatggtacggcactccatcccattgcctgaaagtattctgaagtctgccaaagacggaatcatggactcttgcgctccatggctcctggggatgcacaagaaatccttggaagctgctgccgagtccgggaggaaaccagaaggggagcgacaagccctccctaagctcgataaaatggaacaggacgagcgagggccagacgcccaggcagccatcagccaggaggaattgagagaaaactcaatagcagtactgcgcgctaaggcacaagagcatagcactaaagtactcggtaccgtatctggaccagacagcttggcccgatccacggagaaacccgaggaggaagaggccatggatgaagatagacctgcggagaggttgtctccgcctcagcttgaagatatggcatag

SEQ ID NO: 257097 - DNA, 2995 bp, Artificial Sequence
  derived and/or modified sequence
cctgggaccaacttcgcgaagcgggaagcccggcgggggggtggggggagctaaagacctgcggcctcagcccctccaaagaacagggagatgacggggaaagcaggggaagcgctgagcaagcccaaatccgagacagtggccaagagtacctcggggggcgccccggccaggtgcactgggttcggcatccaggagatcctgggcttgaacaaggagcccccgagctcccacccgcgggcagcgctcgacggcctggcccccgggcacttgctggcggcgcgctcagtgctcagccccgcgggggtgggcggcatggggcttctggggcccggggggctccctggcttctacacgcagcccaccttcctggaagtgctgtccgacccgcagagcgtccacttgcagccattgggcagagcatcggggccgctggacaccagccagacggccagctcggattctgaagatgtttcctccagcgatcgaaaaatgtccaaatctgctttaaaccagaccaagaaacggaagaagcggcgacacaggacaatctttacctcctaccagctagaggagctggagaaggcattcaacgaagcccactacccagacgtctatgcccgggagatgctggccatgaaaacggagctgccggaagacaggatacaggtctggttccagaaccgtcgagccaagtggaggaagcgggagaagtgctggggccggagcagtgtcatggcggagtatgggctctacggggccatggtgcggcactccatccccctgcccgagtccatcctcaagtcagccaaggatggcatcatggactcctgtgccccgtggctactggggatgcacaaaaagtcgctggaggcagcagccgagtcggggaggaagcccgagggggaacgccaggccctgcccaagctcgacaagatggagcaggacgagcggggccccgacgctcaggcggccatctcccaggaggaactgagggagaacagcattgcggtgctccgggccaaagctcaggagcacagcaccaaagtgctggggactgtgtctgggccggacagcctggcccggagtaccgagaagccagaggaggaggaggccatggatgaagacaggccggcggagaggctcagtccaccgcagctggaggacatggcttaggtcaaggcgcgctcagatgccggagccccaagactctgctctcctcgggccctgtggtgctgggagatgctctctgaggcaaggcccagacctggcctctgccatcctccctgttccccacaggtcctccatcacccctggtggctgcaggcaccgctgggttctgactctggaccatgctgagacatccctcatctagtcttgacctctccagcatcccagcctcagaagccttcttgctgcccacaacgtcccctcaagccccttctctcaatccctttgcaacgctcactggttttggccaccccttgctctctgttctcttgctttaaagagtcctccttcccagctctacattctgctctgcccatgcctaaagcccattgctgcaaatgcattgtgaattgcctgccatggctgtgacacagacggaggactggaactgcaactccagcgtcctcagcaccccactcctcagtaaaagtcttctcccaactcagcctgttccttcctgcagacctggctgggcctgggcttccacagtgtgaagacactgtgcaggcccaggcaggcccagcctctgccccacccatcagtggagtccagatggcaggctacagttgggaagtctcagcctgggcccctcagccacccttggtctcatgccccgccatggtcaccctcaggaacccaccctctccacacccagcctgtcccactggctcctcccagcacaggcacctatgtggcatgtggtgatgtacgctgcgtgccatgagtccatgtcctatgcctcacaaatgctgtggttcactgcactgttcaggagtccaaaccttctaccctgggtcctcgggcccctgagcctgtgtcctgaagaatctcgactctcgtgatatgctgcttgtgaccttgacttgccatgaaggcacctgcccccacagctccttgcaaactatgagttcacatgtgccctgccttgaacaacccaatctggctggtaaatgacatctacgaagccacaggcctggcctcaactgagaagccaagcctggagtaggcctggggctatgcatacgcattaagggcctgctggagaaaccttcactccagacagacagggggctaaggggctagggctgagcacctctcagagcaagcctttgacctgttcagaaggatgggaaaaaggctggaaggaaagcaaggcagaaggccaggagtaagcccaagctaagctgcaggcacacacgccttcatgccagtgcatgccaggaagcacgttcactagactaaaacacggtaaccatgatggaataaggagctggggcttctttctgctggctgatgggtggacctgtgtatggtgacctctccggcctggccttttccattcgcatgaacaatgggagcacatagccctgttgacctgcccgatccagattcccaggccaggctcccgaccccatccacctatccaccaccccacccacctttgcagggaatacctcgttagagaatggcctgagacagtgcgttgcaactttttaattccatatcaaaagttgatttcttcttcattccatttatggaacttccctccccctagtccggttcttcttgtctttgtccctgttggtttgaagtgttagactatagcccctggtgtgtaaataatgtacatagagtgagaagaaagaaacttgatattgaggtgtttgaaatatggaactgtaataacttctaggtattcgaaacctgtgatttctgtgccattttctgtaaagatacaagtaagaataaaattgacttaaaaata

SEQ ID NO: 257098 - DNA, 1086 bp, Artificial Sequence
  derived and/or modified sequence
atgaccggcaaggccggcgaggccctgagcaagcccaagagcgagaccgtggccaagagcaccagcggcggcgcccccgccagatgcaccggcttcggcatccaggagatcctgggcctgaacaaggagccccccagcagccaccccagagccgccctggacggcctggcccccggccacctgctggccgccagaagcgtgctgagccccgccggcgtgggcggcatgggcctgctgggccccggcggcctgcccggcttctacacccagcccaccttcctggaggtgctgagcgacccccagagcgtgcacctgcagcccctgggcagagccagcggccccctggacaccagccagaccgccagcagcgacagcgaggacgtgagcagcagcgacagaaagatgagcaagagcgccctgaaccagaccaagaagagaaagaagagaagacacagaaccatcttcaccagctaccagctggaggagctggagaaggccttcaacgaggcccactaccccgacgtgtacgccagagagatgctggccatgaagaccgagctgcccgaggacagaatccaggtgtggttccagaacagaagagccaagtggagaaagagagagaagtgctggggcagaagcagcgtgatggccgagtacggcctgtacggcgccatggtgagacacagcatccccctgcccgagagcatcctgaagagcgccaaggacggcatcatggacagctgcgccccctggctgctgggcatgcacaagaagagcctggaggccgccgccgagagcggcagaaagcccgagggcgagagacaggccctgcccaagctggacaagatggagcaggacgagagaggccccgacgcccaggccgccatcagccaggaggagctgagagagaacagcatcgccgtgctgagagccaaggcccaggagcacagcaccaaggtgctgggcaccgtgagcggccccgacagcctggccagaagcaccgagaagcccgaggaggaggaggccatggacgaggacagacccgccgagagactgagccccccccagctggaggacatggcctag

SEQ ID NO: 257099 - protein, 870 aa, Artificial Sequence
  derived and/or modified sequence
MEGAGPRGAGPARRRGAGGPPSPLLPSLLLLLLLWMLPDTVAPQELNPRGRNVCRAPGSQVPTCCAGWRQQGDECGIAVCEGNSTCSENEVCVRPGECRCRHGYFGANCDTKCPRQFWGPDCKELCSCHPHGQCEDVTGQCTCHARRWGARCEHACQCQHGTCHPRSGACRCEPGWWGAQCASACYCSATSRCDPQTGACLCHAGWWGRSCNNQCACNSSPCEQQSGRCQCRERTFGARCDRYCQCFRGRCHPVDGTCACEPGYRGKYCREPCPAGFYGLGCRRRCGQCKGQQPCTVAEGRCLTCEPGWNGTKCDQPCATGFYGEGCSHRCPPCRDGHACNHVTGKCTRCNAGWIGDRCETKCSNGTYGEDCAFVCADCGSGHCDFQSGRCLCSPGVHGPHCNVTCPPGLHGADCAQACSCHEDTCDPVTGACHLETNQRKGVMGAGALLVLLVCLLLSLLGCCCACRGKDPTRRPRPRRELSLGRKKAPHRLCGRFSRISMKLPRIPLRRQKLPKVVVAHHDLDNTLNCSFLEPPSGLEQPSPSWSSRASFSSFDTTDEGPVYCVPHEEAPAESRDPEVPTVPAEAPAPSPVPLTTPASAEEAIPLPASSDSERSASSVEGPGGALYARVARREARPARARGEIGGLSLSPSPERRKPPPPDPATKPKVSWIHGKHSAAAAGRAPSPPPPGSEAAPSPSKRKRTPSDKSAHTVEHGSPRTRDPTPRPPGLPEEATALAAPSPPRARARAAPRPLGAHGRRRSPAKRAEAASMLAADVRGKTRSLGRAEVALGAQGPREKPAPPQKAKRSVPPASPARAPPATETPGPEKAATDLPAPETPRKKTPIQKPPRKKSREAAGELGRAGAPTL

SEQ ID NO: 257100 - protein, 864 aa, Artificial Sequence
  derived and/or modified sequence
MEGAGPRGAGPARRRGAGGPPSPLLPSLLLLLLLWMLPDTVAPQELNPRGRNVCRAPGSQVPTCCAGWRQQGDECGIAVCEGNSTCSENEVCVRPGECRCRHGYFGANCDTKCPRQFWGPDCKELCSCHPHGQCEDVTGQCTCHARRWGARCEHACQCQHGTCHPRSGACRCEPGWWGAQCASACYCSATSRCDPQTGACLCHAGWWGRSCNNQCACNSSPCEQQSGRCQCRERTFGARCDRYCQCFRGRCHPVDGTCACEPGYRGKYCREPCPAGFYGLGCRRRCGQCKGQQPCTVAEGRCLTCEPGWNGTKCDQPCATGFYGEGCSHRCPPCRDGHACNHVTGKCTRCNAGWIGDRCETKCSNGTYGEDCAFVCADCGSGHCDFQSGRCLCSPGVHGPHCNVTCPPGLHGADCAQACSCHEDTCDPVTGACHLETNQRKGVMGAGALLVLLVCLLLSLLGCCCACRGKDPTRRELSLGRKKAPHRLCGRFSRISMKLPRIPLRRQKLPKVVVAHHDLDNTLNCSFLEPPSGLEQPSPSWSSRASFSSFDTTDEGPVYCVPHEEAPAESRDPEVPTVPAEAPAPSPVPLTTPASAEEAIPLPASSDSERSASSVEGPGGALYARVARREARPARARGEIGGLSLSPSPERRKPPPPDPATKPKVSWIHGKHSAAAAGRAPSPPPPGSEAAPSPSKRKRTPSDKSAHTVEHGSPRTRDPTPRPPGLPEEATALAAPSPPRARARARPGLLEPTDAGGPPRSAPAASMLAADVRGKTRSLGRAEVALGAQGPREKPAPPQKAKRSVPPASPARAPPATETPGPEKAATDLPAPETPRKKTPIQKPPRKKSREAAGELGRAGAPTL

SEQ ID NO: 257101 - protein, 865 aa, Artificial Sequence
  derived and/or modified sequence
MEGAGPRGAGPARRRGAGGPPSPLLPSLLLLLLLWMLPDTVAPQELNPRGRNVCRAPGSQVPTCCAGWRQQGDECGIAVCEGNSTCSENEVCVRPGECRCRHGYFGANCDTKCPRQFWGPDCKELCSCHPHGQCEDVTGQCTCHARRWGARCEHACQCQHGTCHPRSGACRCEPGWWGAQCASACYCSATSRCDPQTGACLCHAGWWGRSCNNQCACNSSPCEQQSGRCQCRERTFGARCDRYCQCFRGRCHPVDGTCACEPGYRGKYCREPCPAGFYGLGCRRRCGQCKGQQPCTVAEGRCLTCEPGWNGTKCDQPCATGFYGEGCSHRCPPCRDGHACNHVTGKCTRCNAGWIGDRCETKCSNGTYGEDCAFVCADCGSGHCDFQSGRCLCSPGVHGPHCNVTCPPGLHGADCAQACSCHEDTCDPVTGACHLETNQRKGVMGAGALLVLLVCLLLSLLGCCCACRGKDPTRRELSLGRKKAPHRLCGRFSRISMKLPRIPLRRQKLPKVVVAHHDLDNTLNCSFLEPPSGLEQPSPSWSSRASFSSFDTTDEGPVYCVPHEEAPAESRDPEVPTVPAEAPAPSPVPLTTPASAEEAIPLPASSDSERSASSVEGPGGALYARVARREARPARARGEIGGLSLSPSPERRKPPPPDPATKPKVSWIHGKHSAAAAGRAPSPPPPGSEAAPSPSKRKRTPSDKSAHTVEHGSPRTRDPTPRPPGLPEEATALAAPSPPRARARAAPRPLGAHGRRRSPAKRAEAASMLAADVRGKTRSLGRAEVALGAQGPREKPAPPQKAKRSVPPASPARAPPATETPGPEKAATDLPAPETPRKKTPIQKPPRKKSREAAGELGRAGAPTL

SEQ ID NO: 257102 - DNA, 854 bp, Artificial Sequence
  derived and/or modified sequence
gggaaataagagagaaaagaagagtaagaagaaatataagagccaccatggtatccaagggggaggaggacaacatggcgatcatcaaggagttcatgcgattcaaggtgcacatggaaggttcggtcaacggacacgaatttgaaatcgaaggagagggtgaaggaaggccctatgaagggacacagaccgcgaaactcaaggtcacgaaagggggaccacttcctttcgcctgggacattctttcgccccagtttatgtacgggtccaaagcatatgtgaagcatcccgccgatattcctgactatctgaaactcagctttcccgagggattcaagtgggagcgggtcatgaactttgaggacgggggtgtagtcaccgtaacccaagactcaagcctccaagacggcgagttcatctacaaggtcaaactgcgggggactaactttccgtcggatgggccggtgatgcagaagaaaacgatgggatgggaagcgtcatcggagaggatgtacccagaagatggtgcattgaagggggagatcaagcagagactgaagttgaaagatgggggacattatgatgccgaggtgaaaacgacatacaaagcgaaaaagccggtgcagcttcccggagcgtataatgtgaatatcaagttggatattacttcacacaatgaggactacacaattgtcgaacagtacgaacgcgctgagggtagacactcgacgggaggcatggacgagttgtacaaatgataagctgccttctgcggggcttgccttctggccatgcccttcttctctcccttgcacctgtacctcttggtctttgaataaagcctgagtaggaag

SEQ ID NO: 257103 - DNA, 924 bp, Artificial Sequence
  derived and/or modified sequence
tcaagcttttggaccctcgtacagaagctaatacgactcactatagggaaataagagagaaaagaagagtaagaagaaatataagagccaccatggtatccaagggggaggaggacaacatggcgatcatcaaggagttcatgcgattcaaggtgcacatggaaggttcggtcaacggacacgaatttgaaatcgaaggagagggtgaaggaaggccctatgaagggacacagaccgcgaaactcaaggtcacgaaagggggaccacttcctttcgcctgggacattctttcgccccagtttatgtacgggtccaaagcatatgtgaagcatcccgccgatattcctgactatctgaaactcagctttcccgagggattcaagtgggagcgggtcatgaactttgaggacgggggtgtagtcaccgtaacccaagactcaagcctccaagacggcgagttcatctacaaggtcaaactgcgggggactaactttccgtcggatgggccggtgatgcagaagaaaacgatgggatgggaagcgtcatcggagaggatgtacccagaagatggtgcattgaagggggagatcaagcagagactgaagttgaaagatgggggacattatgatgccgaggtgaaaacgacatacaaagcgaaaaagccggtgcagcttcccggagcgtataatgtgaatatcaagttggatattacttcacacaatgaggactacacaattgtcgaacagtacgaacgcgctgagggtagacactcgacgggaggcatggacgagttgtacaaatgataagctgccttctgcggggcttgccttctggccatgcccttcttctctcccttgcacctgtacctcttggtctttgaataaagcctgagtaggaaggcggccgctcgagcatgcatctaga

SEQ ID NO: 257104 - DNA, 896 bp, Artificial Sequence
  derived and/or modified sequence
taatacgactcactatagggaaataagagagaaaagaagagtaagaagaaatataagagccaccatggtatccaagggggaggaggacaacatggcgatcatcaaggagttcatgcgattcaaggtgcacatggaaggttcggtcaacggacacgaatttgaaatcgaaggagagggtgaaggaaggccctatgaagggacacagaccgcgaaactcaaggtcacgaaagggggaccacttcctttcgcctgggacattctttcgccccagtttatgtacgggtccaaagcatatgtgaagcatcccgccgatattcctgactatctgaaactcagctttcccgagggattcaagtgggagcgggtcatgaactttgaggacgggggtgtagtcaccgtaacccaagactcaagcctccaagacggcgagttcatctacaaggtcaaactgcgggggactaactttccgtcggatgggccggtgatgcagaagaaaacgatgggatgggaagcgtcatcggagaggatgtacccagaagatggtgcattgaagggggagatcaagcagagactgaagttgaaagatgggggacattatgatgccgaggtgaaaacgacatacaaagcgaaaaagccggtgcagcttcccggagcgtataatgtgaatatcaagttggatattacttcacacaatgaggactacacaattgtcgaacagtacgaacgcgctgagggtagacactcgacgggaggcatggacgagttgtacaaatgataagctgccttctgcggggcttgccttctggccatgcccttcttctctcccttgcacctgtacctcttggtctttgaataaagcctgagtaggaaggcggccgctcgagcatgcatctaga

SEQ ID NO: 257105 - DNA, 928 bp, Artificial Sequence
  derived and/or modified sequence
taatacgactcactatagggaaataagagagaaaagaagagtaagaagaaatataagagccaccatggtatccaagggggaggaggacaacatggcgatcatcaaggagttcatgcgattcaaggtgcacatggaaggttcggtcaacggacacgaatttgaaatcgaaggagagggtgaaggaaggccctatgaagggacacagaccgcgaaactcaaggtcacgaaagggggaccacttcctttcgcctgggacattctttcgccccagtttatgtacgggtccaaagcatatgtgaagcatcccgccgatattcctgactatctgaaactcagctttcccgagggattcaagtgggagcgggtcatgaactttgaggacgggggtgtagtcaccgtaacccaagactcaagcctccaagacggcgagttcatctacaaggtcaaactgcgggggactaactttccgtcggatgggccggtgatgcagaagaaaacgatgggatgggaagcgtcatcggagaggatgtacccagaagatggtgcattgaagggggagatcaagcagagactgaagttgaaagatgggggacattatgatgccgaggtgaaaacgacatacaaagcgaaaaagccggtgcagcttcccggagcgtataatgtgaatatcaagttggatattacttcacacaatgaggactacacaattgtcgaacagtacgaacgcgctgagggtagacactcgacgggaggcatggacgagttgtacaaatgataataggattcgtcagtagggttgtaaaggtttttcttttcctgagaaaacaaccttttgttttctcaggttttgctttttggcctttccctagctttaaaaaaaaaaaagcaaaagtggtctttgaataaagtctgagtgggcggctctaga

SEQ ID NO: 257106 - DNA, 905 bp, Artificial Sequence
  derived and/or modified sequence
gggaaataagagagaaaagaagagtaagaagaaatataagagccaccatggtatccaagggggaggaggacaacatggcgatcatcaaggagttcatgcgattcaaggtgcacatggaaggttcggtcaacggacacgaatttgaaatcgaaggagagggtgaaggaaggccctatgaagggacacagaccgcgaaactcaaggtcacgaaagggggaccacttcctttcgcctgggacattctttcgccccagtttatgtacgggtccaaagcatatgtgaagcatcccgccgatattcctgactatctgaaactcagctttcccgagggattcaagtgggagcgggtcatgaactttgaggacgggggtgtagtcaccgtaacccaagactcaagcctccaagacggcgagttcatctacaaggtcaaactgcgggggactaactttccgtcggatgggccggtgatgcagaagaaaacgatgggatgggaagcgtcatcggagaggatgtacccagaagatggtgcattgaagggggagatcaagcagagactgaagttgaaagatgggggacattatgatgccgaggtgaaaacgacatacaaagcgaaaaagccggtgcagcttcccggagcgtataatgtgaatatcaagttggatattacttcacacaatgaggactacacaattgtcgaacagtacgaacgcgctgagggtagacactcgacgggaggcatggacgagttgtacaaatgataataggattcgtcagtagggttgtaaaggtttttcttttcctgagaaaacaaccttttgttttctcaggttttgctttttggcctttccctagctttaaaaaaaaaaaagcaaaagtggtctttgaataaagtctgagtgggcggc

SEQ ID NO: 257107 - DNA, 930 bp, Artificial Sequence
  derived and/or modified sequence
taatacgactcactatagggaaataagagagaaaagaagagtaagaagaaatataagagccaccatggtatccaagggggaggaggacaacatggcgatcatcaaggagttcatgcgattcaaggtgcacatggaaggttcggtcaacggacacgaatttgaaatcgaaggagagggtgaaggaaggccctatgaagggacacagaccgcgaaactcaaggtcacgaaagggggaccacttcctttcgcctgggacattctttcgccccagtttatgtacgggtccaaagcatatgtgaagcatcccgccgatattcctgactatctgaaactcagctttcccgagggattcaagtgggagcgggtcatgaactttgaggacgggggtgtagtcaccgtaacccaagactcaagcctccaagacggcgagttcatctacaaggtcaaactgcgggggactaactttccgtcggatgggccggtgatgcagaagaaaacgatgggatgggaagcgtcatcggagaggatgtacccagaagatggtgcattgaagggggagatcaagcagagactgaagttgaaagatgggggacattatgatgccgaggtgaaaacgacatacaaagcgaaaaagccggtgcagcttcccggagcgtataatgtgaatatcaagttggatattacttcacacaatgaggactacacaattgtcgaacagtacgaacgcgctgagggtagacactcgacgggaggcatggacgagttgtacaaatgataatagtgctcttcagtagggtcatgaaggtttttcttttcctgagaaaacaacacgtattgttttctcaggttttgctttttggcctttttctagcttaaaaaaaaaaaaagcaaaagtggtctttgaataaagtctgagtgggcggctctaga

SEQ ID NO: 257108 - DNA, 907 bp, Artificial Sequence
  derived and/or modified sequence
gggaaataagagagaaaagaagagtaagaagaaatataagagccaccatggtatccaagggggaggaggacaacatggcgatcatcaaggagttcatgcgattcaaggtgcacatggaaggttcggtcaacggacacgaatttgaaatcgaaggagagggtgaaggaaggccctatgaagggacacagaccgcgaaactcaaggtcacgaaagggggaccacttcctttcgcctgggacattctttcgccccagtttatgtacgggtccaaagcatatgtgaagcatcccgccgatattcctgactatctgaaactcagctttcccgagggattcaagtgggagcgggtcatgaactttgaggacgggggtgtagtcaccgtaacccaagactcaagcctccaagacggcgagttcatctacaaggtcaaactgcgggggactaactttccgtcggatgggccggtgatgcagaagaaaacgatgggatgggaagcgtcatcggagaggatgtacccagaagatggtgcattgaagggggagatcaagcagagactgaagttgaaagatgggggacattatgatgccgaggtgaaaacgacatacaaagcgaaaaagccggtgcagcttcccggagcgtataatgtgaatatcaagttggatattacttcacacaatgaggactacacaattgtcgaacagtacgaacgcgctgagggtagacactcgacgggaggcatggacgagttgtacaaatgataatagtgctcttcagtagggtcatgaaggtttttcttttcctgagaaaacaacacgtattgttttctcaggttttgctttttggcctttttctagcttaaaaaaaaaaaaagcaaaagtggtctttgaataaagtctgagtgggcggc

SEQ ID NO: 257109 - DNA, 2595 bp, Artificial Sequence
  derived and/or modified sequence
atggaaggggctggaccgcgaggggcgggcccagcccggagaaggggggccgggggacctccctccccactcctgccctcacttctgctcctattacttctatggatgctcccagacacagtggctccacaggagctgaacccccgaggacgcaatgtgtgccgggctccgggctcacaggtgccaacctgttgcgccggatggcggcagcagggtgatgagtgtgggatcgccgtgtgcgaagggaactctacctgttctgaaaacgaggtttgcgtgagacctggcgagtgccgctgcaggcacggatactttggcgctaactgtgacaccaagtgcccacggcagttctggggtcccgactgtaaggagttgtgctcctgccacccgcacggtcaatgcgaggatgtgactggccagtgtacgtgtcacgcccgaagatggggggcgcgttgtgagcatgcctgtcagtgtcagcacgggacttgccacccccggtcaggggcatgtaggtgtgagccgggttggtggggtgcccagtgtgcctcagcatgctactgctcggcaacttcccggtgcgacccccagacgggcgcctgcctgtgtcatgccggctggtggggcagatcctgtaataaccagtgcgcatgtaattccagtccatgtgagcagcaaagcggtcgatgtcagtgtcgcgaaagaacttttggagccaggtgcgatcgttattgccagtgctttcggggaaggtgtcaccctgtagacgggacctgcgcctgtgagccaggttacaggggtaagtactgccgcgaaccttgtccggcgggtttctacggcctggggtgccggcgcagatgcgggcagtgtaaaggacaacaaccttgtaccgtagcagagggtagatgcctcacatgcgagcctggctggaacgggaccaaatgtgaccaaccatgcgcaacaggtttctatggggagggttgctcacatcggtgtcctccctgccgggatggccacgcatgcaatcatgtgacaggaaagtgtacgcggtgcaatgccggatggatcggcgacaggtgtgagacaaaatgtagtaacggaacttacggggaagactgcgcctttgtttgtgctgactgtggaagcggtcattgtgatttccagtccggaagatgcctctgcagcccaggcgtgcatggccctcactgtaatgttacctgccccccggggctgcacggcgctgactgtgcgcaagcatgttcctgccacgaagacacgtgtgacccagtgaccggcgcatgtcacctggaaacaaatcagcggaaaggtgtgatgggtgccggagccctactggtacttctcgtatgcttgctcctgtcactgctcggttgctgttgcgcatgtagggggaaggacccgaccaggagagagctttctctcggcagaaagaaagccccacacagactttgcggaagattctcacgaatctctatgaaactgccgagaatacctctacggcggcagaagctgcccaaggtggtggtcgctcatcacgacctggataacactctgaactgttcattcctggagccgcccagcgggttggaacagcccagtccctcatggtcttcgcgggcttctttttcatcattcgacactactgacgaggggcccgtgtactgcgtccctcatgaagaagctcccgccgagtcgcgcgacccagaggtgcccacagtgcccgctgaagctccagccccgtctccagttccactgacgacacccgcgtctgctgaggaagcgattcctctgccagcctcttccgactctgaacgatccgcttcttcagtcgagggtcccggcggtgccctttatgcgcgcgttgctagaagggaggcacgcccggctagggctcggggggaaatcggaggactctctcttagtccaagcccggaaaggcggaagccaccgccgcccgaccccgccacaaagcctaaagttagctggatacatgggaaacactctgcagccgccgctgggcgtgcacccagcccaccccctcccggaagtgaggcagccccaagtccctctaaacggaagcgcacccccagcgataaatccgcgcacacggtggagcatgggagcccacggacacgggaccccacgcctcggccccctggtctcccagaggaggctacggccctggcagcgccaagcccccccagagcccgcgctcgtgcccggccaggactcctggaaccaacagatgcagggggacccccgaggtctgccccagcggcttctatgctggctgctgatgttcgaggcaagactaggtctcttggccgggcagaagtggccctgggcgcccagggacccagggagaagcccgcccccccacagaaagccaagagatctgtgccccctgctagcccagcccgtgctccgcctgctacggaaacccccggtccggaaaaagcagcaaccgacttgccagctcccgaaacgcctaggaaaaagactccaattcagaagccgcctaggaagaagagcagggaagcagcgggcgagcttggacgcgccggagctcccacattgtag

SEQ ID NO: 257110 - DNA, 2598 bp, Artificial Sequence
  derived and/or modified sequence
atggagggggccggcccccggggtgcgggtcccgcgagacgcagaggtgccggcgggcctccttcgcccctccttccatcattgttgttgctgcttttgctctggatgttacctgatacagtggctccccaggaactgaatccgaggggcagaaacgtctgtagagcccctggtagccaggtgccaacatgttgtgctgggtggcggcagcaaggcgacgaatgtgggatcgccgtctgtgaaggcaacagcacctgtagcgaaaacgaggtctgcgttagaccaggggagtgtaggtgccggcacggctacttcggtgcaaactgcgacactaagtgcccgcgtcagttctggggcccagattgtaaagagttgtgttcctgtcatccccatgggcagtgcgaagatgtaacagggcagtgcacatgtcatgcacgaaggtggggcgctagatgtgagcacgcgtgccagtgccagcacggaacatgtcatcccaggtccggagcttgtcggtgtgagccaggctggtggggcgctcagtgcgcaagcgcttgctattgcagtgctaccagtaggtgcgacccccagacaggagcctgtctgtgccacgctggctggtgggggcggagctgcaataatcagtgtgcatgtaacagctctccctgcgaacaacagagcggacggtgccagtgtcgtgagagaacgtttggcgcgcggtgtgacaggtattgtcagtgtttccggggacgatgtcacccggtggacggtacctgtgcatgtgaaccgggatatcgcggtaaatactgtcgggaaccctgtcctgcaggattctacggacttgggtgtagaaggcgctgcgggcaatgtaaggggcaacagccatgcaccgttgccgagggccgctgcctgacttgcgaacctgggtggaacggcactaaatgcgatcagccctgcgctactggcttctatggcgaggggtgcagtcatagatgtcccccctgtagagacggccatgcatgtaaccacgtcactggaaagtgtaccaggtgtaatgctggatggattggtgataggtgcgagaccaagtgtagcaatggcacatacggagaggattgtgccttcgtgtgtgctgactgcggatcaggacattgtgattttcagagtggccggtgtctgtgttctccaggagttcatggacctcattgcaacgtcacctgtcctcccgggctccacggagcagattgcgcccaggcatgttcttgccacgaagacacctgtgatccagtcactggtgcctgtcacctagagacgaaccaacgcaagggcgtgatgggagctggagcattgctagtcctgttggtttgtcttctgctgtcactgctcggatgttgctgtgcatgcagaggcaaagatccgaccaggagggaactcagtttggggagaaaaaaagctcctcataggctctgtgggaggttctcccgaatttccatgaagctgccccggattcctctgcggcgacagaaactcccaaaagtggtcgtggcgcatcacgatcttgacaacacactgaattgcagcttcctcgagcccccttcaggcctggaacagccttctccctcatggagctctagggcatccttctcttcttttgataccaccgatgagggccccgtgtactgcgtcccccatgaggaggcccccgccgagtcgagagaccccgaggtacccacggtgccagctgaagctccggctccctctcccgtgccgctgaccactccagctagcgccgaagaagccattcctttacctgctagctcagattcagaacgctcagcaagttccgtggagggccccgggggggccctttacgcccgtgtagccagacgtgaagcccgacccgcccgagcccgtggagagatcggaggtctcagcctgtccccaagcccagagcgacgcaagccacccccccctgatccagcaactaaacctaaagtgtcatggatccacggaaaacacagtgccgccgccgccggcagagcaccgtcacccccgcctcctggttccgaggccgctccctcaccttctaaaaggaagcgtacaccgtcagataaatctgcgcacaccgtcgagcacggctccccacggacaagggaccctaccccacggccgcctggcctgccggaggaagcaaccgctctggcagccccatcacctcctcgcgcgcgggcaagggcagcgcccagaccattaggtgcccatgggcggagacgatctcccgccaagcgcgccgaggcggctagcatgttggctgctgacgtgcggggtaagacgaggagtctcggacgggcagaggttgctttgggggcgcaggggccacgtgaaaaacccgctccacctcaaaaggcaaaaaggtccgttccaccagccagcccagctagggcccctcctgctacggagacacctggacccgaaaaagcagccacagatttaccagctccggaaactcctagaaagaaaacgcctatccagaagccaccgcggaagaaaagcagagaggccgcaggagaactggggcgcgccggcgccccaacgctttag

SEQ ID NO: 257111 - DNA, 2595 bp, Artificial Sequence
  derived and/or modified sequence
atggagggcgccggccccagaggagctggccctgcccggaggagaggagctgggggcccccccagccccctgctgcccagcctgctgctgctgctgctgctgtggatgctgcctgacacagtggccccccaggagctgaacccccggggcagaaatgtgtgccgggcccctggcagccaggtgcccacctgctgtgccggctggaggcagcagggagatgaatgtggcattgctgtgtgtgagggcaacagcacctgcagtgaaaatgaggtgtgtgtgcggcctggagaatgtcgctgccgccacggctactttggagccaactgtgacaccaagtgcccccggcagttctggggccctgactgcaaggagctgtgcagctgccacccccacggccagtgtgaagatgtgacaggccagtgcacctgccacgcccggcgctggggcgcccgctgtgagcacgcctgccagtgccagcacggcacctgccaccccaggtctggggcctgccgctgtgagcccggctggtggggcgcccagtgtgccagcgcctgctactgcagcgccaccagccgctgtgacccccagacaggagcctgcctgtgccacgccggctggtggggccgcagctgcaacaaccagtgtgcctgcaacagcagcccctgtgagcagcagagcggccgctgccagtgccgggagaggaccttcggggcccgctgtgaccgctactgccagtgcttccggggccgctgccaccctgtggatggcacctgtgcctgtgagcccggctaccggggcaagtactgccgggagccctgcccagctggcttctacggcctgggctgcagaagaagatgtggccagtgcaagggccagcagccctgcaccgtggccgagggccgctgcctgacctgtgagcccggctggaatggcaccaagtgtgaccagccctgtgccaccggcttctatggagagggctgcagccaccgctgccccccctgcagagatggccacgcctgcaaccacgtgacaggcaagtgcacccgctgcaatgccggctggattggagacagatgtgagaccaagtgcagcaatggcacctacggggaggactgtgcctttgtgtgtgccgactgtggcagcggccactgtgacttccagagcggccgctgcctgtgcagccctggggtgcacggcccccactgcaatgtgacctgccccccaggcctgcatggagctgactgtgcccaggcctgcagctgccacgaggacacctgtgaccctgtgactggagcctgccacctggagaccaaccagaggaaaggagtgatgggcgctggggccctgctggtgctgctggtgtgcctgctgctgagcctgctgggctgctgctgtgcctgccggggcaaggaccccacccggcgggagctgagcctgggcaggaagaaggccccccaccggctgtgtggccgcttcagccgcatctccatgaagctgccccgcatccccctgcggcggcagaagctgcccaaggtggtggtggcccaccacgacctggacaacaccctgaactgcagcttcctggagccccccagcggcctggagcagcccagccccagctggagcagccgggccagcttcagcagctttgacaccacagatgagggccctgtgtactgtgtgccccatgaggaggccccagctgagagccgggaccctgaggtgcccaccgtgcctgctgaggccccagcccccagccctgtgcccctgaccaccccagccagcgctgaggaggccatccccctgcctgccagcagtgacagcgagaggtctgccagctctgtggagggccctgggggcgccctgtatgcccgggtggcccggcgggaggcccggcctgcccgggcccggggggagatcggcggcctgagcctgagccccagccctgagaggaggaagcccccacctccagaccctgccaccaagcccaaggtgtcctggattcatggcaagcacagcgctgctgctgctggccgggcccccagccccccacctcctggcagcgaggccgcccccagccccagcaagaggaagaggacccccagcgacaagagcgcccacacagtggagcacggcagccccaggacccgggaccccacccccaggcctcctggcctgcctgaggaggccacagccctggccgcccccagccccccccgggcccgggcccgggcccggcccggcctgctggagcccacagatgctgggggcccccccaggtctgccccagctgcctccatgctggccgcagatgtgcggggcaagaccaggagcctgggccgggcagaggtggccctgggcgcccagggcccccgggagaagccagccccaccccagaaggccaagaggtctgtgcccccagccagccctgcccgggcccccccagccacagagaccccaggccctgagaaggccgccacagacctgcctgcccctgagacccccaggaagaagacccccatccagaagccacccaggaagaagagccgggaggccgccggggagctgggccgggccggggcccccaccctgtag

SEQ ID NO: 257112 - DNA, 2598 bp, Artificial Sequence
  derived and/or modified sequence
atggagggcgccggccccagaggagctggccctgcccggaggagaggagctgggggcccccccagccccctgctgcccagcctgctgctgctgctgctgctgtggatgctgcctgacacagtggccccccaggagctgaacccccggggcagaaatgtgtgccgggcccctggcagccaggtgcccacctgctgtgccggctggaggcagcagggagatgaatgtggcattgctgtgtgtgagggcaacagcacctgcagtgaaaatgaggtgtgtgtgcggcctggagaatgtcgctgccgccacggctactttggagccaactgtgacaccaagtgcccccggcagttctggggccctgactgcaaggagctgtgcagctgccacccccacggccagtgtgaagatgtgacaggccagtgcacctgccacgcccggcgctggggcgcccgctgtgagcacgcctgccagtgccagcacggcacctgccaccccaggtctggggcctgccgctgtgagcccggctggtggggcgcccagtgtgccagcgcctgctactgcagcgccaccagccgctgtgacccccagacaggagcctgcctgtgccacgccggctggtggggccgcagctgcaacaaccagtgtgcctgcaacagcagcccctgtgagcagcagagcggccgctgccagtgccgggagaggaccttcggggcccgctgtgaccgctactgccagtgcttccggggccgctgccaccctgtggatggcacctgtgcctgtgagcccggctaccggggcaagtactgccgggagccctgcccagctggcttctacggcctgggctgcagaagaagatgtggccagtgcaagggccagcagccctgcaccgtggccgagggccgctgcctgacctgtgagcccggctggaatggcaccaagtgtgaccagccctgtgccaccggcttctatggagagggctgcagccaccgctgccccccctgcagagatggccacgcctgcaaccacgtgacaggcaagtgcacccgctgcaatgccggctggattggagacagatgtgagaccaagtgcagcaatggcacctacggggaggactgtgcctttgtgtgtgccgactgtggcagcggccactgtgacttccagagcggccgctgcctgtgcagccctggggtgcacggcccccactgcaatgtgacctgccccccaggcctgcatggagctgactgtgcccaggcctgcagctgccacgaggacacctgtgaccctgtgactggagcctgccacctggagaccaaccagaggaaaggagtgatgggcgctggggccctgctggtgctgctggtgtgcctgctgctgagcctgctgggctgctgctgtgcctgccggggcaaggaccccacccggcgggagctgagcctgggcaggaagaaggccccccaccggctgtgtggccgcttcagccgcatctccatgaagctgccccgcatccccctgcggcggcagaagctgcccaaggtggtggtggcccaccacgacctggacaacaccctgaactgcagcttcctggagccccccagcggcctggagcagcccagccccagctggagcagccgggccagcttcagcagctttgacaccacagatgagggccctgtgtactgtgtgccccatgaggaggccccagctgagagccgggaccctgaggtgcccaccgtgcctgctgaggccccagcccccagccctgtgcccctgaccaccccagccagcgctgaggaggccatccccctgcctgccagcagtgacagcgagaggtctgccagctctgtggagggccctgggggcgccctgtatgcccgggtggcccggcgggaggcccggcctgcccgggcccggggggagatcggcggcctgagcctgagccccagccctgagaggaggaagcccccacctccagaccctgccaccaagcccaaggtgtcctggattcatggcaagcacagcgctgctgctgctggccgggcccccagccccccacctcctggcagcgaggccgcccccagccccagcaagaggaagaggacccccagcgacaagagcgcccacacagtggagcacggcagccccaggacccgggaccccacccccaggcctcctggcctgcctgaggaggccacagccctggccgcccccagccccccccgggcccgggcccgggccgccccccggcccctgggcgcccatggaagaagaagaagccctgccaagagagctgaggccgcctccatgctggccgcagatgtgcggggcaagaccaggagcctgggccgggcagaggtggccctgggcgcccagggcccccgggagaagccagccccaccccagaaggccaagaggtctgtgcccccagccagccctgcccgggcccccccagccacagagaccccaggccctgagaaggccgccacagacctgcctgcccctgagacccccaggaagaagacccccatccagaagccacccaggaagaagagccgggaggccgccggggagctgggccgggccggggcccccaccctgtag

SEQ ID NO: 257113 - DNA, 2595 bp, Artificial Sequence
  derived and/or modified sequence
atggagggcgccggcccccggggcgccggccccgcccggcggcggggagcaggaggacccccaagtcccctgctgccttccttgttactgttacttttgctgtggatgctgccagacacagtggcacctcaggaactcaacccaagagggcgcaacgtttgccgcgcccccggcagtcaagttcctacttgctgtgctgggtggcgtcagcagggggatgaatgtgggatcgcagtttgtgagggaaactccacctgctctgagaacgaggtctgtgtgcgccctggggagtgtaggtgcaggcacggttatttcggggccaattgtgacacaaaatgtcctagacagttctggggaccggactgcaaggaactctgcagctgtcatccacacggacagtgcgaggacgttaccggccagtgcacatgtcatgctcgtcgatggggcgcaaggtgtgagcacgcctgccagtgtcaacatggcacatgtcatcctaggtccggggcttgccgatgcgagcccggatggtggggcgctcagtgcgccagcgcttgttattgtagtgccacctcacgatgcgacccacagacaggggcctgcctatgtcatgctggttggtggggccgctcctgcaataaccagtgcgcctgtaactcgtcaccctgtgagcagcaatccggccgttgtcagtgtagagagcgcacctttggagccaggtgcgatcgatattgccagtgctttcgtggcaggtgccatccagtcgacggcacctgcgcgtgtgagccaggataccgcggaaaatactgtagagagccgtgcccagcaggcttttatggtttagggtgccgtcggcgctgtgggcaatgcaaaggccagcagccctgcaccgtggccgagggccggtgcctgacctgcgagcccgggtggaatggcactaagtgtgatcagccgtgcgcaacgggattctatggcgagggctgttcccaccggtgccccccttgtcgggatgggcacgcttgcaaccatgttacagggaagtgcacgagatgcaatgccggatggatcggggacagatgcgaaacgaagtgttcaaacggcacgtacggggaggactgcgcctttgtgtgcgctgattgcggaagcgggcattgcgatttccaaagtggccgatgcctctgttcacccggggtccacgggcctcattgtaacgtgacatgcccacctggattacatggagcagattgcgcacaagcctgcagttgccacgaggatacctgtgatcctgttaccggggcttgtcatctggagaccaatcaaaggaagggcgttatgggcgctggagctctgctggtgctactggtgtgcctgcttctgagtttgcttggctgctgctgcgcatgccgtgggaaagatccgacccggcgggagttatccctgggtcgaaaaaaggcaccccacagactgtgtggccgtttcagcaggatcagcatgaagttgccgagaatccccctgcggaggcagaaactgccaaaagtggtagttgcccatcatgacctggataatacacttaattgttcattcctggaacctccaagtggcttggagcaaccctcaccatcttggtcaagccgggctagtttttcctccttcgatacaaccgatgaaggacctgtctactgtgtacctcacgaggaagctccggccgaatctcgggaccccgaagtccccactgtgcctgctgaggctccagctccttcacccgttccccttacaactcccgccagcgcagaggaggcgattccactgcccgcatcaagtgactcagagcgcagcgctagctccgtcgaaggcccaggtggcgcactctacgctcgcgtcgcacgccgggaagcgcggccagctagagccaggggcgagatcgggggcttgtctcttagcccctcccccgaacgacgaaagccaccacctcccgacccggctactaagcccaaagtcagctggatccatggtaaacactctgctgctgctgccggccgtgcgccatctccaccaccgcctggaagcgaggcagccccctccccatccaagagaaagcgtacgccatcagacaagagtgcgcacacggtggagcatgggagcccaagaacccgcgaccccacgccgaggcctccagggttgcctgaggaagccactgccctggccgcgccgagtcctccacgcgcccgcgcccgtgcaaggccaggtctcctcgagcctactgatgctggggggccccccagaagtgcacctgcagcttcgatgttggcagccgacgtgcgcggtaaaacgcggagcctcggccgcgccgaggttgctttgggagcgcagggcccaagagagaagcccgcccctccccagaaggccaaacgctccgtccctccggcatcgcctgccagggctccacccgctactgaaacgcctgggcccgaaaaggcggccaccgaccttcccgccccagaaaccccaaggaagaaaacccctatacagaaaccccccagaaagaagtcccgggaggccgcgggagagttgggccgcgcaggtgcccctacattatag

SEQ ID NO: 257114 - DNA, 2598 bp, Artificial Sequence
  derived and/or modified sequence
atggagggcgccggcccccggggcgccggccccgcccggcggcggggagcaggagggccccccagccctctcctcccctcactcttgctgctgcttttgttgtggatgctgcccgatacagtcgctcctcaggagctgaatccccgtgggcgtaacgtttgtcgggctcctgggtctcaggttcccacctgttgcgctggatggcggcagcagggcgatgagtgtggtatagctgtgtgcgagggaaattctacatgctccgagaacgaagtgtgcgtgagacccggggagtgcagatgcagacacggatacttcggggccaactgcgacacgaagtgcccacgtcagttttggggcccagattgtaaggagctctgctcatgtcatccgcatgggcagtgcgaggatgtaactggtcagtgtacctgccacgccaggcgctggggggccaggtgcgaacacgcctgtcagtgccaacacggcacatgtcacccacggagcggagcttgcaggtgcgagccaggatggtggggggcacagtgtgctagcgcatgctattgctccgccacttcgcgctgtgatccgcagacgggcgcttgcttgtgccatgcaggctggtggggtaggtcttgtaacaaccagtgcgcttgcaactctagtccttgtgaacagcagagcggtagatgtcagtgtagggaacgtaccttcggggcaagatgtgaccgttattgccagtgcttccggggaagatgccacccagtggacgggacttgtgcctgcgagcccggataccgaggcaagtactgccgagaaccttgtccagctggattctacggcttaggttgtcggcggcgttgcgggcaatgcaaagggcaacagccgtgtacagtggctgagggccgctgtctaacctgcgagcccggatggaatggcaccaagtgtgaccagccctgcgctaccggattctacggcgagggctgttcccacagatgtcccccttgcagggacgggcatgcatgcaatcacgttacaggcaagtgcacaaggtgcaatgccggttggattggtgacaggtgtgagaccaagtgctccaatggcacatacggagaagactgcgcattcgtgtgcgcggattgtgggtctggtcactgcgacttccagagcggaagatgtctctgttcccccggagtccacggacctcattgtaacgtcacatgcccccccggtttacacggcgccgattgtgctcaggcctgcagctgccacgaagatacctgcgacccggtaacgggtgcgtgtcaccttgaaacaaaccaacggaagggggtcatgggagcaggggcactcctggtacttttggtgtgtctcctgttgagcttgcttggatgctgttgcgcttgccgaggaaaggatccaactagaagagagctgagcttgggtcgcaaaaaagccccccatcgactgtgtggccggtttagccgcattagcatgaagctaccccgcatcccattgcgcaggcagaaattaccaaaagtggtcgtggctcaccatgatcttgacaacacacttaattgctcttttctggagcccccatctgggctcgaacagccttccccctcctggagctctagggccagcttcagcagcttcgatacaactgacgaggggccagtgtactgcgtgccgcacgaggaggccccagccgagtctcgagatcctgaagtacccacagtgcctgcggaagctcctgctccctcacccgtgcctctgaccactcccgcaagtgcggaagaggccattcctctccctgctagtagcgactccgagagaagcgcatctagcgtcgagggacccggaggagctttgtacgcccgagtggcaaggagagaggcaaggccggctcgcgcaagaggagagattgggggcctgagcctgagtccctcccctgagagacggaaaccccctcccccagacccagcgacgaaaccaaaagtctcatggatccacgggaagcactcggcagctgctgctggccgtgccccatcgccaccacctcccggttcagaagccgcacctagcccatctaaacgtaaacggacaccttctgataagtcggctcacaccgtggaacacggaagccctaggactcgcgaccctactccacgtccaccaggactccccgaagaggctactgcactagctgcacctagcccaccccgcgctcgcgccagagcagcgccccggcctctgggcgctcacgggcgccgaaggtctcctgccaagagggcagaagccgcctccatgctcgctgctgacgtgagaggcaagaccaggagccttggacgtgcagaggtggcactgggcgcacaggggcctcgggaaaagcctgcacctccccagaaggccaaacgctccgtgcctcccgcctcccctgcgcgtgcccctccagccaccgagacccctggccccgagaaggctgccaccgacttacctgccccagaaacaccccggaaaaagacgccgatccaaaaacccccacgcaaaaagagtagagaggcagctggggagctcggtagggcaggcgcccctaccttgtag

SEQ ID NO: 257115 - DNA, 672 bp, Artificial Sequence
  derived and/or modified sequence
atgtggatctgcccaggcggcggcggcggcggcggaggaggaggcgaccgagaagatgcccgccctccgctctgctgtgggcgctgctggcgctctggctgtgctgcgcggcccccgcgcatggtgagtatcgggctgaggggcgctgtccgcggcgcccggggctgccacctggggcgacccttctccccctcggtccttctctgtgtgggaaggccaggctcggccgccggcgcggagcgaggccactcgctgggttcccaagagtttggacatcgccgggggcccctcccgtggtgccccgccaaccgccggggttccccgccgtctgctccccgcggcccgggaccccttacacgcctcctcggcaggagggaggccggcagcaagtctcagaaactcctttttcgtagtgccagggtgcagggaggtgggcagttttgcccttcaggttccgcgtttcttggggtcgagcgagagccgacggcgggcctcggaggggctgagcgaaggaatgccagattctggcgtggagagcgggggcagggccgccaagccaaacggcctgcaccgtcgcagccagcctcgcctttgccagggggcggcacatgggccgggtgtgtgggcttggtttggatggggacggggttttgcggcgcgcctgagttttga

SEQ ID NO: 257116 - DNA, 2595 bp, Artificial Sequence
  derived and/or modified sequence
atggaaggcgctggtcctcgcggagctggcccagccagacgtagaggcgcaggcggtcctccaagccccctgttgccgagtctgttactcctgctcctgttgtggatgttgccagacacagtggcaccccaagagctcaacccacgcggacgaaacgtgtgcagggctcctggatctcaagttcctacatgctgtgcagggtggagacagcaaggtgacgagtgcggaattgcagtttgcgagggtaatagcacctgtagtgagaatgaagtgtgcgtcaggcctggagagtgccgctgccggcacggttatttcggtgctaactgcgataccaagtgcccgagacagttctggggccctgactgcaaagaattgtgctcatgccacccacacggccagtgtgaggacgttacagggcagtgtacgtgccacgcacggcgatggggcgcaaggtgtgagcacgcttgccagtgccagcacggtacttgccacccaagaagcggcgcttgtcggtgtgagccagggtggtggggtgcccagtgtgcatccgcatgttactgctccgccacctcgaggtgtgatcctcagacaggcgcatgtctgtgtcatgcgggttggtggggtcggtcatgtaacaaccagtgcgcctgtaatagttctccgtgtgagcagcaaagtggcaggtgccagtgtcgcgagcgaacatttggtgccagatgtgataggtattgtcaatgcttcagagggagatgccaccccgtagatgggacctgcgcgtgtgagcccggatacaggggtaaatactgtcgcgagccatgtcctgcgggattttacggtttggggtgtcgcagacgctgcggacagtgcaaaggccagcagccttgcacagttgccgagggcaggtgtctcacatgcgagcctggatggaatggcaccaagtgcgatcagccctgcgcgaccggattctacggcgaggggtgcagccatcggtgtcccccatgtagggatggacatgcatgcaaccatgtaaccggaaaatgcacccggtgcaatgccggatggatcggagaccgctgtgagaccaagtgctcaaatggaacttacggggaggattgcgcctttgtctgtgcggactgtgggagcggccattgcgacttccaatctgggcgatgtctgtgttccccaggggtgcatggtcctcactgcaacgtgacgtgccctcccggtttgcacggagctgattgtgcacaagcatgctcctgtcacgaggacacatgcgacccagttactggcgcttgtcacctcgaaacaaatcagagaaaaggggtcatgggggctggcgctttgctcgtgctgctggtctgcttactcttatcgctgctcggctgctgttgtgcctgcagggggaaagatcctacccggcgagagctcagcctgggccgaaagaaggctcctcatcggctttgtggccgattttccagaatctcaatgaagcttcctagaatcccacttcggagacagaaacttcctaaggtcgtcgttgctcatcacgatcttgacaacaccttgaactgctcatttctcgagcctccgtcaggcctggagcagccttcccctagttggagctctcgggcaagtttcagctcttttgacacaacagatgaggggccagtctattgcgtacctcacgaggaagccccagccgaaagtagggaccctgaggtgcctacagtgcctgctgaagccccagcgcctagtccagtgccactgacaacaccagccagcgccgaggaagctattcctctgcccgcaagttctgatagcgagagaagcgcatcgagtgtcgagggacctggcggagctttatatgcacgggtggctagaagagaagcacgacccgctagagcacgaggcgaaatcggaggtctatccctctccccaagtcccgaacggaggaagccccctcccccagacccagcaacaaaacccaaggtgagctggattcacggaaagcatagcgccgcagcagctgggcgagctccatcccccccacctccgggaagcgaagcagccccaagtcccagcaaacgcaaaaggactccctccgataagtcagcacacacggtggagcacggttccccaaggacgcgtgatcccaccccacgaccaccgggtcttccagaggaggctacagccttagccgcacccagcccaccacgtgccagggcccgtgctagacctggcctgctggagccaactgatgctggcggaccgccaagatcagctccggctgcatccatgctcgctgcagacgttcgcggtaagactcggagcctgggcagagccgaagtagcattgggtgcccagggaccccgagagaagcccgcaccccctcagaaagctaaacgctcagtcccacccgctagtccagctcgtgctccacctgcaaccgaaacacctggtccggagaaagctgccacagatctgcccgctccagagacaccgcgtaaaaaaacgcccatacagaaaccccctaggaagaagagtagagaggccgcaggagaattaggaagggccggtgcacctacactgtag

SEQ ID NO: 257117 - DNA, 2598 bp, Artificial Sequence
  derived and/or modified sequence
atggagggcgcaggacctaggggtgcgggaccagcacgccgtcggggagcaggcggaccgccatctccgctgctgccatcacttctactgcttctcctgctgtggatgctccccgacaccgttgcccctcaagaattaaaccccagaggcagaaatgtgtgcagggcgcctggaagccaagtccccacttgctgcgctggctggaggcaacagggtgatgagtgcggcatcgctgtctgcgagggcaactcaacctgctctgaaaatgaggtctgtgtacgcccaggggaatgccggtgtcggcacgggtatttcggggcaaactgcgataccaaatgcccacgccagttttggggcccagactgcaaggagctgtgctcatgccacccccacggacagtgcgaagacgtgaccgggcaatgcacctgtcacgcccgtaggtggggagccaggtgtgaacatgcttgccagtgccaacacggaacttgccacccaaggtccggggcatgcaggtgtgaacccggatggtggggcgcacagtgtgcatcagcctgttattgcagcgccacaagccgctgtgatccacaaacaggagcatgtttgtgtcacgcagggtggtggggcagaagctgcaataatcaatgcgcctgtaattctagcccctgcgagcaacagtcaggacgctgccaatgccgggaacgtacctttggtgccagatgtgatagatattgtcagtgcttccgaggccgatgtcatccagtggatggcacttgtgcgtgcgagccgggttaccgcggtaaatattgtagagagccttgtcctgccggattttacggcctcggctgcagacgtagatgtggccaatgcaaagggcagcagccatgtaccgtggctgaagggcgttgtctgacttgcgaacccggatggaacggcaccaagtgcgatcagccatgtgccacaggtttttatggagaaggctgtagtcacagatgcccaccgtgccgcgatggacatgcatgtaatcacgttacagggaagtgtacccggtgtaatgcgggatggatcggcgaccggtgtgagacaaaatgctctaatgggacatacggagaggattgcgcttttgtgtgtgccgactgtggatcgggccattgcgattttcagagtgggcgttgtctgtgtagccccggtgttcacgggccacactgcaatgtgacctgtccccctggcctccacggggctgattgcgcgcaggcatgttcatgccatgaagatacttgcgatcccgtgactggcgcttgtcatctagaaactaaccagcgtaaaggcgttatgggggctggagcactgctggtcctgctggtttgcttgcttcttagcttgcttggctgctgctgcgcctgccgcggaaaggaccctacacgacgagagcttagcctgggtcggaagaaggcaccccataggctgtgtgggcgtttctcccggatttctatgaaattaccccgaatccctcttcggaggcaaaaattgccaaaagtcgttgtggcacaccacgacttggataacaccctcaactgttcttttctggagcccccatccggcctggagcaaccttccccatcctggtccagcagggcttctttctcgtcctttgacaccaccgatgaaggtcccgtgtactgcgttccacacgaggaagccccagccgaaagccgcgaccctgaggtgcctacagtgcctgccgaagcccctgctccctcacccgtgccgctgaccacccccgctagcgccgaggaagcaattcccctgccggcaagcagtgacagcgagcgatccgcttccagcgttgaaggaccagggggagccctgtacgccagagtcgcccgacgggaagctcggcctgctcgggctcgtggcgaaatcgggggtttgtccctctcaccaagtcctgagcggaggaagccgcctccccctgatcctgccaccaaaccaaaagtctcttggatccatggaaagcattccgctgcagctgccggtcgcgctcccagtcccccacccccaggctcagaggctgccccttcccctagcaaacggaagcggacgccgagtgataaatcggctcatacagtcgagcatggatcccctcggacccgagatcccactccgcgaccaccagggttgcctgaggaagccacagccctggccgctcctagccccccacgggcacgcgcacgagccgctccgaggccacttggagctcacggccgtcgtcgtagccctgccaagagggctgaagccgcttctatgctggcagccgacgtaaggggaaagacacggtctctcgggagagctgaggtggcgctcggggcacaaggtccccgagagaagcccgcaccccctcagaaggcgaaaaggtccgtgcctcctgctagcccagcccgtgcaccaccagccaccgaaacaccaggaccagagaaggcagccaccgacctcccagctcccgagactcctcgaaaaaagacccctattcagaagccaccacgtaagaagtcgcgcgaggccgctggcgagctcggaagagccggtgctccaacgctatag

SEQ ID NO: 257118 - DNA, 3456 bp, Artificial Sequence
  derived and/or modified sequence
actccgcttccggccgctctcgctgcggccgcacccgcgcccgtgcccgccccgcgcctgccccgcgcctcatggagggcgcagggccccggggggccgggccggcgcggcgccggggagccggggggccgccgtcaccgctgctgccgtcgctgctgctgctgctgctgctctggatgctgccggacaccgtggcgcctcaggaactgaaccctcgcggccgcaacgtgtgccgtgctcccggctcccaggtgcccacgtgctgcgctggctggaggcagcaaggggacgagtgtgggattgcggtgtgcgaaggcaactccacgtgctcagagaacgaggtgtgcgtgaggcctggcgagtgccgctgccgccacggctacttcggtgccaactgcgacaccaagtgcccgcgccagttctggggccccgactgcaaggagctgtgtagctgccacccacacgggcagtgcgaggacgtgacaggccagtgtacttgtcacgcgcggcgctggggcgcgcgctgcgagcatgcgtgccagtgccagcacggcacgtgccacccgcggagcggcgcgtgccgctgtgagcccggctggtggggcgcgcagtgcgccagcgcgtgctactgcagcgccacgtcgcgctgcgacccacagaccggcgcctgcctgtgccacgcaggctggtggggccgcagctgcaacaaccagtgcgcctgcaactcgtctccctgcgagcagcagagcggccgctgtcagtgccgcgagcgtacgttcggcgcgcgctgcgatcgctactgccagtgcttccgcggccgctgccaccctgtggacggcacgtgtgcctgcgagccgggctaccgcggcaagtactgtcgcgagccgtgccccgccggcttctacggcttgggctgtcgccgccggtgtggccagtgcaagggccagcagccgtgcacggtggccgagggccgctgcttgacgtgcgagcccggctggaacggaaccaagtgcgaccagccttgcgccaccggtttctatggcgagggctgcagccaccgctgtccgccatgccgcgacgggcatgcctgtaaccatgtcaccggcaagtgtacgcgctgcaacgcgggctggatcggcgaccggtgcgagaccaagtgtagcaatggcacttacggcgaggactgcgccttcgtgtgcgccgactgcggcagcggacactgcgacttccagtcggggcgctgcctgtgcagccctggcgtccacgggccccactgtaacgtgacgtgcccgcccggactccacggcgcggactgtgctcaggcctgcagctgccacgaggacacgtgcgacccggtcactggtgcctgccacctagaaaccaaccagcgcaagggcgtgatgggcgcgggcgcgctgctcgtcctgctcgtctgcctgctgctctcgctgctcggctgctgctgcgcttgccgcggcaaggaccctacgcgccgggagctttcgcttgggaggaagaaggcgccgcaccgactatgcgggcgcttcagtcgcatcagcatgaagctgccccggatcccgctccggaggcagaaactacccaaagtcgtagtggcccaccacgacctggataacacactcaactgcagcttcctggagccaccctcagggctggagcagccctcaccatcctggtcctctcgggcctccttctcctcgtttgacaccactgatgaaggccctgtgtactgtgtaccccatgaggaggcaccagcggagagccgggaccccgaagtccccactgtccctgccgaggcgccggcgccgtcccctgtgcccttgaccacgccagcctccgccgaggaggcgatacccctccccgcgtcctccgacagcgagcggtcggcgtccagcgtggaggggcccggaggggctctgtacgcgcgcgtggcccgacgcgaggcccggccggcccgggcccggggcgagattgggggcctgtcgctgtcgccatcgcccgagcgcaggaaaccgccgccacctgaccccgccaccaagcctaaggtgtcctggatccacggcaagcacagcgccgctgcagctggccgtgcgccctcaccaccgccgccaggctccgaggccgcgcccagccccagcaagaggaaacggacgcccagcgacaaatcggcgcatacggtcgaacacggcagcccccggacccgcgacccaacgccgcgccccccggggctgcccgaggaggcgacagccctcgctgcgccctcgccgcccagggcccgagcgcgcgcccgccccggcctcttggagcccacggacgccggcggtcccccgcgaagcgcgccggctgcctccatgttggccgctgacgtgcgcggcaagactcgcagcctgggccgcgccgaggtggccctgggcgcgcagggccccagggaaaagccggcgcccccacagaaagccaagcgctccgtgccgccagcctcgcccgcccgcgcgcccccagcgaccgaaaccccggggcctgagaaggcggcgaccgacttgcccgcgcctgagaccccccggaagaagacccccatccagaagccgccgcgcaagaagagccgggaggcggcgggcgagctgggcagggcgggcgcacccaccctgtagcaggctgtggctcgtccgcgcgcagctccctcagcttcgcagcgccgcccgccaccccacacctcccacgctaccgggcacgggcggcctcctattggccgggcaccgcgcggctagcggaggttgcgtctcattggctcaggtcctgcagccgctcctggattggagcagtgtgctctggcgggaagggcccatcccgttggtcgaggcctgacaggcgcttagcgggcgactccctccccattggccgagttatggagcgctccgaccagacagcgtctcattggccaaagatgggagggttccgcttaaagaccgcctcttactggccaggagtggacttggttagggctaccttctcattggttgcagccagaggcacttctgcccgggctgcctctcccccgctagggcctggtgcctctggctggaggctccctcccttggccgtcccaatagagcccggggctacttccactggccaggctcccgggcatctggttgaccccagcctggggaggagggctggtctccgctcctcaggggcttagtccgtcccaccccttcccttccctggcgccccgggcccaggcccctcagctgtcagctggttttgatggcctcccactgccccacacgccgcgggacctccaggggcgactctagtggcctgaggagatgtatttataggcccccagcagggctgctcccccctcggccggtgccccaggatgggctcctcccggcgggggcttggccaaagctttcttaataaaatgcctttcccctc

SEQ ID NO: 257119 - DNA, 3460 bp, Artificial Sequence
  derived and/or modified sequence
actccgcttccggccgctctcgctgcggccgcacccgcgcccgtgcccgccccgcgcctgccccgcgcctcatggagggcgcagggccccggggggccgggccggcgcggcgccggggagccggggggccgccgtcaccgctgctgccgtcgctgctgctgctgctgctgctctggatgctgccggacaccgtggcgcctcaggaactgaaccctcgcggccgcaacgtgtgccgtgctcccggctcccaggtgcccacgtgctgcgctggctggaggcagcaaggggacgagtgtgggattgcggtgtgcgaaggcaactccacgtgctcagagaacgaggtgtgcgtgaggcctggcgagtgccgctgccgccacggctacttcggtgccaactgcgacaccaagtgcccgcgccagttctggggccccgactgcaaggagctgtgtagctgccacccacacgggcagtgcgaggacgtgacaggccagtgtacttgtcacgcgcggcgctggggcgcgcgctgcgagcatgcgtgccagtgccagcacggcacgtgccacccgcggagcggcgcgtgccgctgtgagcccggctggtggggcgcgcagtgcgccagcgcgtgctactgcagcgccacgtcgcgctgcgacccacagaccggcgcctgcctgtgccacgcaggctggtggggccgcagctgcaacaaccagtgcgcctgcaactcgtctccctgcgagcagcagagcggccgctgtcagtgccgcgagcgtacgttcggcgcgcgctgcgatcgctactgccagtgcttccgcggccgctgccaccctgtggacggcacgtgtgcctgcgagccgggctaccgcggcaagtactgtcgcgagccgtgccccgccggcttctacggcttgggctgtcgccgccggtgtggccagtgcaagggccagcagccgtgcacggtggccgagggccgctgcttgacgtgcgagcccggctggaacggaaccaagtgcgaccagccttgcgccaccggtttctatggcgagggctgcagccaccgctgtccgccatgccgcgacgggcatgcctgtaaccatgtcaccggcaagtgtacgcgctgcaacgcgggctggatcggcgaccggtgcgagaccaagtgtagcaatggcacttacggcgaggactgcgccttcgtgtgcgccgactgcggcagcggacactgcgacttccagtcggggcgctgcctgtgcagccctggcgtccacgggccccactgtaacgtgacgtgcccgcccggactccacggcgcggactgtgctcaggcctgcagctgccacgaggacacgtgcgacccggtcactggtgcctgccacctagaaaccaaccagcgcaagggcgtgatgggcgcgggcgcgctgctcgtcctgctcgtctgcctgctgctctcgctgctcggctgctgctgcgcttgccgcggcaaggaccctacgcgccgggagctttcgcttgggaggaagaaggcgccgcaccgactatgcgggcgcttcagtcgcatcagcatgaagctgccccggatcccgctccggaggcagaaactacccaaagtcgtagtggcccaccacgacctggataacacactcaactgcagcttcctggagccaccctcagggctggagcagccctcaccatcctggtcctctcgggcctccttctcctcgtttgacaccactgatgaaggccctgtgtactgtgtaccccatgaggaggcaccagcggagagccgggaccccgaagtccccactgtccctgccgaggcgccggcgccgtcccctgtgcccttgaccacgccagcctccgccgaggaggcgatacccctccccgcgtcctccgacagcgagcggtcggcgtccagcgtggaggggcccggaggggctctgtacgcgcgcgtggcccgacgcgaggcccggccggcccgggcccggggcgagattgggggcctgtcgctgtcgccatcgcccgagcgcaggaaaccgccgccacctgaccccgccaccaagcctaaggtgtcctggatccacggcaagcacagcgccgctgcagctggccgtgcgccctcaccaccgccgccaggctccgaggccgcgcccagccccagcaagaggaaacggacgcccagcgacaaatcggcgcatacggtcgaacacggcagcccccggacccgcgacccaacgccgcgccccccggggctgcccgaggaggcgacagccctcgctgcgccctcgccgcccagggcccgagcgcgcgccgcgccccggcctcttggagcccacggacgccggcggtcccccgcgaagcgcgccgaggctgcctccatgttggccgctgacgtgcgcggcaagactcgcagcctgggccgcgccgaggtggccctgggcgcgcagggccccagggaaaagccggcgcccccacagaaagccaagcgctccgtgccgccagcctcgcccgcccgcgcgcccccagcgaccgaaaccccggggcctgagaaggcggcgaccgacttgcccgcgcctgagaccccccggaagaagacccccatccagaagccgccgcgcaagaagagccgggaggcggcgggcgagctgggcagggcgggcgcacccaccctgtagcaggctgtggctcgtccgcgcgcagctccctcagcttcgcagcgccgcccgccaccccacacctcccacgctaccgggcacgggcggcctcctattggccgggcaccgcgcggctagcggaggttgcgtctcattggctcaggtcctgcagccgctcctggattggagcagtgtgctctggcgggaagggcccatcccgttggtcgaggcctgacaggcgcttagcgggcgactccctccccattggccgagttatggagcgctccgaccagacagcgtctcattggccaaagatgggagggttccgcttaaagaccgcctcttactggccaggagtggacttggttagggctaccttctcattggttgcagccagaggcacttctgcccgggctgcctctcccccgctagggcctggtgcctctggctggaggctccctcccttggccgtcccaatagagcccggggctacttccactggccaggctcccgggcatctggttgaccccagcctggggaggagggctggtctccgctcctcaggggcttagtccgtcccaccccttcccttccctggcgccccgggcccaggcccctcagctgtcagctggttttgatggcctcccactgccccacacgccgcgggacctccaggggcgactctagtggcctgaggagatgtatttataggcccccagcagggctgctcccccctcggccggtgccccaggatgggctcctcccggcgggggcttggccaaagctttcttaataaaatgcctttcccctca

SEQ ID NO: 257120 - DNA, 2595 bp, Artificial Sequence
  derived and/or modified sequence
atggagggcgccggccccagaggcgccggccccgccagaagaagaggcgccggcggcccccccagccccctgctgcccagcctgctgctgctgctgctgctgtggatgctgcccgacaccgtggccccccaggagctgaaccccagaggcagaaacgtgtgcagagcccccggcagccaggtgcccacctgctgcgccggctggagacagcagggcgacgagtgcggcatcgccgtgtgcgagggcaacagcacctgcagcgagaacgaggtgtgcgtgagacccggcgagtgcagatgcagacacggctacttcggcgccaactgcgacaccaagtgccccagacagttctggggccccgactgcaaggagctgtgcagctgccacccccacggccagtgcgaggacgtgaccggccagtgcacctgccacgccagaagatggggcgccagatgcgagcacgcctgccagtgccagcacggcacctgccaccccagaagcggcgcctgcagatgcgagcccggctggtggggcgcccagtgcgccagcgcctgctactgcagcgccaccagcagatgcgacccccagaccggcgcctgcctgtgccacgccggctggtggggcagaagctgcaacaaccagtgcgcctgcaacagcagcccctgcgagcagcagagcggcagatgccagtgcagagagagaaccttcggcgccagatgcgacagatactgccagtgcttcagaggcagatgccaccccgtggacggcacctgcgcctgcgagcccggctacagaggcaagtactgcagagagccctgccccgccggcttctacggcctgggctgcagaagaagatgcggccagtgcaagggccagcagccctgcaccgtggccgagggcagatgcctgacctgcgagcccggctggaacggcaccaagtgcgaccagccctgcgccaccggcttctacggcgagggctgcagccacagatgccccccctgcagagacggccacgcctgcaaccacgtgaccggcaagtgcaccagatgcaacgccggctggatcggcgacagatgcgagaccaagtgcagcaacggcacctacggcgaggactgcgccttcgtgtgcgccgactgcggcagcggccactgcgacttccagagcggcagatgcctgtgcagccccggcgtgcacggcccccactgcaacgtgacctgcccccccggcctgcacggcgccgactgcgcccaggcctgcagctgccacgaggacacctgcgaccccgtgaccggcgcctgccacctggagaccaaccagagaaagggcgtgatgggcgccggcgccctgctggtgctgctggtgtgcctgctgctgagcctgctgggctgctgctgcgcctgcagaggcaaggaccccaccagaagagagctgagcctgggcagaaagaaggccccccacagactgtgcggcagattcagcagaatcagcatgaagctgcccagaatccccctgagaagacagaagctgcccaaggtggtggtggcccaccacgacctggacaacaccctgaactgcagcttcctggagccccccagcggcctggagcagcccagccccagctggagcagcagagccagcttcagcagcttcgacaccaccgacgagggccccgtgtactgcgtgccccacgaggaggcccccgccgagagcagagaccccgaggtgcccaccgtgcccgccgaggcccccgcccccagccccgtgcccctgaccacccccgccagcgccgaggaggccatccccctgcccgccagcagcgacagcgagagaagcgccagcagcgtggagggccccggcggcgccctgtacgccagagtggccagaagagaggccagacccgccagagccagaggcgagatcggcggcctgagcctgagccccagccccgagagaagaaagccccccccccccgaccccgccaccaagcccaaggtgagctggatccacggcaagcacagcgccgccgccgccggcagagcccccagcccccccccccccggcagcgaggccgcccccagccccagcaagagaaagagaacccccagcgacaagagcgcccacaccgtggagcacggcagccccagaaccagagaccccacccccagaccccccggcctgcccgaggaggccaccgccctggccgcccccagcccccccagagccagagccagagccagacccggcctgctggagcccaccgacgccggcggcccccccagaagcgcccccgccgccagcatgctggccgccgacgtgagaggcaagaccagaagcctgggcagagccgaggtggccctgggcgcccagggccccagagagaagcccgcccccccccagaaggccaagagaagcgtgccccccgccagccccgccagagccccccccgccaccgagacccccggccccgagaaggccgccaccgacctgcccgcccccgagacccccagaaagaagacccccatccagaagccccccagaaagaagagcagagaggccgccggcgagctgggcagagccggcgcccccaccctgtag

SEQ ID NO: 257121 - DNA, 2598 bp, Artificial Sequence
  derived and/or modified sequence
atggagggcgccggccccagaggcgccggccccgccagaagaagaggcgccggcggcccccccagccccctgctgcccagcctgctgctgctgctgctgctgtggatgctgcccgacaccgtggccccccaggagctgaaccccagaggcagaaacgtgtgcagagcccccggcagccaggtgcccacctgctgcgccggctggagacagcagggcgacgagtgcggcatcgccgtgtgcgagggcaacagcacctgcagcgagaacgaggtgtgcgtgagacccggcgagtgcagatgcagacacggctacttcggcgccaactgcgacaccaagtgccccagacagttctggggccccgactgcaaggagctgtgcagctgccacccccacggccagtgcgaggacgtgaccggccagtgcacctgccacgccagaagatggggcgccagatgcgagcacgcctgccagtgccagcacggcacctgccaccccagaagcggcgcctgcagatgcgagcccggctggtggggcgcccagtgcgccagcgcctgctactgcagcgccaccagcagatgcgacccccagaccggcgcctgcctgtgccacgccggctggtggggcagaagctgcaacaaccagtgcgcctgcaacagcagcccctgcgagcagcagagcggcagatgccagtgcagagagagaaccttcggcgccagatgcgacagatactgccagtgcttcagaggcagatgccaccccgtggacggcacctgcgcctgcgagcccggctacagaggcaagtactgcagagagccctgccccgccggcttctacggcctgggctgcagaagaagatgcggccagtgcaagggccagcagccctgcaccgtggccgagggcagatgcctgacctgcgagcccggctggaacggcaccaagtgcgaccagccctgcgccaccggcttctacggcgagggctgcagccacagatgccccccctgcagagacggccacgcctgcaaccacgtgaccggcaagtgcaccagatgcaacgccggctggatcggcgacagatgcgagaccaagtgcagcaacggcacctacggcgaggactgcgccttcgtgtgcgccgactgcggcagcggccactgcgacttccagagcggcagatgcctgtgcagccccggcgtgcacggcccccactgcaacgtgacctgcccccccggcctgcacggcgccgactgcgcccaggcctgcagctgccacgaggacacctgcgaccccgtgaccggcgcctgccacctggagaccaaccagagaaagggcgtgatgggcgccggcgccctgctggtgctgctggtgtgcctgctgctgagcctgctgggctgctgctgcgcctgcagaggcaaggaccccaccagaagagagctgagcctgggcagaaagaaggccccccacagactgtgcggcagattcagcagaatcagcatgaagctgcccagaatccccctgagaagacagaagctgcccaaggtggtggtggcccaccacgacctggacaacaccctgaactgcagcttcctggagccccccagcggcctggagcagcccagccccagctggagcagcagagccagcttcagcagcttcgacaccaccgacgagggccccgtgtactgcgtgccccacgaggaggcccccgccgagagcagagaccccgaggtgcccaccgtgcccgccgaggcccccgcccccagccccgtgcccctgaccacccccgccagcgccgaggaggccatccccctgcccgccagcagcgacagcgagagaagcgccagcagcgtggagggccccggcggcgccctgtacgccagagtggccagaagagaggccagacccgccagagccagaggcgagatcggcggcctgagcctgagccccagccccgagagaagaaagccccccccccccgaccccgccaccaagcccaaggtgagctggatccacggcaagcacagcgccgccgccgccggcagagcccccagcccccccccccccggcagcgaggccgcccccagccccagcaagagaaagagaacccccagcgacaagagcgcccacaccgtggagcacggcagccccagaaccagagaccccacccccagaccccccggcctgcccgaggaggccaccgccctggccgcccccagcccccccagagccagagccagagccgcccccagacccctgggcgcccacggcagaagaagaagccccgccaagagagccgaggccgccagcatgctggccgccgacgtgagaggcaagaccagaagcctgggcagagccgaggtggccctgggcgcccagggccccagagagaagcccgcccccccccagaaggccaagagaagcgtgccccccgccagccccgccagagccccccccgccaccgagacccccggccccgagaaggccgccaccgacctgcccgcccccgagacccccagaaagaagacccccatccagaagccccccagaaagaagagcagagaggccgccggcgagctgggcagagccggcgcccccaccctgtag

SEQ ID NO: 257122 - RNA, 854 nt, Artificial Sequence
  derived and/or modified sequence
gggaaauaagagagaaaagaagaguaagaagaaauauaagagccaccaugguauccaagggggaggaggacaacauggcgaucaucaaggaguucaugcgauucaaggugcacauggaagguucggucaacggacacgaauuugaaaucgaaggagagggugaaggaaggcccuaugaagggacacagaccgcgaaacucaaggucacgaaagggggaccacuuccuuucgccugggacauucuuucgccccaguuuauguacggguccaaagcauaugugaagcaucccgccgauauuccugacuaucugaaacucagcuuucccgagggauucaagugggagcgggucaugaacuuugaggacggggguguagucaccguaacccaagacucaagccuccaagacggcgaguucaucuacaaggucaaacugcgggggacuaacuuuccgucggaugggccggugaugcagaagaaaacgaugggaugggaagcgucaucggagaggauguacccagaagauggugcauugaagggggagaucaagcagagacugaaguugaaagaugggggacauuaugaugccgaggugaaaacgacauacaaagcgaaaaagccggugcagcuucccggagcguauaaugugaauaucaaguuggauauuacuucacacaaugaggacuacacaauugucgaacaguacgaacgcgcugaggguagacacucgacgggaggcauggacgaguuguacaaaugauaagcugccuucugcggggcuugccuucuggccaugcccuucuucucucccuugcaccuguaccucuuggucuuugaauaaagccugaguaggaag

SEQ ID NO: 257123 - RNA, 905 nt, Artificial Sequence
  derived and/or modified sequence
gggaaauaagagagaaaagaagaguaagaagaaauauaagagccaccaugguauccaagggggaggaggacaacauggcgaucaucaaggaguucaugcgauucaaggugcacauggaagguucggucaacggacacgaauuugaaaucgaaggagagggugaaggaaggcccuaugaagggacacagaccgcgaaacucaaggucacgaaagggggaccacuuccuuucgccugggacauucuuucgccccaguuuauguacggguccaaagcauaugugaagcaucccgccgauauuccugacuaucugaaacucagcuuucccgagggauucaagugggagcgggucaugaacuuugaggacggggguguagucaccguaacccaagacucaagccuccaagacggcgaguucaucuacaaggucaaacugcgggggacuaacuuuccgucggaugggccggugaugcagaagaaaacgaugggaugggaagcgucaucggagaggauguacccagaagauggugcauugaagggggagaucaagcagagacugaaguugaaagaugggggacauuaugaugccgaggugaaaacgacauacaaagcgaaaaagccggugcagcuucccggagcguauaaugugaauaucaaguuggauauuacuucacacaaugaggacuacacaauugucgaacaguacgaacgcgcugaggguagacacucgacgggaggcauggacgaguuguacaaaugauaauaggauucgucaguaggguuguaaagguuuuucuuuuccugagaaaacaaccuuuuguuuucucagguuuugcuuuuuggccuuucccuagcuuuaaaaaaaaaaaagcaaaaguggucuuugaauaaagucugagugggcggc

SEQ ID NO: 257124 - RNA, 907 nt, Artificial Sequence
  derived and/or modified sequence
gggaaauaagagagaaaagaagaguaagaagaaauauaagagccaccaugguauccaagggggaggaggacaacauggcgaucaucaaggaguucaugcgauucaaggugcacauggaagguucggucaacggacacgaauuugaaaucgaaggagagggugaaggaaggcccuaugaagggacacagaccgcgaaacucaaggucacgaaagggggaccacuuccuuucgccugggacauucuuucgccccaguuuauguacggguccaaagcauaugugaagcaucccgccgauauuccugacuaucugaaacucagcuuucccgagggauucaagugggagcgggucaugaacuuugaggacggggguguagucaccguaacccaagacucaagccuccaagacggcgaguucaucuacaaggucaaacugcgggggacuaacuuuccgucggaugggccggugaugcagaagaaaacgaugggaugggaagcgucaucggagaggauguacccagaagauggugcauugaagggggagaucaagcagagacugaaguugaaagaugggggacauuaugaugccgaggugaaaacgacauacaaagcgaaaaagccggugcagcuucccggagcguauaaugugaauaucaaguuggauauuacuucacacaaugaggacuacacaauugucgaacaguacgaacgcgcugaggguagacacucgacgggaggcauggacgaguuguacaaaugauaauagugcucuucaguagggucaugaagguuuuucuuuuccugagaaaacaacacguauuguuuucucagguuuugcuuuuuggccuuuuucuagcuuaaaaaaaaaaaaagcaaaaguggucuuugaauaaagucugagugggcggc

SEQ ID NO: 257125 - protein, 508 aa, Artificial Sequence
  derived and/or modified sequence
MIYEESKMNLEQERPFVCSAPGCSQRFPTEDHLMIHRHKHEMTLKFPSIKTDNMLSDQTPTPTRFLKNCEEVGLFSELDCSLEHEFRKAQEEESSKRNISMHNAVGGAMTGPGTHQLSSARLPNHDTNVVIQQAMPSPQSSSVITQAPSTNRQIGPVPGSLSSLLHLHNRQRQPMPASMPGTLPNPTMPGSSAVLMPMERQMSVNSSIMGMQGPNLSNPCASPQVQPMHSEAKMRLKAALTHHPAAMSNGNMNTMGHMMEMMGSRQDQTPHHHMHSHPHQHQTLPPHHPYPHQHQHPAHHPHPQPHHQQNHPHHHSHSHLHAHPAHHQTSPHPPLHTGNQAQVSPATQQMQPTQTIQPPQPTGGRRRRVVDEDPDERRRKFLERNRAAATRCRQKRKVWVMSLEKKAEELTQTNMQLQNEVSMLKNEVAQLKQLLLTHKDCPITAMQKESQGYLSPESSPPASPVPACSQQQVIQHNTITTSSSVSEVVGSSTLSQLTTHRTDLNPIL

SEQ ID NO: 257126 - protein, 475 aa, Artificial Sequence
  derived and/or modified sequence
MIHRHKHEMTLKFPSIKTDNMLSDQTPTPTRFLKNCEEVGLFSELDCSLEHEFRKAQEEESSKRNISMHNAVGGAMTGPGTHQLSSARLPNHDTNVVIQQAMPSPQSSSVITQAPSTNRQIGPVPGSLSSLLHLHNRQRQPMPASMPGTLPNPTMPGSSAVLMPMERQMSVNSSIMGMQGPNLSNPCASPQVQPMHSEAKMRLKAALTHHPAAMSNGNMNTMGHMMEMMGSRQDQTPHHHMHSHPHQHQTLPPHHPYPHQHQHPAHHPHPQPHHQQNHPHHHSHSHLHAHPAHHQTSPHPPLHTGNQAQVSPATQQMQPTQTIQPPQPTGGRRRRVVDEDPDERRRKFLERNRAAATRCRQKRKVWVMSLEKKAEELTQTNMQLQNEVSMLKNEVAQLKQLLLTHKDCPITAMQKESQGYLSPESSPPASPVPACSQQQVIQHNTITTSSSVSEVVGSSTLSQLTTHRTDLNPIL

SEQ ID NO: 257127 - protein, 501 aa, Artificial Sequence
  derived and/or modified sequence
MNLEQERPFVCSAPGCSQRFPTEDHLMIHRHKHEMTLKFPSIKTDNMLSDQTPTPTRFLKNCEEVGLFSELDCSLEHEFRKAQEEESSKRNISMHNAVGGAMTGPGTHQLSSARLPNHDTNVVIQQAMPSPQSSSVITQAPSTNRQIGPVPGSLSSLLHLHNRQRQPMPASMPGTLPNPTMPGSSAVLMPMERQMSVNSSIMGMQGPNLSNPCASPQVQPMHSEAKMRLKAALTHHPAAMSNGNMNTMGHMMEMMGSRQDQTPHHHMHSHPHQHQTLPPHHPYPHQHQHPAHHPHPQPHHQQNHPHHHSHSHLHAHPAHHQTSPHPPLHTGNQAQVSPATQQMQPTQTIQPPQPTGGRRRRVVDEDPDERRRKFLERNRAAATRCRQKRKVWVMSLEKKAEELTQTNMQLQNEVSMLKNEVAQLKQLLLTHKDCPITAMQKESQGYLSPESSPPASPVPACSQQQVIQHNTITTSSSVSEVVGSSTLSQLTTHRTDLNPIL

SEQ ID NO: 257128 - protein, 115 aa, Artificial Sequence
  derived and/or modified sequence
MNLEQERPFVCSAPGCSQRFPTEDHLMIHRHKHEMTLKFPSIKTDNMLSDQTPTPTRFLKNCEEVGLFSELDCSLEHEFRKAQEEESSKRNISMHNAVGGAMTGPGTHQLSSARL

SEQ ID NO: 257129 - DNA, 8213 bp, Artificial Sequence
  derived and/or modified sequence
ttttagtggtggagtcaatttatttctgagacgatctcatttacctgaatgaggagctcatatttattttcaggatttatgaggaatccaagatgaatttggagcaggagaggccgtttgtctgcagtgccccaggctgctcccagcgcttcccaacagaggaccatctgatgattcataggcacaaacatgaaatgactttgaagtttccttcaataaaaacagacaatatgttatcagatcaaactccgaccccaacgagattcctgaagaactgcgaggaggtgggcctcttcagcgagctggactgctccctggagcacgagttcaggaaggctcaggaagaggagagcagcaagcggaatatctcgatgcataatgcagttggtggggccatgacggggcccggaactcaccagcttagcagcgctcggctgcccaaccatgacaccaacgttgtgattcagcaagccatgccgtcgcctcagtccagctctgtcatcactcaggcaccttccaccaaccgccagatcgggcctgtcccaggctctctatcttctctgctacatctccacaacagacagagacagcccatgccagcctccatgcctgggaccctgcccaaccctacaatgccaggatcttccgccgtcttgatgccaatggagcgacaaatgtcagtgaactccagcatcatggggatgcaaggtccaaatctcagcaacccctgtgcttctccccaggtccagccaatgcattcagaagccaaaatgaggttgaaggctgcattgactcaccaccctgctgccatgtcaaatgggaacatgaacaccatgggacacatgatggagatgatgggctcccggcaggaccagacgccacaccatcacatgcactcgcacccgcatcagcaccagacactgccaccccatcacccttacccacaccagcaccagcacccagcacaccatcctcaccctcaaccccatcaccagcagaaccatccacatcaccactcccattcccaccttcatgcacacccagcacatcaccagacctcgccacatccgcccctgcacaccggcaaccaagcacaggtttcaccagcaacacaacagatgcagccaacccagacaatacagccaccccagcccacaggggggcgccggcgaagggtggtagacgaggatccggacgagaggcggcggaaatttctggaacggaaccgggcagctgccacccgctgcagacagaagaggaaggtctgggtgatgtcattggaaaagaaagcagaagaactcacccagacaaacatgcagcttcagaatgaagtgtctatgttgaaaaatgaggtggcccagctgaaacagttgttgttaacacataaagactgcccaataacagccatgcagaaagaatcacaaggatatctaagtccagagagtagccctcctgctagtcctgtcccagcttgctcccagcaacaagtcatccagcataataccatcactacttcctcatcggtcagcgaggtggtaggaagctccaccctcagccagctcaccactcacagaacagacctgaatccgattctttaaaatgcaccatcagacctggcctccaagaagagctgtagcgtaccatgcgtcctttcttttaagggcatttttagaattaactcagacctggaagactcctcagttcttcaaagactggctttcatttttatagttattatggaaatgttgtcttttatacttagttatataagaaaaaagggagttatgcaattaatatctatcagcttgggaaacgctttggtgcttttctccagttttctggtaccagttacttgtttataaactgaaccttttctgtatatagccatggtttcattcttatcagtccaaccctttgcctgaaacattgaatcttgttaaaccacagcttttagctaaaatgaggtatacctagatgtcaagtaagacagatccaaggtaactgggtaggaaatcttttgacatcttaactcatgttgagtttgtgctgtggtgtcaccagaattccagataaacacacagcctttcccatacctttttttttcttactataaaatattataagatccattgatgtccaaataataccaccaagcatctcttcacctctcctcctcttggtccacttgctaatgcccagttttcttctccatttccactttttcttaggctccctatttactattcattttgacttccttctgttttatttttttccctttagcattgcatgtgaataagaaaataatgtttaaagaaaaaaaaaaaaaagcaaacctccaaaacgtggacctaaccattgcttcacttacacttcacccacagctggagttcattcaactcttgcttttcacaaaatagtaaccaggagatgtttaatgtgcctgatttaatgtttttaataatcacagcaaatgaaaggtggtttagttataagtgaagcatggttgaataccagctggggagacactagggaagggagctttgtaagccttgattgcgaaagtccaaattttgatgtggggctataacatgacacccttggattgcgactggttttatacggcctgcctataacgttgaaaatccatgtactacataataattcagaagggctctattcactacacagattacattgttcaatcatcagctgctaatagcctaagatttatttttttttttttcttaagcctatggaaccggctttgctgttctggggggtgaaaatagactaactactggagaaacaaagagagaaagaaaacccagtgtttccataggggcacttttagccttcccacaacagttaagcactctttgactgctgaaggaaccccatggatgaggtgcaggctacttcactctttttttttcttttttgagacagagtctcacctattgcccagactgaagtgcagtggtgcgatcatggatcactgcagcagcatcctccgagttcaagctatccttccacctccgcctcctgagtagctgggaccacaggttcacataaccatgcctggctaatttatttttacttttattttaaaataaaagatgaggtctgtcttatgttgcccaggctggtctcaaactatcctacttcttcctcccaaagtgttgggattataggtgtgagccactgcacccagcctacttcactcttctgaattattctgatttattttcaacaacttttgtgaacttgcccgtgatacaaagcagatagtccctgaaccacagtcgtgcctccttgaaacaagccattctactgtgctaatgttttaatatcacatctcacaaataacaggggtgaatgtttctctctagcaatctaggcaggtgctggtgtttcatctccatttgaatgcttgacctcttaatgtgtgtgtgtgtgtgtgtgtgtgtgtgtgtgttcatgggttttaaaagaacagtattttacaaaaggtgtagcttttataagagtgcagaaaagggaaggatgtgtttttttctctcactatagtataagaatctattttggagaaaaaaagaaaatatgagggtctcgaagcatgatttttatataactagtttcagttttatctaataacttactttttaaatcaatatttatcaacaatctttccttgtatgcagtgctttcaaaagatggttttgagtgtccagtgaaacttatgacttggatatatggttgaagaatcaaaacaaaagcaaaaaaaaaaagcaaaaaaagaaaagagaaaaaaagaaaaaatgcaaatggaataattttctattatattttagacaaacatatcattttcgagtattttaaatactgaattcatagttgttgttttttaaattccaacagtaacagctgaatggtttaatctgactggcttcctaagaaatgtttaagactcagctttaaaaagaagttaacattcatatctctgttttgaaatcaaaaatcatatttcaaaattctttcctaggaccatctatgtgtctcccctcccctccacaaaaaggagaaagagtgcattaaaatgtttagttgggttttttaatttttaatttttatgttatgttttgctttgttttaagtaaacaaaaatttttctttctttactgcatgcatagcacttaataaaatggatttttaaaaaatccactagtaatatcagaatgtccagggagtgactgtcactacaatgatggtttagtttacttctgttccaccttttgattgaaatatttagttgttaggctgaaagcctcggcagttaagaacttgcctgagttttcttcgttcagcaacttgacagtttgactgatgtgcattatatatagctcaattatgtctgttttttatgctaagtaggaaaaccaaccacacacattagcaaaccggcctcaacatataattagaataaactgtcttcttgttctactcagggcctttaggtgtgttcattcacggtatggaaatacagtaaatgaaagattccaactagttgtcagtgcttcttgaaattccaaacagaaagatacattggtcaaatccaacacttggcttatcaatattaagtcttttacctaaaggcccagccgtcaccagacaacagaataatcaatctgcctgaaaatccctcctccttgtcctacactttttgcctgtttgggagaatatctttgtactccattctcctccctcagccagttactgggtcacccatccatgtgttcatgaatcaatcatcacggcctgcagagcacctgtcctaaggagggaaaatcctgtcacactgcctctccccattcgtgtgtggttttcttgatcggtgagatctgtctctgaagtcactgccagcctccctgggaacgtctatagtgcctcccctgccttatgtgatgggagttaacaactcagataagtacacctgagagcatttctatcaggtaaactgtcacttaaatggaggtgtccacatcttaattgtttctccttgacacatttctcaatccacgaagccaggagaggtagagtgaaaatcccagccatggatgaatgtactaatttgaaagccaagtgttaagtcggatgttttcccgttacactactactcagccctctcctgcggccacatcaacggatgcaagtcacagtcttaacacagcctgtgggagacaagcagtttgtgtgctcacagtatatattatagtaattagggtgacttagagcaaatactcttcagatcctatgtagtcagtgaaacaaaatggagagcgtattctgatagaaggacgtcgacggtgaatgttctggtggttgttgcctgttaagtaaactttagtgtgtaagttgagtttgtcattaaaatcataaaccagctgcggtaacagacaagcctttggctggggagttttaagcctcggtaactgctataaaactagccatccagttaggatagaatgtgtttctttctggttaaaaaaaggaaaaaccatctaagaaaatatatatgtatgtatgtgtgtatacagtggaattcaaaggaccaaagcaaaatttgaacaggaatctattaatttagaattttataagatatttattaataaatgttatttttaaacattccatttgaacagtattctgtaggatctacttgtttttaaagtgttagtccataataaactactatagttatgtgtattttcatttttcagggtttcaaatggctattctccatcatttggtggaaatgtttgcttagatctctgtgcatagacatttcaaggatttttattgctctgtgagttattttttaatcaacattctgaacagttttttttaaacatttatttctgtgtgttcatttttaaagtaagctctttcatttaggaagcagagttcagctaaagggaatcagtaactctaactggaacagctttcttgtagaagtgtaaaaacagcttcatctctgcctctctccaccccaccccaatttcctagaaagccttgcactattcagctcccttagtgctttttgtcccttcccgaacaatatgcagtagctttaagccattcaagctccattatgcagtatatctgagaagggaaaggaaacaacccatttaaatttgaataaaaccgtgcctatgcgaacagtagcaatttagaatctcttttctgcttttaaaataatttatatttaaaaattgcactttagctttttgatccctttgtatttctcttattctctttctaacctcttctctgtcctcaaacttgcctttgctctcctttacaataccccccacccctcctccaaggctctgagcggcatcatttaaaatactttacagatatttgcaccaggtacatttatgtgcgtccattggtagcacagctgagacctgtgtctcacatcagcctaggtgaagcctactacaagaatgccaaggagaagagccagtacactatatggtttatactctttatccctttattcatagcatgttttttaaaaatgttatattatgcaacagatgtgaggcagcagctaagctatacttaagaattttctctcaccttccaaaccaaagtgtcctgaataagccaggagacttattcttttgtgcaccctggtgcacatctgactgttgtcctagccatagactctctgaggccactgaaagaacagtggccctatcgatttcattcctaggtctcaaaaatacaatgttgccttgtaacataattagggacagcacctctatttcacaattataatctaaggtaggataagacgacacagcagcaataaacttacaagtaaaattcaataccaaaacaaacacaaagaaatttaaaaaacaaaaaacctagctcatcatgttgtgaaaatgaaaaagtgaatgtccattcaaaatattttactatttcttgtggagtttttcagtgatgtaatgcttgtagccaaattgcttaaagagtgtttatatatttttttccttataaattgtctattttttaaaaaagctatttaaccacagctgaagtggggggtaaggccaaattgccaacacttgttaaaagattaatactcttaagtggcactctgatacctttccaacttgtcatcagaaaggaatcaataattaccaactgttgtatttagaccaacttacaatatctagctcattagaagccaggatctagaaagctccttctaagccatttaagatattcttacattgagcttcatattatagaactttataggattggatattttacaatagaataatttagcctcaggactgagaatgtggaagctgaataaattagctttaaatacatcattaaaatcttatgcacaataagctcattagattctagttttctcctttagaataccaatgccacagacactacaggagataatgaaaggtatcagttgtgttgagtggagggagtttaagagaaaggacccttcccaaccagcagccagtagaaaatacaacctactcacctttttcccttctaagttctgctaaatcacatctgcctcatagagaaaggaatgttgcctttgagaactgtcttggagaacagataagcttgaaatgttctctctagagaggacatagggtttgggatcctctgaaaaggcccagaaaaatagctcagttcaaatacaatgttctaggacaattggaatataaatattgtccaaaaatataattaaaagaaaaaagtttagcactgtgtaaagtaagtgttaactgaggaagtcccaaaaaggtgctgtcactttaagttctggacttggggttctttgtatttgtaaacagcaaagcatttgtgtttgtttgtctatttgtaaagcaaccaccttccttattggaaggagaaaaaaaggggtacatacatgtaaatacttgctgcagcatttaatatgtttaattttgtgttaagctttttgttgcatcgtgaacacatttattgttaccaatggacaatgagttcattaagactgttcaactaggtcagatttttacatctctttctagcaagaagagacaagattttgtgcatttgtacaaatgttaatatcactgcaattccaatataataaagcactcaaatgcaaataa

SEQ ID NO: 257130 - DNA, 1527 bp, Artificial Sequence
  derived and/or modified sequence
atgatttacgaggagtctaaaatgaatctggaacaagaaaggcctttcgtgtgcagtgcccccgggtgttcacaacgatttccaactgaggaccatctgatgatccatcggcacaagcacgaaatgaccctcaagttcccatctataaaaaccgataatatgttgtctgaccaaactcctactccaacaaggttcctgaaaaattgcgaggaggtgggactgtttagtgagcttgactgctccctggagcatgaatttcggaaggcacaggaggaggagtcttctaagcgcaatattagtatgcataacgcggtgggtggcgcgatgacaggtccgggaacccatcagctctcaagtgcgcggctcccaaaccacgacaccaacgtcgttattcagcaggcgatgccatcccctcagtctagctccgttatcactcaggctccttccacaaacagacagattggtccagtgccaggaagcttgagctccttattacatctgcacaacaggcaacggcaacctatgcctgccagcatgccgggcacactaccaaatccgactatgcccggatcttccgcagtactgatgccaatggagcggcaaatgtccgtgaactcaagtatcatgggtatgcagggccctaacttgtcgaacccttgtgcctctccacaggtacaacccatgcacagtgaggccaagatgaggctcaaagcagctttaacacaccacccagcggctatgtccaatggaaacatgaacaccatggggcatatgatggagatgatggggtcgcgccaagatcagacaccacaccaccatatgcactcacacccccatcagcaccagacacttcctccccaccacccatatccccaccagcatcagcaccccgcccaccacccacatccccagcctcatcaccagcagaatcatccacatcatcactcccacagccaccttcatgcccacccggcccatcatcaaacttcccctcacccacccctgcacaccggcaaccaagcgcaggtgagcccagcaacccagcaaatgcagccgacacagactattcaaccccctcagccaacaggtggtcgacgacggcgcgttgtggacgaggatccagacgaaagaagaagaaagtttctggagcggaatagggcggcagccacccggtgcaggcaaaaaaggaaggtgtgggttatgagcctagaaaagaaggccgaagagctgactcagacaaatatgcagcttcaaaacgaggtaagcatgctgaaaaacgaggtagctcaactcaaacagctgttactcactcacaaagactgcccaatcactgcaatgcagaaagagtctcaaggttatttgagccccgaaagctccccccctgcctcaccagtccccgcctgctctcagcagcaggttatccaacataacactattacgactagttcctctgttagcgaagttgttggatccagcacgttaagccaactcactacacatagaactgatctcaacccaatcctgtag

SEQ ID NO: 257131 - DNA, 1527 bp, Artificial Sequence
  derived and/or modified sequence
atgatctatgaggagagcaagatgaacctggagcaggagcggccctttgtgtgcagcgcccctggctgcagccagcgcttccccacagaggaccacctgatgatccaccgccacaagcatgagatgaccctgaagttccccagcatcaagacagacaacatgctgagtgaccagacccccacccccacccgcttcctgaagaactgtgaggaggtgggcctcttcagcgagctggactgcagcctggagcacgagttcaggaaggcccaggaggaggagagcagcaagaggaacatctccatgcacaatgctgtgggcggggccatgacaggccctggcacccaccagctgagcagcgcccggctgcccaaccacgacaccaacgtggtgatccagcaggccatgcccagcccccagagcagcagcgtcatcacccaggcccccagcaccaaccggcagatcggccctgtgcccggcagcctgagcagcctgctgcacctgcacaaccggcagaggcagcccatgcctgcctccatgcctggcaccctgcccaaccccaccatgcctggcagcagcgctgtgctgatgcccatggagcggcagatgtctgtgaacagcagcatcatgggcatgcagggccccaacctgagcaacccctgtgccagcccccaggtgcagcccatgcacagcgaggccaagatgaggctgaaggccgccctgacccaccaccctgctgccatgagcaatggaaacatgaacaccatgggccacatgatggagatgatgggcagccggcaggaccagaccccccaccaccacatgcacagccacccccaccagcaccagaccctgcccccccaccacccctacccccaccagcaccagcacccagcccaccacccccacccccagccccaccaccagcagaaccacccccaccaccacagccacagccacctgcacgcccacccagcccaccaccagaccagcccccacccccccctgcacactggaaaccaggcccaggtgtccccagccacccagcagatgcagcccacccagaccatccagcccccccagcccaccggcggcagaagaagaagagtggtggatgaggaccctgatgaaagaagaaggaagttcctggagaggaacagagctgctgccacccgctgccggcagaagaggaaggtgtgggtgatgagcctggagaagaaggccgaggagctgacccagaccaacatgcagctgcagaatgaggtgtccatgctgaagaatgaggtggcccagctgaagcagctgctgctgacccacaaggactgccccatcacagccatgcagaaggagagccagggctacctgagccctgagagcagccccccagccagccctgtgcctgcctgcagccagcagcaggtgatccagcacaacaccatcaccaccagcagctctgtgtctgaggtggtgggcagcagcaccctgagccagctgaccacccacaggacagacctgaaccccatcctgtag

SEQ ID NO: 257132 - DNA, 1527 bp, Artificial Sequence
  derived and/or modified sequence
atgatctacgaggagagcaagatgaacctggagcaggagcggcccttcgtctgtagcgcgccagggtgttcccagcgattccccacagaggaccatctgatgatccatcgccacaaacatgagatgaccctgaaatttcctagcatcaagactgataacatgctgtctgatcagactccaacaccgacccgatttctgaagaactgcgaagaggtcggcctgttcagcgagctggattgttctctcgagcatgagttcagaaaggctcaggaggaagagtcctctaagaggaatatttcaatgcataacgccgtggggggcgcaatgactgggcctggaactcatcagctttctagcgcccgactgcctaaccacgatactaacgtagttattcagcaggccatgccaagtccacagagctccagcgtcatcacccaagcaccttcaaccaaccggcagattggtcccgtgccagggtccctgtccagtttgctccacctgcacaaccgtcaaaggcagcccatgccagcttctatgcccgggacattacccaaccctaccatgccagggtcatctgcagtgctgatgccaatggaacgccaaatgagcgttaattcatctatcatgggtatgcaggggcccaatctgagtaatccatgtgcctctcctcaggtgcagcctatgcattctgaagctaagatgcggctgaaggccgccctgacgcaccacccggcagcaatgtctaatgggaacatgaatacgatgggccacatgatggaaatgatgggcagccggcaggaccagacccctcaccaccatatgcacagccacccccatcagcaccagaccctccctcctcaccacccatacccccaccaacaccaacatccagcccatcatccacacccacagccacaccaccagcagaatcaccctcatcatcattcccacagccatctgcacgctcaccctgcccatcaccagacttctccgcaccctccattgcacactggcaatcaggcacaggtatccccggctacacagcagatgcagcctacacagaccattcaacctccccagcccactgggggccgcagaaggagagtggtcgatgaggacccggatgagagaaggcggaagttcctggaacgtaacagagcagcagccacccgatgccgccaaaagaggaaggtgtgggtgatgagcctcgagaagaaagctgaagagctcacccaaaccaatatgcaactccaaaacgaggtttctatgctgaaaaatgaagtcgcccagctgaagcaactgctgctgacacataaggattgcccaataaccgccatgcagaaagagtcccagggttacctctcacctgaatcatcaccgcccgctagccctgtgcctgcctgcagccagcagcaggtcatccagcataacacgatcactacttcatcatcggtcagcgaagttgttggctcctctacactcagccagttaactacacatagaacggatttgaaccctattttgtag

SEQ ID NO: 257133 - DNA, 1527 bp, Artificial Sequence
  derived and/or modified sequence
atgatatacgaggaatctaagatgaatctggaacaggaacggccatttgtttgcagcgcccctggctgctctcagaggtttccgaccgaagaccatctcatgattcatagacacaagcatgaaatgacgctgaagtttccttctataaaaaccgataacatgttgtctgaccagactccaacgcctaccaggttcctgaaaaactgtgaggaggtcggcctgtttagcgaactagattgttcactggagcacgagttccggaaagctcaggaggaggaatcctccaagcgtaacatctccatgcataatgccgttggaggcgctatgacaggccctggcacacaccaattgagttccgccagattaccaaaccatgatactaatgtggtgatccaacaggctatgccgtcaccccagtcctccagcgtcatcacacaggccccttctaccaaccggcagatcggacccgtccctggtagtcttagctcccttctgcatctgcataacaggcaacgccaacccatgcctgcttcaatgccaggaacgttacctaatcctacaatgccaggttccagcgctgtgttaatgcctatggagaggcagatgtccgtgaatagctccatcatgggcatgcagggccctaatctgtcaaacccatgtgcatccccccaggtccagcctatgcatagcgaggccaagatgcgcctgaaggcagcactgactcatcacccggcagcaatgtccaacgggaacatgaatactatgggacatatgatggaaatgatgggctctcgtcaagatcagacaccacaccaccacatgcattcccacccccatcaacatcagactctaccaccacaccacccctacccccaccagcatcagcaccccgcacaccatcctcacccccagccccaccaccagcagaatcacccccaccatcactctcactcacacctgcatgcccatccagcccaccatcagacctctccacaccctccactgcacaccggaaaccaagcccaggtgtctcctgccacccagcaaatgcagccaacgcagacaatccagcctccccagccaactgggggtcgcagaagacgcgtggttgatgaggatccggatgaaaggcggcgaaagttcttggagcggaaccgagctgctgctacgagatgtagacagaagcggaaggtctgggtgatgagcctcgaaaaaaaagctgaagagctcacgcagaccaatatgcaattgcagaatgaagtgtctatgctgaaaaacgaagtggcgcagctgaagcaacttctgctgactcacaaggattgccctatcaccgctatgcagaaggagtcacagggctacctgtcacccgaaagcagtcctccagcaagtccagtccccgcatgctcacagcagcaggttatccagcacaatacaatcacaactagctcatccgtgtcagaagttgtagggagctctaccctttcgcagctcactactcatcggactgacctcaacccaattctgtag

SEQ ID NO: 257134 - DNA, 8532 bp, Artificial Sequence
  derived and/or modified sequence
aacatttacaacaaagttgattctgtgtagggttggaggctagacagttccacaaatttttagtcacattttccatgtcagttaaatctagggagttcaagactactggaaaaattagtctcattactaaaagaaacttagagaacgagggaggtaccagagtctaggaggtacctctgggttgcagaagtaattgtaaaataccagacctgttctttttactaaaagctagtttcactatcttctggtctgaaatactgaggcaaatactcaagacttattttcttcctaatcttgctggtgaaacagaagttactagaaagaaaggaagaaaaaacttgatttggtgactgcaggaagcaacacgttgctgcttttattctacagataatgatttatgaggaatccaagatgaatttggagcaggagaggccgtttgtctgcagtgccccaggctgctcccagcgcttcccaacagaggaccatctgatgattcataggcacaaacatgaaatgactttgaagtttccttcaataaaaacagacaatatgttatcagatcaaactccgaccccaacgagattcctgaagaactgcgaggaggtgggcctcttcagcgagctggactgctccctggagcacgagttcaggaaggctcaggaagaggagagcagcaagcggaatatctcgatgcataatgcagttggtggggccatgacggggcccggaactcaccagcttagcagcgctcggctgcccaaccatgacaccaacgttgtgattcagcaagccatgccgtcgcctcagtccagctctgtcatcactcaggcaccttccaccaaccgccagatcgggcctgtcccaggctctctatcttctctgctacatctccacaacagacagagacagcccatgccagcctccatgcctgggaccctgcccaaccctacaatgccaggatcttccgccgtcttgatgccaatggagcgacaaatgtcagtgaactccagcatcatggggatgcaaggtccaaatctcagcaacccctgtgcttctccccaggtccagccaatgcattcagaagccaaaatgaggttgaaggctgcattgactcaccaccctgctgccatgtcaaatgggaacatgaacaccatgggacacatgatggagatgatgggctcccggcaggaccagacgccacaccatcacatgcactcgcacccgcatcagcaccagacactgccaccccatcacccttacccacaccagcaccagcacccagcacaccatcctcaccctcaaccccatcaccagcagaaccatccacatcaccactcccattcccaccttcatgcacacccagcacatcaccagacctcgccacatccgcccctgcacaccggcaaccaagcacaggtttcaccagcaacacaacagatgcagccaacccagacaatacagccaccccagcccacaggggggcgccggcgaagggtggtagacgaggatccggacgagaggcggcggaaatttctggaacggaaccgggcagctgccacccgctgcagacagaagaggaaggtctgggtgatgtcattggaaaagaaagcagaagaactcacccagacaaacatgcagcttcagaatgaagtgtctatgttgaaaaatgaggtggcccagctgaaacagttgttgttaacacataaagactgcccaataacagccatgcagaaagaatcacaaggatatctaagtccagagagtagccctcctgctagtcctgtcccagcttgctcccagcaacaagtcatccagcataataccatcactacttcctcatcggtcagcgaggtggtaggaagctccaccctcagccagctcaccactcacagaacagacctgaatccgattctttaaaatgcaccatcagacctggcctccaagaagagctgtagcgtaccatgcgtcctttcttttaagggcatttttagaattaactcagacctggaagactcctcagttcttcaaagactggctttcatttttatagttattatggaaatgttgtcttttatacttagttatataagaaaaaagggagttatgcaattaatatctatcagcttgggaaacgctttggtgcttttctccagttttctggtaccagttacttgtttataaactgaaccttttctgtatatagccatggtttcattcttatcagtccaaccctttgcctgaaacattgaatcttgttaaaccacagcttttagctaaaatgaggtatacctagatgtcaagtaagacagatccaaggtaactgggtaggaaatcttttgacatcttaactcatgttgagtttgtgctgtggtgtcaccagaattccagataaacacacagcctttcccatacctttttttttcttactataaaatattataagatccattgatgtccaaataataccaccaagcatctcttcacctctcctcctcttggtccacttgctaatgcccagttttcttctccatttccactttttcttaggctccctatttactattcattttgacttccttctgttttatttttttccctttagcattgcatgtgaataagaaaataatgtttaaagaaaaaaaaaaaaaagcaaacctccaaaacgtggacctaaccattgcttcacttacacttcacccacagctggagttcattcaactcttgcttttcacaaaatagtaaccaggagatgtttaatgtgcctgatttaatgtttttaataatcacagcaaatgaaaggtggtttagttataagtgaagcatggttgaataccagctggggagacactagggaagggagctttgtaagccttgattgcgaaagtccaaattttgatgtggggctataacatgacacccttggattgcgactggttttatacggcctgcctataacgttgaaaatccatgtactacataataattcagaagggctctattcactacacagattacattgttcaatcatcagctgctaatagcctaagatttatttttttttttttcttaagcctatggaaccggctttgctgttctggggggtgaaaatagactaactactggagaaacaaagagagaaagaaaacccagtgtttccataggggcacttttagccttcccacaacagttaagcactctttgactgctgaaggaaccccatggatgaggtgcaggctacttcactctttttttttcttttttgagacagagtctcacctattgcccagactgaagtgcagtggtgcgatcatggatcactgcagcagcatcctccgagttcaagctatccttccacctccgcctcctgagtagctgggaccacaggttcacataaccatgcctggctaatttatttttacttttattttaaaataaaagatgaggtctgtcttatgttgcccaggctggtctcaaactatcctacttcttcctcccaaagtgttgggattataggtgtgagccactgcacccagcctacttcactcttctgaattattctgatttattttcaacaacttttgtgaacttgcccgtgatacaaagcagatagtccctgaaccacagtcgtgcctccttgaaacaagccattctactgtgctaatgttttaatatcacatctcacaaataacaggggtgaatgtttctctctagcaatctaggcaggtgctggtgtttcatctccatttgaatgcttgacctcttaatgtgtgtgtgtgtgtgtgtgtgtgtgtgtgtgttcatgggttttaaaagaacagtattttacaaaaggtgtagcttttataagagtgcagaaaagggaaggatgtgtttttttctctcactatagtataagaatctattttggagaaaaaaagaaaatatgagggtctcgaagcatgatttttatataactagtttcagttttatctaataacttactttttaaatcaatatttatcaacaatctttccttgtatgcagtgctttcaaaagatggttttgagtgtccagtgaaacttatgacttggatatatggttgaagaatcaaaacaaaagcaaaaaaaaaaagcaaaaaaagaaaagagaaaaaaagaaaaaatgcaaatggaataattttctattatattttagacaaacatatcattttcgagtattttaaatactgaattcatagttgttgttttttaaattccaacagtaacagctgaatggtttaatctgactggcttcctaagaaatgtttaagactcagctttaaaaagaagttaacattcatatctctgttttgaaatcaaaaatcatatttcaaaattctttcctaggaccatctatgtgtctcccctcccctccacaaaaaggagaaagagtgcattaaaatgtttagttgggttttttaatttttaatttttatgttatgttttgctttgttttaagtaaacaaaaatttttctttctttactgcatgcatagcacttaataaaatggatttttaaaaaatccactagtaatatcagaatgtccagggagtgactgtcactacaatgatggtttagtttacttctgttccaccttttgattgaaatatttagttgttaggctgaaagcctcggcagttaagaacttgcctgagttttcttcgttcagcaacttgacagtttgactgatgtgcattatatatagctcaattatgtctgttttttatgctaagtaggaaaaccaaccacacacattagcaaaccggcctcaacatataattagaataaactgtcttcttgttctactcagggcctttaggtgtgttcattcacggtatggaaatacagtaaatgaaagattccaactagttgtcagtgcttcttgaaattccaaacagaaagatacattggtcaaatccaacacttggcttatcaatattaagtcttttacctaaaggcccagccgtcaccagacaacagaataatcaatctgcctgaaaatccctcctccttgtcctacactttttgcctgtttgggagaatatctttgtactccattctcctccctcagccagttactgggtcacccatccatgtgttcatgaatcaatcatcacggcctgcagagcacctgtcctaaggagggaaaatcctgtcacactgcctctccccattcgtgtgtggttttcttgatcggtgagatctgtctctgaagtcactgccagcctccctgggaacgtctatagtgcctcccctgccttatgtgatgggagttaacaactcagataagtacacctgagagcatttctatcaggtaaactgtcacttaaatggaggtgtccacatcttaattgtttctccttgacacatttctcaatccacgaagccaggagaggtagagtgaaaatcccagccatggatgaatgtactaatttgaaagccaagtgttaagtcggatgttttcccgttacactactactcagccctctcctgcggccacatcaacggatgcaagtcacagtcttaacacagcctgtgggagacaagcagtttgtgtgctcacagtatatattatagtaattagggtgacttagagcaaatactcttcagatcctatgtagtcagtgaaacaaaatggagagcgtattctgatagaaggacgtcgacggtgaatgttctggtggttgttgcctgttaagtaaactttagtgtgtaagttgagtttgtcattaaaatcataaaccagctgcggtaacagacaagcctttggctggggagttttaagcctcggtaactgctataaaactagccatccagttaggatagaatgtgtttctttctggttaaaaaaaggaaaaaccatctaagaaaatatatatgtatgtatgtgtgtatacagtggaattcaaaggaccaaagcaaaatttgaacaggaatctattaatttagaattttataagatatttattaataaatgttatttttaaacattccatttgaacagtattctgtaggatctacttgtttttaaagtgttagtccataataaactactatagttatgtgtattttcatttttcagggtttcaaatggctattctccatcatttggtggaaatgtttgcttagatctctgtgcatagacatttcaaggatttttattgctctgtgagttattttttaatcaacattctgaacagttttttttaaacatttatttctgtgtgttcatttttaaagtaagctctttcatttaggaagcagagttcagctaaagggaatcagtaactctaactggaacagctttcttgtagaagtgtaaaaacagcttcatctctgcctctctccaccccaccccaatttcctagaaagccttgcactattcagctcccttagtgctttttgtcccttcccgaacaatatgcagtagctttaagccattcaagctccattatgcagtatatctgagaagggaaaggaaacaacccatttaaatttgaataaaaccgtgcctatgcgaacagtagcaatttagaatctcttttctgcttttaaaataatttatatttaaaaattgcactttagctttttgatccctttgtatttctcttattctctttctaacctcttctctgtcctcaaacttgcctttgctctcctttacaataccccccacccctcctccaaggctctgagcggcatcatttaaaatactttacagatatttgcaccaggtacatttatgtgcgtccattggtagcacagctgagacctgtgtctcacatcagcctaggtgaagcctactacaagaatgccaaggagaagagccagtacactatatggtttatactctttatccctttattcatagcatgttttttaaaaatgttatattatgcaacagatgtgaggcagcagctaagctatacttaagaattttctctcaccttccaaaccaaagtgtcctgaataagccaggagacttattcttttgtgcaccctggtgcacatctgactgttgtcctagccatagactctctgaggccactgaaagaacagtggccctatcgatttcattcctaggtctcaaaaatacaatgttgccttgtaacataattagggacagcacctctatttcacaattataatctaaggtaggataagacgacacagcagcaataaacttacaagtaaaattcaataccaaaacaaacacaaagaaatttaaaaaacaaaaaacctagctcatcatgttgtgaaaatgaaaaagtgaatgtccattcaaaatattttactatttcttgtggagtttttcagtgatgtaatgcttgtagccaaattgcttaaagagtgtttatatatttttttccttataaattgtctattttttaaaaaagctatttaaccacagctgaagtggggggtaaggccaaattgccaacacttgttaaaagattaatactcttaagtggcactctgatacctttccaacttgtcatcagaaaggaatcaataattaccaactgttgtatttagaccaacttacaatatctagctcattagaagccaggatctagaaagctccttctaagccatttaagatattcttacattgagcttcatattatagaactttataggattggatattttacaatagaataatttagcctcaggactgagaatgtggaagctgaataaattagctttaaatacatcattaaaatcttatgcacaataagctcattagattctagttttctcctttagaataccaatgccacagacactacaggagataatgaaaggtatcagttgtgttgagtggagggagtttaagagaaaggacccttcccaaccagcagccagtagaaaatacaacctactcacctttttcccttctaagttctgctaaatcacatctgcctcatagagaaaggaatgttgcctttgagaactgtcttggagaacagataagcttgaaatgttctctctagagaggacatagggtttgggatcctctgaaaaggcccagaaaaatagctcagttcaaatacaatgttctaggacaattggaatataaatattgtccaaaaatataattaaaagaaaaaagtttagcactgtgtaaagtaagtgttaactgaggaagtcccaaaaaggtgctgtcactttaagttctggacttggggttctttgtatttgtaaacagcaaagcatttgtgtttgtttgtctatttgtaaagcaaccaccttccttattggaaggagaaaaaaaggggtacatacatgtaaatacttgctgcagcatttaatatgtttaattttgtgttaagctttttgttgcatcgtgaacacatttattgttaccaatggacaatgagttcattaagactgttcaactaggtcagatttttacatctctttctagcaagaagagacaagattttgtgcatttgtacaaatgttaatatcactgcaattccaatataataaagcactcaaatgcaaataa

SEQ ID NO: 257135 - DNA, 2319 bp, Artificial Sequence
  derived and/or modified sequence
ttttagtggtggagtcaatttatttctgaaacgatctcatttacctgaatgaggagctcatatttattttcaggatttatgaggaatccaagatgaatttggagcaggagaggccgtttgtctgcagtgccccaggctgctcccagcgcttcccaacagaggaccatctgatgattcataggcacaaacatgaaatgactttgaagtttccttcaataaaaacagacaatatgttatcagatcaaactccgaccccaacgagattcctgaagaactgcgaggaggtgggcctcttcagcgagctggactgctccctggagcacgagttcaggaaggctcaggaagaggagagcagcaagcggaatatctcgatgcataatgcagttggtggggccatgacggggcccggaactcaccagcttagcagcgctcggctgcccaaccatgacaccaacgttgtgattcagcaagccatgccgtcgcctcagtccagctctgtcatcactcaggcaccttccaccaaccgccagatcgggcctgtcccaggctctctatcttctctgctacatctccacaacagacagagacagcccatgccagcctccatgcctgggaccctgcccaaccctacaatgccaggatcttccgccgtcttgatgccaatggagcgacaaatgtcagtgaactccagcatcatggggatgcaaggtccaaatctcagcaacccctgtgcttctccccaggtccagccaatgcattcagaagccaaaatgaggttgaaggctgcattgactcaccaccctgctgccatgtcaaatgggaacatgaacaccatgggacacatgatggagatgatgggctcccggcaggaccagacgccacaccatcacatgcactcgcacccgcatcagcaccagacactgccaccccatcacccttacccacaccagcaccagcacccagcacaccatcctcaccctcaaccccatcaccagcagaaccatccacatcaccactcccattcccaccttcatgcacacccagcacatcaccagacctcgccacatccgcccctgcacaccggcaaccaagcacaggtttcaccagcaacacaacagatgcagccaacccagacaatacagccaccccagcccacaggggggcgccggcgaagggtggtagacgaggatccggacgagaggcggcggaaatttctggaacggaaccgggcagctgccacccgctgcagacagaagaggaaggtctgggtgatgtcattggaaaagaaagcagaagaactcacccagacaaacatgcagcttcagaatgaagtgtctatgttgaaaaatgaggtggcccagctgaaacagttgttgttaacacataaagactgcccaataacagccatgcagaaagaatcacaaggatatctaagtccagagagtagccctcctgctagtcctgtcccagcttgctcccagcaacaagtcatccagcataataccatcactacttcctcatcggtcagcgaggtggtaggaagctccaccctcagccagctcaccactcacagaacagacctgaatccgattctttaaaatgcaccatcagacctggcctccaagaagagctgtagcgtaccatgcgtcctttcttttaagggcatttttagaattaactcagacctggaagactcctcagttcttcaaagactggctttcatttttatagttattatggaaatgttgtcttttatacttagttatataagaaaaaagggagttatgcaattaatatctatcagcttgggaaacgctttggtgcttttctccagttttctggtaccagttacttgtttataaactgaaccttttctgtatatagccatggtttcattcttatcagtccaaccctttgcctgaaacattgaatcttgttaaaccacagcttttagctaaaatgaggtatacctagatgtcaagtaagacagatccaaggtaactgggtaggaaatcttttgacatcttaactcatgttgagtttgtgctgtggtgtcaccagaattccagataaacacacagcctttcccatacctttttttttcttactataaaatattataagatccattgatgtccaaataataccaccaagcatctcttcacctctcctcctcttggtccacttgctaatgcccagttttcttctccatttccactttttcttaggctccctatttactattcattttgacttccttctgttttatttttttccctttagcattgcatgtgaataagaaaataatgtttaaagaaa

SEQ ID NO: 257136 - DNA, 563 bp, Artificial Sequence
  derived and/or modified sequence
acccgggctccgctcttgccttctccacacttgtttgagacctggcaaggtgcggagccctccagaagtgcggtcaagcggcagcggagacggcgagccaggaacctccccccgcgtccccagcttcccagcgtggcggcggaacccccggagaaagaataaagactggatacaggtccattacgtcattctgcaggccaatttatgaggaatccaagatgaatttggagcaggagaggccgtttgtctgcagtgccccaggctgctcccagcgcttcccaacagaggaccatctgatgattcataggcacaaacatgaaatgactttgaagtttccttcaataaaaacagacaatatgttatcagatcaaactccgaccccaacgagattcctgaagaactgcgaggaggtgggcctcttcagcgagctggactgctccctggagcacgagttcaggaaggctcaggaagaggagagcagcaagcggaatatctcgatgcataatgcagttggtggggccatgacggggcccggaactcaccagcttagcagcgctcggctg

SEQ ID NO: 257137 - DNA, 1527 bp, Artificial Sequence
  derived and/or modified sequence
atgatctacgaggagagcaagatgaacctggagcaggagagacccttcgtgtgcagcgcccccggctgcagccagagattccccaccgaggaccacctgatgatccacagacacaagcacgagatgaccctgaagttccccagcatcaagaccgacaacatgctgagcgaccagacccccacccccaccagattcctgaagaactgcgaggaggtgggcctgttcagcgagctggactgcagcctggagcacgagttcagaaaggcccaggaggaggagagcagcaagagaaacatcagcatgcacaacgccgtgggcggcgccatgaccggccccggcacccaccagctgagcagcgccagactgcccaaccacgacaccaacgtggtgatccagcaggccatgcccagcccccagagcagcagcgtgatcacccaggcccccagcaccaacagacagatcggccccgtgcccggcagcctgagcagcctgctgcacctgcacaacagacagagacagcccatgcccgccagcatgcccggcaccctgcccaaccccaccatgcccggcagcagcgccgtgctgatgcccatggagagacagatgagcgtgaacagcagcatcatgggcatgcagggccccaacctgagcaacccctgcgccagcccccaggtgcagcccatgcacagcgaggccaagatgagactgaaggccgccctgacccaccaccccgccgccatgagcaacggcaacatgaacaccatgggccacatgatggagatgatgggcagcagacaggaccagaccccccaccaccacatgcacagccacccccaccagcaccagaccctgcccccccaccacccctacccccaccagcaccagcaccccgcccaccacccccacccccagccccaccaccagcagaaccacccccaccaccacagccacagccacctgcacgcccaccccgcccaccaccagaccagcccccacccccccctgcacaccggcaaccaggcccaggtgagccccgccacccagcagatgcagcccacccagaccatccagcccccccagcccaccggcggcagaagaagaagagtggtggacgaggaccccgacgagagaagaagaaagttcctggagagaaacagagccgccgccaccagatgcagacagaagagaaaggtgtgggtgatgagcctggagaagaaggccgaggagctgacccagaccaacatgcagctgcagaacgaggtgagcatgctgaagaacgaggtggcccagctgaagcagctgctgctgacccacaaggactgccccatcaccgccatgcagaaggagagccagggctacctgagccccgagagcagcccccccgccagccccgtgcccgcctgcagccagcagcaggtgatccagcacaacaccatcaccaccagcagcagcgtgagcgaggtggtgggcagcagcaccctgagccagctgaccacccacagaaccgacctgaaccccatcctgtag

SEQ ID NO: 257138 - protein, 316 aa, Artificial Sequence
  derived and/or modified sequence
MTRTYENFQYLENKVKVQGFKNGPLPLQSLLQRLCSGPCHLLLSLGLGLLLLVIICVVGFQNSKFQRDLVTLRTDFSNFTSNTVAEIQALTSQGSSLEETIASLKAEVEGFKQERQAGVSELQEHTTQKAHLGHCPHCPSVCVPVHSEMLLRVQQLVQDLKKLTCQVATLNNNASTEGTCCPVNWVEHQDSCYWFSHSGMSWAEAEKYCQLKNAHLVVINSREEQNFVQKYLGSAYTWMGLSDPEGAWKWVDGTDYATGFQNWKPGQPDDWQGHGLGGGEDCAHFHPDGRWNDDVCQRPYHWVCEAGLGQTSQESH

SEQ ID NO: 257139 - DNA, 951 bp, Artificial Sequence
  derived and/or modified sequence
atgacgcgcacctacgagaatttccaatacctagagaataaggtgaaggtacagggctttaagaacggccctctcccgctgcagtcgctgctgcagaggttatgttctggaccatgtcatcttttgctgtcacttgggctggggctcctgctcctcgtaatcatttgcgtggtgggatttcaaaattcgaagtttcagcgagatctggtgacactcaggacagacttttctaattttacatcgaataccgttgccgaaatacaggccctgactagtcagggtagttctctggaagagaccatcgccagcctcaaggcagaggtcgaaggctttaagcaggagcgccaggccggagtgagcgaactgcaggaacacaccacacagaaagcccacttgggacactgtccacactgtccttccgtgtgtgtgcccgtacactccgaaatgctcctgcgagttcagcagctggtgcaggacctcaagaagctgacgtgccaggttgcgacactcaacaacaacgcttccactgagggaacatgttgccccgtgaactgggtggaacatcaagacagttgttactggtttagccacagtggcatgtcgtgggctgaagcagaaaaatactgtcagttaaagaacgcacaccttgtagtcataaacagccgcgaggaacagaacttcgttcagaaatatctcgggagcgcatacacctggatgggcttgtccgatcccgagggggcatggaaatgggtcgatggcacagactatgcaactggattccaaaactggaagcctggccaaccagacgattggcagggccacgggttgggaggcggcgaggactgtgctcatttccatcccgatggtagatggaacgatgacgtctgtcagcgcccatatcactgggtgtgtgaggcaggtctgggacagacctctcaggaaagccattag

SEQ ID NO: 257140 - DNA, 951 bp, Artificial Sequence
  derived and/or modified sequence
atgaccaggacctatgagaacttccagtacctggagaacaaggtgaaggtgcagggcttcaagaatggccccctgcccctgcagagcctgctgcagaggctgtgcagcggcccctgccacctgctgctgagcctgggcctgggcctgctgctgctggtgatcatctgtgtggtgggcttccagaacagcaagttccagagggacctggtgaccctgaggacagacttcagcaacttcaccagcaacacagtggccgagatccaggccctgaccagccagggcagcagcctggaggagaccatcgccagcctgaaggccgaggtggagggcttcaagcaggagcggcaggccggcgtgtctgagctgcaggagcacaccacccagaaggcccacctgggccactgcccccactgccccagcgtgtgtgtgcctgtgcacagcgagatgctgctgcgggtgcagcagctggtgcaggacctgaagaagctgacctgccaggtggccaccctgaacaacaatgccagcacagagggcacctgctgccctgtgaactgggtggagcaccaggacagctgctactggttcagccacagcggcatgtcctgggccgaggccgagaagtactgccagctgaagaatgcccacctggtggtgatcaacagccgggaggagcagaactttgtgcagaagtacctgggcagcgcctacacctggatgggcctgagtgaccctgagggcgcctggaagtgggtggatggaacagattatgccaccggcttccagaactggaagccaggccagccagatgactggcagggccacggcctgggcggcggggaggactgtgcccacttccacccagatggccgctggaatgatgatgtgtgccagaggccctaccactgggtgtgtgaggccggcctgggccagaccagccaggagagccactag

SEQ ID NO: 257141 - DNA, 951 bp, Artificial Sequence
  derived and/or modified sequence
atgacccggacctacgagaacttccagtacctggagaacaaggtgaaagtgcagggatttaagaacggccccctaccgctgcagtccttgctgcagcggctctgctctgggccgtgtcatctccttttgtctcttgggctgggactccttctgctggttatcatttgcgtggtcgggttccagaactctaagttccagcgggacctggtgactctgaggacggacttcagtaacttcacctccaataccgtggccgagattcaagccctgacctctcagggttcatccctggaagagactattgcttcgctcaaagcagaagttgaagggtttaagcaggaaaggcaggctggcgtttctgagcttcaggagcacactacccagaaagcacacctcggccactgtccccactgcccatcagtttgcgtgcccgtccactcggaaatgctgctgagagtccagcagctcgtgcaggacctgaagaagttgacgtgtcaggtcgctacgctcaacaacaatgcatcgaccgaggggacatgttgtcccgttaactgggtagaacaccaagactcgtgctattggttctcccacagcgggatgtcctgggccgaggcagagaagtactgccaactcaagaacgcccacttggtcgtgattaattcccgggaggagcaaaattttgtccagaagtatttaggttccgcttacacatggatgggcctgagtgaccctgagggagcatggaagtgggtggacggtacagattacgccacagggtttcagaactggaagccaggtcaacctgacgactggcagggccacgggctcggcgggggcgaggattgcgcgcatttccaccctgacggtagatggaacgacgatgtttgccaacgcccctaccactgggtgtgtgaggctgggctggggcagactagccaggagtctcattag

SEQ ID NO: 257142 - DNA, 951 bp, Artificial Sequence
  derived and/or modified sequence
atgaccagaacctacgaaaacttccagtacctggagaataaggttaaggtacaaggattcaagaacggcccactgcctcttcagagtcttctgcagagactttgttctggaccttgccaccttcttctctcccttggcctggggctgctgcttttggtcatcatctgcgtggttggctttcagaactctaagtttcagcgcgacttagtgaccttgagaacagactttagtaactttacatcaaataccgtcgcagagattcaagcactgacgtcacagggtagttcgcttgaggaaactatagcctcactgaaagctgaggtcgaaggttttaagcaggaacggcaggcgggtgtctcggagctgcaggagcatacaacacaaaaggcccacctcgggcattgcccacactgcccaagtgtgtgcgtgcctgtgcactcagaaatgcttctgcgagtacaacagctcgtgcaggacctaaagaagctgacatgccaggtggcaactctgaacaacaacgcatccaccgaaggcacttgttgccccgtaaactgggttgaacatcaggactcttgttattggttctcccattcaggcatgagttgggctgaggccgagaaatactgccagctcaaaaacgcccacctagtcgtaataaatagcagagaagaacaaaatttcgttcagaagtatctgggcagtgcgtacacgtggatggggctgtccgatcccgaaggggcatggaagtgggtcgacggcacggactacgccactggcttccagaactggaaacccggacaaccagacgactggcaggggcacggtctggggggtggcgaggactgtgcccattttcaccccgatggaagatggaacgatgacgtgtgtcagcgtccctaccattgggtctgtgaagctgggctcggtcagactagccaggagagtcactag

SEQ ID NO: 257143 - DNA, 1770 bp, Artificial Sequence
  derived and/or modified sequence
ggtctctgtgtgttctaatccctgttcattctcatttactgtctaaagttgaggagatgggatgtcccagatgatagggctcctgggatttcagacccaagaccagcaggactccagtcacctctaccccagctctccaggacacagcgctcccaactctgagtgacgtcccacctctggtccttgcagcacaaccaacgtgggaatcacaccctccagacctcccacagctccaccccagactgggcgccggccctgcctccatttcagctgtgacaacctcagagccgtgttggcccaagcatgacaaggacgtatgaaaacttccagtacttggagaataaggtgaaagtccaggggtttaaaaatgggccacttcctctccagtccctcctgcagcgtctctgctctgggccctgccatctcctgctgtccctgggcctcggcctcctgctgctggtcatcatctgtgtggttggattccaaaattccaaatttcagagggacctggtgaccctgagaacagattttagcaacttcacctcaaacactgtggcggagatccaggcactgacttcccagggcagcagcttggaagaaacgatagcatctctgaaagctgaggtggagggtttcaagcaggaacggcaggcaggggtatctgagctccaggaacacactacgcagaaggcacacctaggccactgtccccactgcccatctgtgtgtgtcccagttcattctgaaatgctcctgcgagtccagcagctggtgcaagacctgaagaaactgacctgccaggtggctactctcaacaacaatgcctccactgaagggacctgctgccctgtcaactgggtggagcaccaagacagctgctactggttctctcactctgggatgtcctgggccgaggctgagaagtactgccagctgaagaacgcccacctggtggtcatcaactccagggaggagcagaattttgtccagaaatatctaggctccgcatacacctggatgggcctcagtgaccctgaaggagcctggaagtgggtggatggaacagactatgcgaccggcttccagaactggaagccaggccagccagacgactggcaggggcacgggctgggtggaggcgaggactgtgctcacttccatccagacggcaggtggaatgacgacgtctgccagaggccctaccactgggtctgcgaggctggcctgggtcagaccagccaggagagtcactgagctgcctttggtgggaccacccggccacagaaatggcggtgggaggaggactcttctcacgacctcctcgcaagaccgctctgggagagaaataagcactgggagattggaagcactgctaacattttgaatttttttctctttaattttaaaaagatggtatagtgttcttaagcttttattttttttccaacttttgaaagtcaacttcatgaaggtataatttttacataataaaaatgcactcatttaaagagtagagatgactttgacaaatatgcatgcctaggtgactaccactccgatcgcaatagataacattgccatcgcccccaccagtcccctcatgcctctgggcagtccaaccacttccctgtttccaggccagtgatctacttctttttcactatttattggccttgcctcttctagagcttctagaacttcatataagtgaaatcatacactctcgtgtatatacttcatataagtgaatatatactctcgtgagaactt

SEQ ID NO: 257144 - DNA, 951 bp, Artificial Sequence
  derived and/or modified sequence
atgaccagaacctacgagaacttccagtacctggagaacaaggtgaaggtgcagggcttcaagaacggccccctgcccctgcagagcctgctgcagagactgtgcagcggcccctgccacctgctgctgagcctgggcctgggcctgctgctgctggtgatcatctgcgtggtgggcttccagaacagcaagttccagagagacctggtgaccctgagaaccgacttcagcaacttcaccagcaacaccgtggccgagatccaggccctgaccagccagggcagcagcctggaggagaccatcgccagcctgaaggccgaggtggagggcttcaagcaggagagacaggccggcgtgagcgagctgcaggagcacaccacccagaaggcccacctgggccactgcccccactgccccagcgtgtgcgtgcccgtgcacagcgagatgctgctgagagtgcagcagctggtgcaggacctgaagaagctgacctgccaggtggccaccctgaacaacaacgccagcaccgagggcacctgctgccccgtgaactgggtggagcaccaggacagctgctactggttcagccacagcggcatgagctgggccgaggccgagaagtactgccagctgaagaacgcccacctggtggtgatcaacagcagagaggagcagaacttcgtgcagaagtacctgggcagcgcctacacctggatgggcctgagcgaccccgagggcgcctggaagtgggtggacggcaccgactacgccaccggcttccagaactggaagcccggccagcccgacgactggcagggccacggcctgggcggcggcgaggactgcgcccacttccaccccgacggcagatggaacgacgacgtgtgccagagaccctaccactgggtgtgcgaggccggcctgggccagaccagccaggagagccactag

SEQ ID NO: 257145 - protein, 691 aa, Artificial Sequence
  derived and/or modified sequence
MEKIYSRGELHHFIDGFNEEKSNWMRYVNPAHSPREQNLAACQNGMNIYFYTIKPIPANQELLVWYCRDFAERLHYPYPGELTMMNLTQTQSSLKQPSTEKNELCPKNVPKREYSVKEILKLDSNPSKGKDLYRSNISPLTSEKDLDDFRRRGSPEMPFYPRVVYPIRAPLPEDFLKASLAYGIERPTYITRSPIPSSTTPSPSARSSPDQSLKSSSPHSSPGNTVSPVGPGSQEHRDSYAYLNASYGTEGLGSYPGYAPLPHLPPAFIPSYNAHYPKFLLPPYGMNCNGLSAVSSMNGINNFGLFPRLCPVYSNLLGGGSLPHPMLNPTSLPSSLPSDGARRLLQPEHPREVLVPAPHSAFSFTGAAASMKDKACSPTSGSPTAGTAATAEHVVQPKATSAAMAAPSSDEAMNLIKNKRNMTGYKTLPYPLKKQNGKIKYECNVCAKTFGQLSNLKVHLRVHSGERPFKCQTCNKGFTQLAHLQKHYLVHTGEKPHECQVCHKRFSSTSNLKTHLRLHSGEKPYQCKVCPAKFTQFVHLKLHKRLHTRERPHKCSQCHKNYIHLCSLKVHLKGNCAAAPAPGLPLEDLTRINEEIEKFDISDNADRLEDVEDDISVISVVEKEILAVVRKEKEETGLKVSLQRNMGNGLLSSGCSLYESSDLPLMKLPPSNPLPLVPVKVKQETVEPMDP

SEQ ID NO: 257146 - DNA, 2076 bp, Artificial Sequence
  derived and/or modified sequence
atggaaaaaatctattcaaggggtgaactgcatcactttatagatgggtttaatgaagaaaagagtaattggatgaggtatgtgaaccccgcacacagtcctagagagcagaaccttgccgcttgtcagaatggaatgaacatctacttttacacgatcaaaccaatccctgctaatcaagagctgttagtatggtattgccgtgacttcgcggaaagactccactatccttatcccggagagctaaccatgatgaatctcacgcagacacagagctcgcttaaacagccttcgacagaaaagaacgagctgtgtccgaaaaacgttccgaaaagagaatatagcgtaaaggaaatactgaagctggattctaacccttcaaagggtaaagatctctatcgtagcaacattagccctctcacatccgaaaaggacctagacgacttccggcgcagaggatcccccgagatgccattttatccccgggtggtgtaccctataagagcgcccttgccggaggacttcctgaaggcctctcttgcttatgggatcgagcgacccacctatatcactcgatcacccattccaagcagtacaactccaagtccctcggcccgcagctcccctgatcagtctctcaaatccagttccccgcatagctcccctggaaatactgtctcgcccgtggggccaggctctcaggagcatagggatagttacgcatatctgaacgctagctacggaacagaaggcctgggatcctacccagggtacgcccccctcccgcacctgcctcctgccttcatcccgtcatataatgcccactatcctaaattcctcctcccgccctacggaatgaattgcaacggcctgtcagcggttagtagcatgaatggaatcaacaactttggtctgtttccccggctgtgtccagtttattccaacctacttggaggaggctctctgccccatcctatgctcaaccctacttcactccctagctccctacccagtgatggcgcgcggcgtctgcttcagcccgaacacccacgcgaggttctggtacctgccccgcattctgccttcagcttcacgggtgctgccgcctccatgaaggataaagcgtgtagccccacatccgggagcccaactgctggcacagccgctaccgctgagcacgtagtccagcctaaggcaacttctgctgccatggctgcacctagctccgacgaggcaatgaaccttattaagaataagcggaacatgaccggctataagacactgccatatcccctgaagaaacagaatggcaaaattaagtacgagtgcaacgtctgcgccaaaactttcgggcagctgtcaaacctcaaggtgcatctgagagtgcattccggcgaacgcccctttaagtgtcaaacgtgtaataaaggctttacccagcttgcgcacttgcaaaagcattatctggtacacacgggcgagaaaccacacgagtgtcaggtctgtcacaagcggttctccagtacctctaatctgaaaactcacctccgtctccacagcggcgaaaaaccctaccaatgtaaggtgtgtcccgctaagttcactcagttcgtgcacctgaaacttcataagcgcctccacaccagagaacgtccccacaagtgtagccagtgccataaaaattacattcatctctgtagcctcaaggtgcatctaaagggaaactgtgctgccgcacctgctcctggtctgcctcttgaagatttaactcggattaatgaggagatcgaaaaattcgatatatctgataacgctgatcggttagaggacgttgaagacgacattagcgttatcagcgtggtagagaaggagatccttgccgtcgtccgaaaggaaaaagaggaaaccggcctcaaggtctcattgcaacgcaacatggggaacgggctcctgtcgtctggctgttctctctatgaaagttctgaccttccactcatgaaactccccccctcaaatcctctccccctggtacctgtgaaagtgaaacaggaaaccgtagagccaatggacccctag

SEQ ID NO: 257147 - DNA, 2076 bp, Artificial Sequence
  derived and/or modified sequence
atggagaagatctacagcagaggagagctgcaccacttcattgatggcttcaatgaggagaagagcaactggatgagatatgtgaacccagcccacagcccccgggagcagaacctggccgcctgccagaatggcatgaacatctacttctacaccatcaagcccatcccagccaaccaggagctgctggtgtggtactgccgggactttgctgagcggctgcactacccctacccaggagagctgaccatgatgaacctgacccagacccagagcagcctgaagcagcccagcacagagaagaatgagctgtgccccaagaatgtgcccaagcgggagtacagcgtgaaggagatcctgaagctggacagcaaccccagcaagggcaaggacctgtaccgcagcaacatcagccccctgaccagcgagaaggacctggatgacttcagaagaagaggcagccctgagatgcccttctacccccgggtggtgtaccccatccgggcccccctgcctgaggacttcctgaaggccagcctggcctacggcatcgagcggcccacctacatcaccaggagccccatccccagcagcaccacccccagccccagcgcccggagcagcccagaccagagcctgaagagcagcagcccccacagcagccctggcaacacagtgtcccctgtgggccctggcagccaggagcaccgggacagctatgcctacctgaatgccagctatggaacagagggcctgggcagctacccaggctacgcccccctgccccacctgcccccagccttcatccccagctacaatgcccactaccccaagttcctgctgcccccctacggcatgaactgcaatggcctgtctgctgtgtcctccatgaatggcatcaacaactttggcctcttcccccggctgtgccctgtgtacagcaacctgctgggcggcggcagcctgccccaccccatgctgaaccccaccagcctgcccagcagcctgcccagtgatggagcccggcggctgctgcagcctgagcacccccgggaggtgctggtgcctgccccccacagcgccttctccttcaccggggccgccgcctccatgaaggacaaggcctgcagccccaccagcggcagccccacagctggaacagctgccacagctgagcacgtggtgcagcccaaggccaccagcgctgccatggccgcccccagcagtgatgaggccatgaacctgatcaagaacaagaggaacatgacaggctacaagaccctgccctaccccctgaagaagcagaatggcaagatcaagtatgagtgcaatgtgtgtgccaagaccttcggccagctgagcaacctgaaggtgcacctgcgggtgcacagcggggagcggcccttcaagtgccagacctgcaacaagggcttcacccagctggcccacctgcagaagcactacctggtgcacactggagagaagccccatgagtgccaggtgtgccacaagcgcttcagcagcaccagcaacctgaagacccacctgcggctgcacagcggggagaagccctaccagtgcaaggtgtgcccagccaagttcacccagtttgtgcacctgaagctgcacaagaggctgcacacccgggagcggccccacaagtgcagccagtgccacaagaactacatccacctgtgcagcctgaaggtgcacctgaagggcaactgtgccgccgccccagcccctggcctgcccctggaggacctgacccgcatcaatgaggagattgagaagtttgacatcagtgacaatgctgaccggctggaggatgtggaggatgacatcagcgtcatctctgtggtggagaaggagatcctggccgtggtgaggaaggagaaggaggagaccggcctgaaggtgtccctgcagaggaacatgggaaatggcctgctgagcagcggctgcagcctgtatgagagcagtgacctgcccctgatgaagctgccccccagcaaccccctgcccctggtgcctgtgaaggtgaagcaggagaccgtggagcccatggacccctag

SEQ ID NO: 257148 - DNA, 2076 bp, Artificial Sequence
  derived and/or modified sequence
atggagaagatctacagccggggcgagctgcaccacttcatcgacggtttcaacgaagagaagagtaactggatgcgttacgtaaaccccgcgcactcaccaagagagcagaacctcgcagcctgtcagaacggaatgaacatctacttttacactatcaagccaatacctgctaaccaggagctgctcgtctggtattgtcgcgattttgctgaacggctccactacccttaccccggggagctcacaatgatgaatctgacacaaactcagagctccctgaaacagccttctacagagaaaaacgaactgtgtcccaagaatgtgccaaagagggaatattctgtgaaagagattctcaagctcgatagtaatccatcaaaagggaaggacctttatagaagtaatataagtccactgacatccgagaaagatctcgatgatttcagaagacgcggcagtcccgagatgccattctacccgagagttgtctaccctattagggctcccttacccgaggacttcctgaaagcctcactcgcatatggcatcgaaaggcctacctacatcacccgaagccctattccatcgtccacgactccaagcccctcagcccgttcgtcccccgatcagtcactcaaatctagcagtccacatagcagccctggcaataccgtctcacctgtgggccccgggtctcaggagcatagggattcctacgcttacctcaacgcatcctacggaaccgagggactgggaagctaccctggctatgcacccctgccccacctgccccctgcgttcattccttcatacaacgctcactaccccaagttcctgctcccaccgtacgggatgaactgcaatggactgtcggccgtgagctccatgaacggcatcaacaacttcgggcttttcccccggctgtgcccagtttactctaacctattaggcggcggttcattgcctcatccgatgctgaatccgacctctcttccatccagtctccctagcgatggggcccggaggctcctgcagcccgagcatccccgggaggtgttggtgccagccccccattctgccttcagctttactggcgccgcagcgtccatgaaggataaagcatgcagtccaacatctgggtcaccaaccgctggtaccgccgctactgcagaacacgtggtgcaaccgaaggccacttctgctgcaatggcagcgccctcgagcgacgaagcgatgaatctgatcaagaacaagaggaacatgacagggtataagaccctgccatacccccttaagaagcagaacgggaagatcaagtacgaatgtaacgtttgtgctaagacattcggacaattatctaatctcaaggttcacctccgtgtgcattccggcgagcggccttttaagtgccagacctgcaacaagggattcacacagttggcacatctccagaaacattacctggtgcacaccggagagaaaccgcacgaatgccaggtgtgccacaagagattttcaagtactagtaatctgaagacccatctgcggctccacagcggcgagaagccatatcagtgcaaagtgtgtcccgctaaattcacccagttcgtccatctcaagcttcacaaaaggttgcatacacgcgaacgcccgcacaagtgtagccagtgccataagaactacattcacttgtgctccttgaaagtacacctgaagggcaactgtgcagctgctcctgccccaggtttaccgctggaagacctcactaggataaatgaggagattgaaaagttcgatataagcgataacgccgataggctggaggacgtcgaggacgacatctccgtgatttcggtggtggaaaaggagattttggcagttgtcaggaaggagaaagaagaaactggtctgaaggtgtctctgcagcggaatatgggcaacggtctcctgtcatccggatgtagtctgtacgagtcaagtgatctgcctctaatgaaactgcctccctccaacccactgcccctggtcccagtaaaagtgaagcaggaaaccgtcgaacctatggatccatag

SEQ ID NO: 257149 - DNA, 4675 bp, Artificial Sequence
  derived and/or modified sequence
cagtagcatcgcccatttgccattcactgcagtagcaaaagtagtactctgtggtgggttaatcggtttgaggcagctccttaaatgaacatttgtgtttcatttttctgttattttcccgaacatgaaaagacgataaaactgaaatggaaaagatctattccagaggggagcttcaccacttcattgacggctttaatgaagagaaaagcaactggatgcgctatgtgaatccagcacactctccccgggagcaaaacctggctgcgtgtcagaacgggatgaacatctacttctacaccattaagcccatccctgccaaccaggaacttcttgtgtggtattgtcgggactttgcagaaaggcttcactacccttatcccggagagctgacaatgatgaatctcacacaaacacagagcagtctaaagcaaccgagcactgagaaaaatgaactctgcccaaagaatgtcccaaagagagagtacagcgtgaaagaaatcctaaaattggactccaacccctccaaaggaaaggacctctaccgttctaacatttcacccctcacatcagaaaaggacctcgatgactttagaagacgtgggagccccgaaatgcccttctaccctcgggtcgtttaccccatccgggcccctctgccagaagactttttgaaagcttccctggcctacgggatcgagagacccacgtacatcactcgctcccccattccatcctccaccactccaagcccctctgcaagaagcagccccgaccaaagcctcaagagctccagccctcacagcagccctgggaatacggtgtcccctgtgggccccggctctcaagagcaccgggactcctacgcttacttgaacgcgtcctacggcacggaaggtttgggctcctaccctggctacgcacccctgccccacctcccgccagctttcatcccctcgtacaacgctcactaccccaagttcctcttgcccccctacggcatgaattgtaatggcctgagcgctgtgagcagcatgaatggcatcaacaactttggcctcttcccgaggctgtgccctgtctacagcaatctcctcggtgggggcagcctgccccaccccatgctcaaccccacttctctcccgagctcgctgccctcagatggagcccggaggttgctccagccggagcatcccagggaggtgcttgtcccggcgccccacagtgccttctcctttaccggggccgccgccagcatgaaggacaaggcctgtagccccacaagcgggtctcccacggcgggaacagccgccacggcagaacatgtggtgcagcccaaagctacctcagcagcgatggcagcccccagcagcgacgaagccatgaatctcattaaaaacaaaagaaacatgaccggctacaagacccttccctacccgctgaagaagcagaacggcaagatcaagtacgaatgcaacgtttgcgccaagactttcggccagctctccaatctgaaggtccacctgagagtgcacagtggagaacggcctttcaaatgtcagacttgcaacaagggctttactcagctcgcccacctgcagaaacactacctggtacacacgggagaaaagccacatgaatgccaggtctgccacaagagatttagcagcaccagcaatctcaagacccacctgcgactccattctggagagaaaccataccaatgcaaggtgtgccctgccaagttcacccagtttgtgcacctgaaactgcacaagcgtctgcacacccgggagcggccccacaagtgctcccagtgccacaagaactacatccatctctgtagcctcaaggttcacctgaaagggaactgcgctgcggccccggcgcctgggctgcccttggaagatctgacccgaatcaatgaagaaatcgagaagtttgacatcagtgacaatgctgaccggctcgaggacgtggaggatgacatcagtgtgatctctgtagtggagaaggaaattctggccgtggtcagaaaagagaaagaagaaactggcctgaaagtgtctttgcaaagaaacatggggaatggactcctctcctcagggtgcagcctttatgagtcatcagatctacccctcatgaagttgcctcccagcaacccactacctctggtacctgtaaaggtcaaacaagaaacagttgaaccaatggatccttaagattttcagaaaacacttattttgtttcttaagttatgacttggtgagtcagggtgcctgtaggaagtggcttgtacataatcccagctctgcaaagctctctcgacagcaaatggtttcccctcacctctggaattaaagaaggaactccaaagttactgaaatctcagggcatgaacaaggcaaaggccatatatatatatatatatatatctgtatacatattatatatacttatttacacctgtgtctatatatttgcccctgtgtattttgaatatttgtgtggacatgtttgcatagccttcccattactaagactattacctagtcataattattttttcaatgataatccttcataatttattatacaatttatcattcagaaagcaataattaaaaaagtttacaatgactggaaagattccttgtaatttgagtataaatgtatttttgtcttgtggccattctttgtagataatttctgcacatctgtataagtacctaagatttagttaaacaaatatatgacttcagtcaacctctctctctaataatggtttgaaaatgaggtttgggtaattgccaatgttggacagttgatgtgttcattcctgggatcctatcatttgaacagcattgtacataacttgggggtatgtgtgcaggattacccaagaataacttaagtagaagaaacaagaaagggaatcttgtatatttttgttgatagttcatgtttttcccccagccacaattttaccggaagggtgacaggaaggctttaccaacctgtctctccctccaaaagagcagaatcctcccaccgccctgccctccccaccgagtcctgtggccattcagagcggccacatgacttttgcatccattgtattatcagaaaatgtgaagaagaaaaaaatgccatgttttaaaaccactgcgaaaatttccccaaagcataggtggctttgtgtgtgtgcgatttgggggcttgagtctgggtggtgttttgttgttggtttttgttgctttttttttttttttttttttaatgtcaaaattgcacaaacatggtgctctaccaggaaggattcgaggtagataggctcaggccacactttaaaaacaaacacacaaacaacaaaaaacgggtattctagtcatcttggggtaaaagcgggtaatgaacattcctatccccaacacatcaattgtattttttctgtaaaactcagattttcctcagtatttgtgtttttacattttatggttaatttaatggaagatgaaagggcattgcaaagttgttcaacaacagttacctcattgagtgtgtccagtagtgcaggaaatgatgtcttatctaatgatttgcttctctagaggagaaaccgagtaaatgtgctccagcaagatagactttgtgttattctatcttttattctgctaagcccaaagattacatgttggtgttcaaagtgtagcaaaaaatgatgtatatttataaatctatttataccactatatcatatgtatatatatttataaccacttaaattgtgagccaagccatgtaaaagatctactttttctaagggcaaaaaaaaaaaaaaaaaaaaaagaacactcctttctgagactttgcttaatacttggtgacctcacaatcacgtcggtatgattgggcacccttgcctactgtaagagaccctaaaaccttggtgcagtggtggggaccacaaaacaaccagggaggaagagatacatcattttttagtattaaggaccatctaagacagctctattttttttttgccactttatgattatgtggtcacacccaagtcacagaaataaaaaactgactttaccgctgcaatttttctgttttcctccttactaaatactgatacattactccaatctattttataattatatttgacattttgttcacatcaactaatgttcacctgtagaagagaacaaatttcgaataatccagggaaacccaagagccttactggtcttctgtaacttccaagactgacagctttttatgtatcagtgtttgataaacacagtccttaactgaaggtaaaccaaagcatcacgttgacattagaccaaatacttttgattcccaactactcgtttgttctttttctccttttgtgctttcccatagtgagaatttttataaagacttcttgcttctctcaccatccatccttctcttttctgcctcttacatgtgaatgttgagcccacaatcaacagtggttttattttttcctctactcaaagttaaaactgaccaaagttactggctttttactttgctagaacaacaaactatcttatgtttacatactggtttacaatgttatttatgtgcaaattgtcaaaatgtaaattaaatataaatgttcatgctttaccaaaat

SEQ ID NO: 257150 - DNA, 2076 bp, Artificial Sequence
  derived and/or modified sequence
atggagaagatttacagtagaggggaactccatcatttcatcgacgggtttaacgaagaaaagtctaactggatgagatatgttaaccctgcccacagtcctagagagcagaacctcgcagcatgtcaaaacggcatgaacatatatttttacaccattaaaccaatccccgcaaaccaggagttgctggtctggtattgtcgcgatttcgcagagcgcctacattatccttatccaggcgagttgacaatgatgaatctaacacaaacacagtcctccttgaaacagccatcaaccgaaaaaaacgaattgtgccccaagaacgtgcccaagcgggaatattctgtcaaggaaattctgaagctcgattccaacccctcaaagggaaaggacctatatcgcagtaacatcagtcctctgacatctgaaaaggacctggacgacttccggagacgaggtagccctgaaatgcctttttatccacgggtcgtgtatcccatccgcgcacccctgccagaggattttttgaaagcatcattggcatatgggatcgaacggccaacatatataacccgatcgcccattccctctagtacaacaccatcaccaagcgccagatcttcacccgatcagtctctgaaaagctctagcccccactcaagtccaggaaataccgtctctcctgtggggccagggtcacaggagcaccgggattcctacgcatatttaaatgctagctacgggactgaaggcctcggatcttaccccggttacgcccctctcccccatctacccccagcttttattccatcatacaatgctcattatcccaaattcctgctccctccttatggcatgaattgcaatggacttagtgctgtctcctccatgaatggtatcaataactttgggctgtttcccaggctgtgccccgtctactcaaatctgctgggagggggaagcctgccccatcccatgcttaatccaacctctctgcccagcagtctgccttcggacggtgctaggcggttgctgcagccagagcacccacgcgaggtcttagtgcctgcaccccactctgccttcagcttcacaggtgcggcagcttcaatgaaagataaggcgtgttcccccacaagcggatctccgaccgctggcacagcggcaacagcagaacatgtggtccagccaaaggcaacaagcgcagcaatggccgcaccatcttcagatgaggcaatgaacctgataaagaataaaaggaacatgacaggctataagaccctgccttaccctctgaagaagcagaacggaaagatcaaatacgaatgtaatgtatgcgctaagaccttcgggcaactgtctaatttaaaagtgcacctgcgggtgcactctggagagcgaccattcaagtgccaaacctgtaacaaaggtttcacccagttggcccacctacaaaaacactatttggtgcatactggggagaagcctcacgaatgccaggtgtgccacaaacgcttttcgagcaccagtaacttgaagactcacctgcgcctgcactcaggcgagaagccttaccagtgtaaagtatgtccagcaaagttcacgcagttcgtgcacctgaagctgcataagcgacttcatacgcgggaaaggccacataagtgtagccagtgtcataagaactacatacacctctgcagtctgaaggttcatctgaaaggaaactgtgccgctgcccctgcccctggtctgccactggaggacctgacacgcatcaatgaggagattgagaagttcgatatatcggacaacgccgatcgtcttgaagacgtagaagatgacatctccgtgattagtgtcgtggaaaaggaaattctcgccgtggtgaggaaggaaaaagaggagaccgggcttaaggtctctttgcagcggaacatggggaacggactgctcagctccgggtgtagcctctatgagagttccgatttgccattaatgaaactaccacccagtaacccgcttccactggttcccgtgaaggtgaaacaggagaccgtggagccgatggatccctag

SEQ ID NO: 257151 - DNA, 2076 bp, Artificial Sequence
  derived and/or modified sequence
atggagaagatctacagcagaggcgagctgcaccacttcatcgacggcttcaacgaggagaagagcaactggatgagatacgtgaaccccgcccacagccccagagagcagaacctggccgcctgccagaacggcatgaacatctacttctacaccatcaagcccatccccgccaaccaggagctgctggtgtggtactgcagagacttcgccgagagactgcactacccctaccccggcgagctgaccatgatgaacctgacccagacccagagcagcctgaagcagcccagcaccgagaagaacgagctgtgccccaagaacgtgcccaagagagagtacagcgtgaaggagatcctgaagctggacagcaaccccagcaagggcaaggacctgtacagaagcaacatcagccccctgaccagcgagaaggacctggacgacttcagaagaagaggcagccccgagatgcccttctaccccagagtggtgtaccccatcagagcccccctgcccgaggacttcctgaaggccagcctggcctacggcatcgagagacccacctacatcaccagaagccccatccccagcagcaccacccccagccccagcgccagaagcagccccgaccagagcctgaagagcagcagcccccacagcagccccggcaacaccgtgagccccgtgggccccggcagccaggagcacagagacagctacgcctacctgaacgccagctacggcaccgagggcctgggcagctaccccggctacgcccccctgccccacctgccccccgccttcatccccagctacaacgcccactaccccaagttcctgctgcccccctacggcatgaactgcaacggcctgagcgccgtgagcagcatgaacggcatcaacaacttcggcctgttccccagactgtgccccgtgtacagcaacctgctgggcggcggcagcctgccccaccccatgctgaaccccaccagcctgcccagcagcctgcccagcgacggcgccagaagactgctgcagcccgagcaccccagagaggtgctggtgcccgccccccacagcgccttcagcttcaccggcgccgccgccagcatgaaggacaaggcctgcagccccaccagcggcagccccaccgccggcaccgccgccaccgccgagcacgtggtgcagcccaaggccaccagcgccgccatggccgcccccagcagcgacgaggccatgaacctgatcaagaacaagagaaacatgaccggctacaagaccctgccctaccccctgaagaagcagaacggcaagatcaagtacgagtgcaacgtgtgcgccaagaccttcggccagctgagcaacctgaaggtgcacctgagagtgcacagcggcgagagacccttcaagtgccagacctgcaacaagggcttcacccagctggcccacctgcagaagcactacctggtgcacaccggcgagaagccccacgagtgccaggtgtgccacaagagattcagcagcaccagcaacctgaagacccacctgagactgcacagcggcgagaagccctaccagtgcaaggtgtgccccgccaagttcacccagttcgtgcacctgaagctgcacaagagactgcacaccagagagagaccccacaagtgcagccagtgccacaagaactacatccacctgtgcagcctgaaggtgcacctgaagggcaactgcgccgccgcccccgcccccggcctgcccctggaggacctgaccagaatcaacgaggagatcgagaagttcgacatcagcgacaacgccgacagactggaggacgtggaggacgacatcagcgtgatcagcgtggtggagaaggagatcctggccgtggtgagaaaggagaaggaggagaccggcctgaaggtgagcctgcagagaaacatgggcaacggcctgctgagcagcggctgcagcctgtacgagagcagcgacctgcccctgatgaagctgccccccagcaaccccctgcccctggtgcccgtgaaggtgaagcaggagaccgtggagcccatggacccctag

SEQ ID NO: 257152 - protein, 300 aa, Artificial Sequence
  derived and/or modified sequence
MLSAVARGYQGWFHPCARLSVRMSSTGIDRKGVLANRVAVVTGSTSGIGFAIARRLARDGAHVVISSRKQQNVDRAMAKLQGEGLSVAGIVCHVGKAEDREQLVAKALEHCGGVDFLVCSAGVNPLVGSTLGTSEQIWDKILSVNVKSPALLLSQLLPYMENRRGAVILVSSIAAYNPVVALGVYNVSKTALLGLTRTLALELAPKDIRVNCVVPGIIKTDFSKVVRIGFMGMSLSGRTSRNIISCRGLGSQRTVQESCPSCALQMPATSTGRTLRWQATPLGSERSGGGCVAVVPGPGA

SEQ ID NO: 257153 - DNA, 903 bp, Artificial Sequence
  derived and/or modified sequence
atgctgagcgccgtggccagaggctaccagggctggttccacccctgcgccagactgagcgtgagaatgagcagcaccggcatcgacagaaagggcgtgctggccaacagagtggccgtggtgaccggcagcaccagcggcatcggcttcgccatcgccagaagactggccagagacggcgcccacgtggtgatcagcagcagaaagcagcagaacgtggacagagccatggccaagctgcagggcgagggcctgagcgtggccggcatcgtgtgccacgtgggcaaggccgaggacagagagcagctggtggccaaggccctggagcactgcggcggcgtggacttcctggtgtgcagcgccggcgtgaaccccctggtgggcagcaccctgggcaccagcgagcagatctgggacaagatcctgagcgtgaacgtgaagagccccgccctgctgctgagccagctgctgccctacatggagaacagaagaggcgccgtgatcctggtgagcagcatcgccgcctacaaccccgtggtggccctgggcgtgtacaacgtgagcaagaccgccctgctgggcctgaccagaaccctggccctggagctggcccccaaggacatcagagtgaactgcgtggtgcccggcatcatcaagaccgacttcagcaaggtggtgagaatcggcttcatgggcatgagcctgagcggcagaaccagcagaaacatcatcagctgcagaggcctgggcagccagagaaccgtgcaggagagctgccccagctgcgccctgcagatgcccgccaccagcaccggcagaaccctgagatggcaggccacccccctgggcagcgagagaagcggcggcggctgcgtggccgtggtgcccggccccggcgcctag

SEQ ID NO: 257154 - DNA, 1678 bp, Artificial Sequence
  derived and/or modified sequence
ctctggttcccttccacgctgtggaagctttgttcttttggtcttcatgataaatcttgctgctgctcactcgttgggtccgtgccacctttaagagctgtaacactcaccgcgaaggtctgcaacttcactcctggggccagcaagaccacgaatgcaccgagaggaatgaacaactctggacacaccatctttaagaaccgtaatactcaccgcaagggtctgcaacttcattcttgaagtcagtgaggccaagaacccatcaattccgtacacattttggtgactttgaagagactgtcacctatcaccaagtggtgagactattgccaagcagtgagactattgccaagtggtgagaccatcaccaagcggtgagactatcacctatcgccaagtggcctgattcagcaggaagcatctcagacaccaaccactatgctgtcagcagttgcccggggctaccagggctggtttcatccctgtgctaggctttctgtgaggatgagcagcaccgggatagacaggaagggcgtcctggctaaccgggtagccgtggtcacggggtccaccagtgggatcggctttgccatcgcccgacgtctggcccgggacggggcccacgtggtcatcagcagccggaagcagcagaacgtggaccgggccatggccaagctgcagggggaggggctgagtgtggcgggcattgtgtgccacgtggggaaggctgaggaccgggagcagctggtggccaaggccctggagcactgtgggggcgtcgacttcctggtgtgcagcgcaggggtcaaccctctggtagggagcactctggggaccagtgagcagatctgggacaagatcctaagtgtgaacgtgaagtccccagccctgctgctgagccagttgctgccctacatggagaacaggaggggtgctgtcatcctggtctcttccattgcagcttataatccagtagtggcgctgggtgtctacaatgtcagcaagacagcgctgctgggtctcactagaacactggcattggagctggcccccaaggacatccgggtaaactgcgtggttccaggaattatcaaaactgacttcagcaaagtggtgaggattggtttcatgggaatgagtctctctggaagaacttcaaggaacatcatcagctgcagaggattggggagtcagaggactgtgcaggaatcgtgtccttcctgtgctctccagatgccagctacgtcaacggggagaacattgcggtggcaggctactccactcggctctgagaggagtgggggcggctgcgtagctgtggtcccaggcccaggagcctgagggggtgtctaggtgatcatttggatctggaggcagagtctgccattctgccagactagcaatttgggggcttactcatgctaggcttgaggaagaagaaaaacgcttcggcattctccttaggacttatctgcttgtagatttggctgatccaattaacatgtggggttcttggtgtgggtctggggagctgaaggattttatggagctggtgctttggaggaatcttaagggaaaggagtagaagctcaggcctttgaaggatttcagctcctcctctctgtaatttgtgctttaagcattttttttcctaaaataaactcaaatttatcctcaa

SEQ ID NO: 257155 - DNA, 903 bp, Artificial Sequence
  derived and/or modified sequence
atgctgagcgctgtagctcggggctatcagggatggtttcacccctgtgcaaggttatccgtgaggatgtcttcaaccggaatcgatcgcaagggcgtactagctaatagagtggcagtggtcacaggcagcaccagcgggattgggttcgccatcgcaaggaggttggctagggacggggcccacgtggtgatcagctccaggaaacagcagaacgtggacagggccatggccaagctgcagggcgaggggcttagcgtcgcgggcattgtgtgccatgtaggcaaagcagaagacagggaacagttagtggccaaggctctggaacattgtggcggggtagatttcttggtttgttcggccggcgtgaaccctcttgtcggctccacattggggactagcgaacagatttgggataagattctaagtgtgaacgtaaaatcccccgcgctgctgttgagtcagcttctgccctacatggagaatcgacgcggtgccgttattctggtatcttcaatcgctgcctataatccggtggtagcgcttggtgtgtacaatgtgtctaaaacagccctgctgggtctgacacgcaccctggcactggagttagcccctaaagacatacgggtgaactgtgttgtgcccggaatcatcaagaccgacttttctaaggttgttcgaatcgggtttatgggcatgagcctttctggtcgcacatccagaaatataatatcctgcagagggctcggttcccagaggacagtgcaggaatcgtgcccctcctgcgcattacagatgcccgccacctcaacaggacgtaccctgcggtggcaggcaaccccactgggatccgaaagatcggggggcggctgcgttgccgtcgttccaggccccggagcttag

SEQ ID NO: 257156 - DNA, 903 bp, Artificial Sequence
  derived and/or modified sequence
atgctgtctgctgtggcccggggctaccagggctggttccacccctgtgcccggctgtctgtgaggatgagcagcacaggcatcgacagaaaaggagtgctggccaacagagtggccgtggtgacaggcagcaccagcggcatcggctttgccatcgcccggcggctggccagagatggagcccacgtggtgatcagcagcaggaagcagcagaatgtggaccgggccatggccaagctgcagggcgagggcctgtctgtggccggcatcgtgtgccacgtgggcaaggccgaggaccgggagcagctggtggccaaggccctggagcactgcggcggcgtggacttcctggtgtgcagcgctggggtgaaccccctggtgggcagcaccctgggcaccagcgagcagatctgggacaagatcctgtctgtgaatgtgaagagccctgccctgctgctgagccagctgctgccctacatggagaacagaagaggagctgtgatcctggtgagcagcattgctgcctacaaccctgtggtggccctgggcgtgtacaacgtgtccaagacagccctgctgggcctgaccaggaccctggccctggagctggcccccaaggacatccgggtgaactgtgtggtgcccggcatcatcaagacagacttcagcaaggtggtgcgcatcggcttcatgggcatgagcctgagcggccgcaccagcaggaacatcatcagctgccggggcctgggcagccagaggacagtgcaggagagctgccccagctgtgccctgcagatgcctgccaccagcactggaagaaccctgcgctggcaggccacccccctgggcagcgagaggtctgggggcggctgtgtggccgtggtgcccggccctggggcctag

SEQ ID NO: 257157 - DNA, 903 bp, Artificial Sequence
  derived and/or modified sequence
atgctgagcgccgtggcccggggctaccagggctggttccacccctgtgcccgcctgagtgttcgaatgagctctactggtattgatcggaaaggtgtgctggccaacagggttgcagtcgtcaccgggagcacgagtgggatcgggttcgcaatcgcccgcaggctggcacgtgatggtgcccatgtagtaatctcttcccgaaagcagcagaatgtggatagggctatggccaagctgcaaggcgagggcctgtcagtagcgggcattgtatgccacgtcgggaaggccgaggatcgcgaacagctcgttgctaaggcgttggaacactgtggtggagttgattttctagtctgctccgcgggagtcaatcccttggtgggaagtaccctgggcacatccgaacaaatctgggataaaatactaagcgtgaacgtgaagtctccagccctgctccttagccagctcttaccctatatggagaataggcgcggagccgtcatcctggtttcatccatcgccgcctacaatcccgtcgttgcactcggagtctacaacgtctcaaagacggctcttctcggcctgacccggacacttgcacttgagttagcgccaaaagatatccgtgtgaactgcgtggttcctgggatcatcaagactgatttcagcaaggtcgtcaggattggctttatggggatgtctctcagcgggaggacgagtcgaaacatcataagttgtcgcggcctgggaagtcagcgaaccgttcaggaaagctgccctagctgcgccttgcaaatgcccgccaccagtacaggcagaaccctgcgatggcaggccacacccctgggttccgagcgcagtggcggaggctgcgtcgcagtggtgcccggcccaggtgcttag

SEQ ID NO: 257158 - DNA, 903 bp, Artificial Sequence
  derived and/or modified sequence
atgctgagcgcagtggcgagaggctaccagggctggttccatccttgcgctcggttgtctgtccgcatgtcgtcaacgggcattgatagaaaaggtgtgttagccaaccgggtggcggtggtaaccggctccacgtctggcatcggttttgcaatagcacgccgtctcgcaagagatggggctcacgtggtgatttccagtcggaaacagcagaatgtagatagagctatggcgaaactccaaggagaggggctgtctgtggctgggattgtgtgccatgttggaaaggccgaggatagagagcagctggtggccaaagcactggagcattgcggaggcgttgatttcttggtgtgctccgcaggtgtgaatccactggtcggctcaactctaggcaccagtgaacaaatctgggataaaattctcagcgtcaatgtgaagagtccggcactccttttaagtcaattgctcccttatatggaaaatcgccgaggcgcagtcatactggtgtcttctatcgccgcatacaaccctgtagtcgccctgggcgtctacaacgtatctaaaaccgcccttttgggactgacacggaccttggccctcgagctggcccctaaggacattagagtgaattgtgtggtgccaggcatcatcaagactgacttttcgaaggtcgttagaataggattcatgggcatgtctctgagtggcagaacatctagaaatattatttcttgccgcggtttgggctctcagcggaccgttcaggaatcatgtccctcttgcgcccttcagatgcccgcaacctccaccggcagaaccctcagatggcaggcaacccctctgggctctgagcgcagcggcggaggatgcgtggctgtcgtcccaggcccaggcgcatag

SEQ ID NO: 257159 - protein, 1135 aa, Artificial Sequence
  derived and/or modified sequence
MRSRGSDTEGSAQKKFPRHTKGHSFQGPKNMKHRQQDKDSPSESDVILPCPKAEKPHSGNGHQAEDLSRDDLLFLLSILEGELQARDEVIGILKAEKMDLALLEAQYGFVTPKKVLEALQRDAFQAKSTPWQEDIYEKPMNELDKVVEKHKESYRRILGQLLVAEKSRRQTILELEEEKRKHKEYMEKSDEFICLLEQECERLKKLIDQEIKSQEEKEQEKEKRVTTLKEELTKLKSFALMVVDEQQRLTAQLTLQRQKIQELTTNAKETHTKLALAEARVQEEEQKATRLEKELQTQTTKFHQDQDTIMAKLTNEDSQNRQLQQKLAALSRQIDELEETNRSLRKAEEELQDIKEKISKGEYGNAGIMAEVEELRKRVLDMEGKDEELIKMEEQCRDLNKRLERETLQSKDFKLEVEKLSKRIMALEKLEDAFNKSKQECYSLKCNLEKERMTTKQLSQELESLKVRIKELEAIESRLEKTEFTLKEDLTKLKTLTVMFVDERKTMSEKLKKTEDKLQAASSQLQVEQNKVTTVTEKLIEETKRALKSKTDVEEKMYSVTKERDDLKNKLKAEEEKGNDLLSRVNMLKNRLQSLEAIEKDFLKNKLNQDSGKSTTALHQENNKIKELSQEVERLKLKLKDMKAIEDDLMKTEDEYETLERRYANERDKAQFLSKELEHVKMELAKYKLAEKTETSHEQWLFKRLQEEEAKSGHLSREVDALKEKIHEYMATEDLICHLQGDHSVLQKKLNQQENRNRDLGREIENLTKELERYRHFSKSLRPSLNGRRISDPQVFSKEVQTEAVDNEPPDYKSLIPLERAVINGQLYEESENQDEDPNDEGSVLSFKCSQSTPCPVNRKLWIPWMKSKEGHLQNGKMQTKPNANFVQPGDLVLSHTPGQPLHIKVTPDHVQNTATLEITSPTTESPHSYTSTAVIPNCGTPKQRITILQNASITPVKSKTSTEDLMNLEQGMSPITMATFARAQTPESCGSLTPERTMSPIQVLAVTGSASSPEQGRSPEPTEISAKHAIFRVSPDRQSSWQFQRSNSNSSSVITTEDNKIHIHLGSPYMQAVASPVRPASPSAPLQDNRTQGLINGALNKTTNKVTSSITITPTATPLPRQSQITVEPLLLPH

SEQ ID NO: 257160 - DNA, 3970 bp, Artificial Sequence
  derived and/or modified sequence
acacacacacacacacacagacgtgctcacggagcctgtgcctgcctctacttgtctgctctgcgcagatggttcctggcttttgggtcacctcatcctgcagcccagtccagttagaacctttcttccacagagactggcaagctgtggggtaagagttttggtaaggctgcctgtcttcagagcatgaaggacactgcccggagagggaagagggcaatatttagtgtttgggcctacttgttgttgggctccccactgcctctcctttgcagagctatcactggcccctggttgcaaactctcggtggctttcaagcctacaaaacaaaaactgagagggtgtccaaaaagagaagaagaaaacgttgttgttggtcctggattccactgttggattttggtggggatgagaagaaggaattaccaggtgtgatcaacacctgcacggtacctgcacggctttaaagaatgcgttccagaggcagtgataccgagggctcagcccaaaagaaatttccaagacatactaaaggccacagtttccaagggcctaaaaacatgaagcatagacagcaagacaaagactcccccagtgagtcggatgtaatacttccgtgtcccaaggcagagaagccacacagtggtaatggccaccaagcagaagacctctcaagagatgacctgttatttctcctcagcattctggagggagaactgcaggctcgagatgaggtcataggcattttaaaggctgaaaaaatggacctggctttgctggaagctcagtatgggtttgtcactccaaaaaaggtgttagaggctctccagagagatgcttttcaagcgaaatctaccccttggcaggaggacatctatgagaaaccaatgaatgagttggacaaagttgtggaaaaacataaagaatcttacagacgaatcctgggacagcttttagtggcagaaaaatcccgtaggcaaaccatattggagttggaggaagaaaagagaaaacataaagaatacatggagaagagtgatgaattcatatgcctactagaacaggaatgtgaaagattaaagaagctaattgatcaagaaatcaagtctcaggaggagaaggagcaagaaaaggagaaaagggtcaccaccctgaaagaggagctgaccaagctgaagtcttttgctttgatggtggtggatgaacagcaaaggctgacggcacagctcacccttcaaagacagaaaatccaagagctgaccacaaatgcaaaggaaacacataccaaactagcccttgctgaagccagagttcaggaggaagagcagaaggcaaccagactagagaaggaactgcaaacgcagaccacaaagtttcaccaagaccaagacacaattatggcgaagctcaccaatgaggacagtcaaaatcgccagcttcaacaaaagctggcagcactcagccggcagattgatgagttagaagagacaaacaggtctttacgaaaagcagaagaggagctgcaagatataaaagaaaaaatcagtaagggagaatatggaaacgctggtatcatggctgaagtggaagagctcaggaaacgtgtgctagatatggaagggaaagatgaagagctcataaaaatggaggagcagtgcagagatctcaataagaggcttgaaagggagacgttacagagtaaagactttaaactagaggttgaaaaactcagtaaaagaattatggctctggaaaagttagaagacgctttcaacaaaagcaaacaagaatgctactctctgaaatgcaatttagaaaaagaaaggatgaccacaaagcagttgtctcaagaactggagagtttaaaagtaaggatcaaagagctagaagccattgaaagtcggctagaaaagacagaattcactctaaaagaggatttaactaaactgaaaacattaactgtgatgtttgtagatgaacggaaaacaatgagtgaaaaattaaagaaaactgaagataaattacaagctgcttcttctcagcttcaagtggagcaaaataaagtaacaacagttactgagaagttaattgaggaaactaaaagggcgctcaagtccaaaaccgatgtagaagaaaagatgtacagcgtaaccaaggagagagatgatttaaaaaacaaattgaaagcggaagaagagaaaggaaatgatctcctgtcaagagttaatatgttgaaaaataggcttcaatcattggaagcaattgagaaagatttcctaaaaaacaaattaaatcaagactctgggaaatccacaacagcattacaccaagaaaacaataagattaaggagctctctcaagaagtggaaagactgaaactgaagctaaaggacatgaaagccattgaggatgacctcatgaaaacagaagatgaatatgagactctagaacgaaggtatgctaatgaacgagacaaagctcaatttttatctaaagagctagaacatgttaaaatggaacttgctaagtacaagttagcagaaaagacagagaccagccatgaacaatggcttttcaaaaggcttcaagaagaagaagctaagtcagggcacctctcaagagaagtggatgcattaaaagagaaaattcatgaatacatggcaactgaagacctaatatgtcacctccagggagatcactcagtcctgcaaaaaaaactaaatcaacaagaaaacaggaacagagatttaggaagagagattgaaaacctcactaaggagttagagaggtaccggcatttcagtaagagcctcaggcctagtctcaatggaagaagaatttccgatcctcaagtattttctaaagaagttcagacagaagcagtagacaatgaaccacctgattacaagagcctcattcctctggaacgtgcagtcatcaatggtcagttatatgaggagagtgagaatcaagacgaggaccctaatgatgagggatctgtgctgtccttcaaatgcagccagtctactccatgtcctgttaacagaaagctatggattccctggatgaaatccaaggagggccatcttcagaatggaaaaatgcaaactaaacccaatgccaactttgtgcaacctggagatctagtcctaagccacacacctgggcagccacttcatataaaggttactccagaccatgtacaaaacacagccactcttgaaatcacaagtccaaccacagagagtcctcactcttacacgagtactgcagtgataccgaactgtggcacgccaaagcaaaggataaccatcctccaaaacgcctccataacaccagtaaagtccaaaacctctaccgaagacctcatgaatttagaacaaggcatgtccccaattaccatggcaacctttgccagagcacagaccccagagtcttgtggttctctaactccagaaaggacaatgtcccctattcaggttttggctgtgactggttcagctagctctcctgagcagggacgctccccagaaccaacagaaatcagtgccaagcatgcgatattcagagtctccccagaccggcagtcatcatggcagtttcagcgttcaaacagcaatagctcaagtgtgataactactgaggataataaaatccacattcacttaggaagtccttacatgcaagctgtagccagccctgtgagacctgccagcccttcagcaccactgcaggataaccgaactcaaggcttaattaacggggcactaaacaaaacaaccaataaagtcaccagcagtattactatcacaccaacagccacacctcttcctcgacaatcacaaattacagtggaaccacttcttctgcctcattgaactcaacatccttcagacttttaaggcattccaaatcccagtcttcatgttgaactgggttaagcatttattaaaaaatcgttttcttcta

SEQ ID NO: 257161 - DNA, 2854 bp, Artificial Sequence
  derived and/or modified sequence
ggcccccgcccggccccggcgcaggcagttcagattaaagaagctaattgatcaagaaatcaagtctcaggaggagaaggagcaagaaaaggagaaaagggtcaccaccctgaaagaggagctgaccaagctgaagtcttttgctttgatggtggtggatgaacagcaaaggctgacggcacagctcacccttcaaagacagaaaatccaagagctgaccacaaatgcaaaggaaacacataccaaactagcccttgctgaagccagagttcaggaggaagagcagaaggcaaccagactagagaaggaactgcaaacgcagaccacaaagtttcaccaagaccaagacacaattatggcgaagctcaccaatgaggacagtcaaaatcgccagcttcaacaaaagctggcagcactcagccggcagattgatgagttagaagagacaaacaggtctttacgaaaagcagaagaggagctgcaagatataaaagaaaaaatcagtaagggagaatatggaaacgctggtatcatggctgaagtggaagagctcaggaaacgtgtgctagatatggaagggaaagatgaagagctcataaaaatggaggagcagtgcagagatctcaataagaggcttgaaagggagacgttacagagtaaagactttaaactagaggttgaaaaactcagtaaaagaattatggctctggaaaagttagaagacgctttcaacaaaagcaaacaagaatgctactctctgaaatgcaatttagaaaaagaaaggatgaccacaaagcagttgtctcaagaactggagagtttaaaagtaaggatcaaagagctagaagccattgaaagtcggctagaaaagacagaattcactctaaaagaggatttaactaaactgaaaacattaactgtgatgtttgtagatgaacggaaaacaatgagtgaaaaattaaagaaaactgaagataaattacaagctgcttcttctcagcttcaagtggagcaaaataaagtaacaacagttactgagaagttaattgaggaaactaaaagggcgctcaagtccaaaaccgatgtagaagaaaagatgtacagcgtaaccaaggagagagatgatttaaaaaacaaattgaaagcggaagaagagaaaggaaatgatctcctgtcaagagttaatatgttgaaaaataggcttcaatcattggaagcaattgagaaagatttcctaaaaaacaaattaaatcaagactctgggaaatccacaacagcattacaccaagaaaacaataagattaaggagctctctcaagaagtggaaagactgaaactgaagctaaaggacatgaaagccattgaggatgacctcatgaaaacagaagatgaatatgagactctagaacgaaggtatgctaatgaacgagacaaagctcaatttttatctaaagagctagaacatgttaaaatggaacttgctaagtacaagttagcagaaaagacagagaccagccatgaacaatggcttttcaaaaggcttcaagaagaagaagctaagtcagggcacctctcaagagaagtggatgcattaaaagagaaaattcatgaatacatggcaactgaagacctaatatgtcacctccagggagatcactcagtcctgcaaaaaaaactaaatcaacaagaaaacaggaacagagatttaggaagagagattgaaaacctcactaaggagttagagaggtaccggcatttcagtaagagcctcaggcctagtctcaatggaagaagaatttccgatcctcaagtattttctaaagaagttcagacagaagcagtagacaatgaaccacctgattacaagagcctcattcctctggaacgtgcagtcatcaatggtcagttatatgaggagagtgagaatcaagacgaggaccctaatgatgagggatctgtgctgtccttcaaatgcagccagtctactccatgtcctgttaacagaaagctatggattccctggatgaaatccaaggagggccatcttcagaatggaaaaatgcaaactaaacccaatgccaactttgtgcaacctggagatctagtcctaagccacacacctgggcagccacttcatataaaggttactccagaccatgtacaaaacacagccactcttgaaatcacaagtccaaccacagagagtcctcactcttacacgagtactgcagtgataccgaactgtggcacgccaaagcaaaggataaccatcctccaaaacgcctccataacaccagtaaagtccaaaacctctaccgaagacctcatgaatttagaacaaggcatgtccccaattaccatggcaacctttgccagagcacagaccccagagtcttgtggttctctaactccagaaaggacaatgtcccctattcaggttttggctgtgactggttcagctagctctcctgagcagggacgctccccagaaccaacagaaatcagtgccaagcatgcgatattcagagtctccccagaccggcagtcatcatggcagtttcagcgttcaaacagcaatagctcaagtgtgataactactgaggataataaaatccacattcacttaggaagtccttacatgcaagctgtagccagccctgtgagacctgccagcccttcagcaccactgcaggataaccgaactcaaggcttaattaacggggcactaaacaaaacaaccaataaagtcaccagcagtattactatcacaccaacagccacacctcttcctcgacaatcacaaattacagtggaaccacttcttctgcctcattgaactcaacatccttcagac

SEQ ID NO: 257162 - DNA, 3408 bp, Artificial Sequence
  derived and/or modified sequence
atgaggtctcgaggtagcgatactgaaggcagcgcccagaaaaaattccctcgccacacgaagggacattcttttcaaggcccaaaaaatatgaaacatagacagcaagacaaggatagcccaagtgaatctgatgttattctcccctgccccaaagcggagaagccacactccggaaacggccatcaggccgaggatctgtcaagggatgatctgctgtttcttctttcaattttggaaggcgaactgcaggcccgggacgaggtgatcggcattctaaaggccgaaaaaatggacctggcgcttctggaagcccagtacggctttgtcaccccaaaaaaggtgctggaggccttacagcgggacgcatttcaagcaaagtccactccttggcaagaagatatctatgagaaaccgatgaacgaactggataaggtggtggaaaagcacaaagaaagttataggcgcatccttggccagcttttagtcgcagaaaaaagtagacgccagacaatccttgagttagaggaggagaaacgcaaacataaggagtacatggagaagtctgacgaattcatctgtctcttggagcaggaatgtgaacgtttgaaaaagctgattgatcaggaaatcaagagtcaggaagaaaaggaacaggagaaagagaaacgcgtcacaactttgaaagaagagttaacgaaactcaagtccttcgctctcatggtcgttgatgagcagcagcggttgacagcgcaactaacactgcaaagacaaaaaattcaggagctgaccaccaacgcgaaggagacccataccaaacttgctctcgccgaggcgagagtgcaagaggaagagcagaaagctacaaggctggaaaaggagttacagacccaaactacgaagttccatcaggaccaggacacaatcatggctaagctaacaaacgaagactctcaaaacaggcagttgcagcaaaagttggccgccttgtcgagacagatcgatgagttggaggagacaaacaggagtttacgtaaagcggaggaagagctccaggacatcaaggagaagatctcaaaaggcgaatatgggaatgctggaatcatggctgaagttgaagagctgaggaagcgagttctggatatggagggaaaagacgaagaactgattaagatggaagaacagtgtagggatttaaacaaaagactggaaagagaaaccctgcagagtaaagactttaaactggaagtcgaaaagctgagtaaacgcatcatggccctggaaaaactggaagacgcatttaataagtctaagcaggagtgttattccctgaaatgcaacctcgaaaaggaaaggatgaccactaagcagctctctcaggagctggaatccctcaaggttaggataaaagaactcgaagccatagaatcccggttagaaaaaaccgagttcaccctgaaggaagacttaactaagctgaagaccctcacggtgatgttcgtggatgagcgtaagaccatgagcgagaaacttaagaagaccgaagataagttgcaggctgcctcatctcaactgcaggtggagcagaataaggtgaccactgtgaccgaaaagctaatcgaagagaccaaaagagctctaaagtcgaagacagatgtcgaggaaaaaatgtatagtgtcaccaaagagcgcgacgacctcaaaaataaactgaaagccgaggaggagaagggcaatgatctgctctctagggtaaacatgctcaagaatagactccagtccctcgaagcgattgaaaaagattttttgaaaaataagcttaatcaagatagcggtaagagcaccaccgcactccatcaggagaataacaaaattaaagagctgagccaggaggtagagcgcctgaagttaaagctgaaagatatgaaagccatcgaagacgatttgatgaaaaccgaagacgagtacgagactcttgagcgtagatacgcaaatgagcgtgataaagctcagtttctgagtaaggaactcgagcatgtcaaaatggaactagctaagtacaagttagccgagaaaaccgaaacaagccacgagcagtggcttttcaagcgcctgcaggaagaggaggctaagtcgggacatctctcccgagaagtggacgccctaaaagaaaagatccacgagtacatggccaccgaagatctgatctgccatttgcagggagatcactcagtcctgcagaaaaagctcaaccaacaagagaacagaaacagagatctcggaagagaaattgaaaatctgactaaggagttggaaaggtacagacacttctctaagtcgctcaggccaagtctcaacggccgaagaatctctgatccgcaagtgtttagcaaggaggtgcagactgaggccgttgacaacgaaccaccagattataaaagcctgattccactggaacgggccgtgatcaatgggcaactctacgaagagtcagaaaatcaggacgaagaccccaatgacgaaggcagcgtgctttcgtttaaatgtagtcagtcaacaccgtgccctgtgaataggaaactgtggataccttggatgaagtccaaagagggtcacctgcagaatgggaagatgcagaccaaacctaatgctaacttcgttcagccaggtgacttggttttatcccacaccccaggtcagcctctacatattaaagtgactccagaccatgttcaaaataccgctaccctcgagatcacaagtccaacaacagaatccccacatagctacacaagcaccgccgtaattcccaattgcgggacccctaagcagagaatcacgattctgcaaaatgcgagtattacccctgtgaagtctaagacgagtactgaagacttgatgaatctcgaacagggaatgtcccctatcacaatggccacattcgcccgtgcccagacccccgagtcttgcggtagcttgacacctgagcgtactatgtctcctatccaggtcctagccgttactggctcagccagcagccctgaacagggccgaagtccagagcccacagagattagtgccaaacatgcgatttttagagtgtctccagacaggcagtcatcctggcagttccaaaggtctaatagcaacagtagctcagtcattactactgaagataataagatccatattcaccttggaagtccctatatgcaggctgtcgcatctcctgttaggcccgcatctccgtccgccccactccaggacaacagaacacaggggctcataaacggcgcgctgaacaaaaccacaaacaaggtgacttcaagcattaccattacgcctacagctacaccgttaccaagacagtcccagataaccgtggaaccgcttctgctgccccactag

SEQ ID NO: 257163 - DNA, 3408 bp, Artificial Sequence
  derived and/or modified sequence
atgaggagccggggcagtgacacagagggcagcgcccagaagaagttccccaggcacaccaagggccacagcttccagggccccaagaacatgaagcaccggcagcaggacaaggacagccccagcgagagtgatgtgatcctgccctgccccaaggccgagaagccccacagcggaaatggccaccaggccgaggacctgagcagagatgacctgctcttcctgctgagcatcctggagggggagctgcaggccagagatgaagtcatcggcatcctgaaggccgagaagatggacctggccctgctggaggcccagtatggctttgtgacccccaagaaggtgctggaggccctgcagagagatgccttccaggccaagagcaccccctggcaggaggacatctatgagaagcccatgaatgagctggacaaggtggtggagaagcacaaggagagctaccgccgcatcctgggccagctgctggtggccgagaagagccggcggcagaccatcctggagctggaggaggagaagaggaagcacaaggagtacatggagaagagtgatgagttcatctgcctgctggagcaggagtgtgagcggctgaagaagctgattgaccaggagatcaagagccaggaggagaaggagcaggagaaggagaagagggtgaccaccctgaaggaggagctgaccaagctgaagagctttgccctgatggtggtggatgagcagcagaggctgacagcccagctgaccctgcagaggcagaagatccaggagctgaccaccaatgccaaggagacccacaccaagctggccctggccgaggcccgggtgcaggaggaggagcagaaggccacccggctggagaaggagctgcagacccagaccaccaagttccaccaggaccaggacaccatcatggccaagctgaccaatgaagacagccagaaccggcagctgcagcagaagctggccgccctgagccggcagattgatgagctggaggagaccaacagaagcctgaggaaggccgaggaggagctgcaggacatcaaggagaagatcagcaagggggagtatggaaatgccggcatcatggccgaggtggaggagctgaggaagagggtgctggacatggagggcaaggatgaggagctgatcaagatggaggagcagtgccgggacctgaacaagaggctggagcgggagaccctgcagagcaaggacttcaagctggaggtggagaagctgagcaagaggatcatggccctggagaagctggaggatgccttcaacaagagcaagcaggagtgctacagcctgaagtgcaacctggagaaggagaggatgaccaccaagcagctgagccaggagctggagagcctgaaggtgcgcatcaaggagctggaggccatcgagagccggctggagaagacagagttcaccctgaaggaggacctgaccaagctgaagaccctgactgtgatgtttgtggatgagaggaagaccatgtctgagaagctgaagaagacagaggacaagctgcaggccgccagcagccagctgcaggtggagcagaacaaggtgaccaccgtgacagagaagctgattgaggagaccaagagggccctgaagagcaagacagatgtggaggagaagatgtacagcgtgaccaaggagagagatgacctgaagaacaagctgaaggccgaggaggagaagggaaatgacctgctgagccgggtgaacatgctgaagaaccggctgcagagcctggaggccatcgagaaggacttcctgaagaacaagctgaaccaggacagcggcaagagcaccacagccctgcaccaggagaacaacaagatcaaggagctgagccaggaggtggagcggctgaagctgaagctgaaggacatgaaggccattgaagatgacctgatgaagacagaagatgaatatgagaccctggagaggagatatgccaatgaaagagacaaggcccagttcctgagcaaggagctggagcacgtgaagatggagctggccaagtacaagctggccgagaagacagagaccagccatgagcagtggctgttcaagaggctgcaggaggaggaggccaagagcggccacctgagccgggaggtggatgccctgaaggagaagatccacgagtacatggccacagaagatctcatctgccacctgcagggcgaccacagcgtgctgcagaagaagctgaaccagcaggagaacagaaacagagacctgggccgggagattgagaacctgaccaaggagctggagcgctaccgccacttcagcaagagcctgcggcccagcctgaatggccgccgcatcagtgacccccaggtgttcagcaaggaggtgcagacagaggccgtggacaatgaacctccagactacaagagcctcatccccctggagagagctgtgatcaatggccagctgtatgaggagagcgagaaccaggatgaggaccccaatgatgagggctctgtgctgtccttcaagtgcagccagagcaccccctgccctgtgaacaggaagctgtggatcccctggatgaagagcaaggagggccacctgcagaatggcaagatgcagaccaagcccaatgccaactttgtgcagcccggggacctggtgctgagccacaccccaggccagcccctgcacatcaaggtgaccccagaccacgtgcagaacacagccaccctggagatcaccagccccaccacagagagcccccacagctacaccagcacagctgtgatccccaactgtggcacccccaagcagaggatcaccatcctgcagaatgccagcatcacccctgtgaagagcaagaccagcacagaggacctgatgaacctggagcagggcatgagccccatcaccatggccacctttgcccgggcccagaccccagagagctgtggcagcctgaccccagagaggaccatgagccccatccaggtgctggccgtgacaggcagcgccagcagccctgagcagggccgcagccctgagcccacagagatcagcgccaagcacgccatcttccgggtgtccccagaccggcagagctcctggcagttccagaggagcaacagcaacagcagcagcgtcatcaccacagaggacaacaagatccacatccacctgggcagcccctacatgcaggccgtggccagccctgtgcggcctgccagccccagcgcccccctgcaggacaacagaacccagggcctcatcaatggagccctgaacaagaccaccaacaaggtgaccagcagcatcaccatcacccccacagccacccccctgccccggcagagccagatcaccgtggagcccctgctgctgccccactag

SEQ ID NO: 257164 - DNA, 3408 bp, Artificial Sequence
  derived and/or modified sequence
atgcggagccggggcagcgacaccgagggcagcgcccagaagaagtttcccagacacaccaaaggccactccttccagggacccaagaatatgaagcatcgccagcaggacaaggactccccgtctgagtcagacgtaatcctcccttgtcccaaggccgaaaagccacacagcgggaatgggcaccaggcggaggacctttcgcgggacgatttgttgtttctcttgtctattcttgagggggaactgcaggcaagagacgaggtgatcggaatcctcaaagcagagaagatggacctggctctgttagaagcgcagtatggcttcgtgaccccaaagaaggtcctggaggcactccagcgtgacgcctttcaagccaagtctaccccttggcaggaagacatttacgaaaagcccatgaatgagctggacaaggtggttgagaagcataaggaatcctataggcgtattcttggccagttgctcgtggctgaaaagagccgcagacagacaattctggagctcgaggaggagaaacgtaagcataaggagtacatggagaagagcgatgagttcatctgtttactagaacaggaatgcgaacgacttaagaaactgattgaccaggagatcaaatctcaggaagagaaagagcaggagaaagagaagcgagtcactacgttgaaagaagagctgaccaaactcaagtcgttcgctctcatggtggtggacgagcagcagagactgaccgctcagctgaccttgcagcgccagaaaattcaagagttgaccacaaatgcaaaggaaactcacacaaaactggccctagcggaggcccgcgtgcaggaagaggaacagaaagctaccagactggagaaggaactgcaaacccagacaaccaaattccaccaagatcaggacacaataatggcaaagctgaccaacgaggatagccagaacagacagctgcaacagaagcttgctgcactttccagacaaattgacgagctggaggagactaataggtccctacgtaaggcagaagaggagcttcaagatatcaaagagaaaataagcaagggtgagtacggaaacgctggaattatggccgaggtcgaagaacttagaaagcgtgtgctcgatatggagggcaaggacgaagaactcatcaagatggaggaacagtgtagggatctcaataagagacttgagagggagactttgcagtcaaaggattttaagctagaagtagagaagctttctaagcggatcatggcattggaaaagctggaagacgctttcaataaatcaaaacaggaatgttactcactgaagtgcaacctggagaaagagaggatgacaactaagcagctgtcccaggagcttgaaagtttgaaagtgcgcattaaggagctggaggccatagagagcaggcttgaaaagaccgaatttacgctgaaggaggacttgactaagctgaaaacattaaccgtgatgtttgtggatgagcgtaagaccatgagcgagaagcttaagaagacggaagataaactccaggccgcatccagtcagttacaggttgagcagaataaggttaccactgttacagagaagcttatagaagagactaagcgcgcccttaagagcaagacagacgtcgaggagaagatgtactcggtgaccaaggaaagagacgaccttaagaacaaactgaaggctgaggaggaaaagggaaatgatctattatctcgggtaaatatgctgaagaacagactgcaatctttggaagccatcgagaaggattttctcaaaaacaagctcaatcaggatagcggaaagtccaccacagcattacaccaggagaataacaagatcaaggagctcagccaggaagtcgaacgcctgaaactgaaactgaaggatatgaaggcgatagaagacgatctaatgaagaccgaagatgagtatgaaactctggaaagaagatacgccaatgagagggacaaagcccagtttctgagtaaagaactggaacacgtgaagatggaactcgctaaatacaagcttgccgagaagacagaaacgtcacacgagcagtggttgtttaagcgcctgcaagaagaggaagccaagtccggtcatctttccagagaggtggatgcattgaaggaaaagatccatgagtatatggcaaccgaagatcttatatgccaccttcaaggtgatcacagcgttctgcagaaaaaactcaatcagcaggaaaaccgaaaccgggacctagggagggaaattgagaacttgaccaaggaactcgagcggtaccgccatttttccaaaagtcttagaccgagtctgaacggcagacgcatctctgatccacaagtctttagcaaggaggtgcagactgaggccgtcgataatgagcctcccgactacaagtctctcatacccctggaacgcgccgtgattaacggccaactctacgaagaatccgagaatcaggatgaagaccctaacgatgaagggagtgtgctaagcttcaaatgcagccagtctaccccatgccccgtgaaccgaaagctgtggatcccgtggatgaagtctaaagaggggcacctacagaacggaaagatgcaaacaaagcctaacgctaactttgtgcagcctggggatctggttttgagtcacacccctgggcagccacttcatatcaaggtgaccccagaccatgtccagaatacagctacattggagattaccagcccaactactgagagcccacatagctacaccagtactgccgtgattccaaactgcggaactcccaagcagagaatcactatccttcagaatgcctccatcacccctgttaaaagtaagacctccactgaggacctgatgaaccttgaacagggcatgagtccaatcacaatggctacattcgccagggctcagacccctgagagctgcggctcgttaacccccgaaagaactatgtctcctatccaagtgttagccgtcactggctctgctagtagcccagagcagggaaggtctcccgagcctaccgaaatatcagctaagcacgctatttttcgggtatcccccgacaggcagagcagctggcagtttcagaggagcaacagtaattctagcagtgtgatcaccacagaagacaacaaaattcatattcatttgggcagtccatacatgcaggctgtggcatcccctgttaggccggcctccccttcagccccattgcaggacaatagaacccaggggctgattaatggggcccttaataagaccactaataaagtcacatccagtatcacaattacacctaccgcaaccccccttccccgccaatctcagatcacagtcgaacccctgctgctgccccactag

SEQ ID NO: 257165 - DNA, 3408 bp, Artificial Sequence
  derived and/or modified sequence
atgagaagtcggggaagcgacaccgagggaagcgcccagaagaaattccccagacacaccaaggggcactccttccagggtccgaagaatatgaaacaccgccagcaagacaaagactcaccaagcgagtccgacgtaatactaccttgccccaaggcggagaaacctcactccggtaacgggcaccaggctgaggacctgagtagagatgatcttctgttcctgctcagcattctagaaggagagctccaagccagggacgaagtaatcggaattctcaaagctgagaaaatggatttggctctgcttgaagcccagtatggatttgtaactccgaagaaggtcttagaagcacttcagagggacgcatttcaggccaagtcaacaccatggcaagaagacatttacgagaagcctatgaacgaacttgacaaagtcgtggagaagcacaaggagtcctatcgaagaatcctgggccagttgctggtcgctgaaaagagtaggcgccagacaattctcgaactggaggaagagaagaggaaacataaggaatatatggagaagtctgacgagttcatctgcctgctcgagcaggaatgtgagcgcctgaagaagctgatcgaccaagagatcaaatctcaagaggagaaagaacaggaaaaggaaaagcgcgtgacgactttgaaagaggaactgacgaaattaaaaagttttgcactgatggtcgttgacgaacagcagagactaaccgcccagctgaccctccagcggcagaagattcaagagctaacgactaatgcgaaagagactcacactaagcttgccttggccgaagctagagtccaggaggaggaacagaaggccacccgtcttgaaaaggaactgcagactcagacaaccaagttccaccaggaccaagacacaattatggccaagctcaccaatgaggacagccaaaatcggcagctccaacagaagctagccgctctctcccgtcagatcgatgaactggaggagacaaatagatccctgagaaaggcagaggaggaactccaggatatcaaggaaaagatctctaaaggcgagtacggtaacgctggcattatggccgaggtagaggagttgagaaaacgggtcctcgatatggagggcaaagatgaggaactgatcaaaatggaagagcagtgccgtgatttgaacaagagactggaaagggagacccttcagagcaaggacttcaagctcgaagtcgaaaaattgtccaagcgcatcatggcattggagaagctggaggacgcgtttaacaagagtaaacaggagtgctacagtctgaagtgcaacctggagaaggagcgcatgacaactaagcagctgagtcaggaactggagtccctgaaagtccgcatcaaagagctggaggctatcgagtctcgacttgagaagacagaatttacactcaaagaggatcttactaaactgaaaaccctgacggttatgtttgtggatgaacgtaagacaatgtcagaaaaattaaagaaaactgaggacaagctgcaagcagcaagttcccaactgcaagtggaacagaacaaggtgacaacagttaccgaaaagcttatagaagagacaaaacgggcactgaagtcgaaaactgacgtggaagaaaaaatgtacagcgtcaccaaagaacgtgatgatttaaaaaacaagttaaaggcagaggaggagaaaggaaacgatctgttgtctcgcgttaacatgctaaagaacaggctccaatcccttgaggcgatcgagaaagattttctgaagaacaagctgaatcaggatagtggaaagagcacaactgctctccatcaggagaacaataagattaaagagctgtcccaggaggtagagcgtctgaagctgaagctcaaagacatgaaggccattgaggatgatttgatgaaaaccgaggatgagtatgagaccctggaaagacgctacgctaatgaacgtgataaagcccagtttctgtcaaaggaacttgagcatgtaaagatggagctggcaaagtataagcttgcagagaagaccgaaactagccatgagcagtggctgttcaagcggctgcaggaggaggaagcaaagtcaggtcacctctcacgggaagtggatgctctcaaagaaaaaatccacgagtatatggctactgaagatctgatttgccatcttcaaggagaccatagtgtgcttcagaagaagctgaaccagcaggaaaaccgtaaccgcgatctcggcagggagattgagaacctcacaaaagagttagagcgatatcggcatttttctaagagccttaggccatctctgaatggtcgcagaatctctgacccccaagtgttttccaaagaggtccagaccgaagctgtagataatgagccgccagactacaaaagcctgattccactggaaagagcagtgatcaacggccagctctacgaggagtccgagaatcaggacgaggatcccaacgacgaagggtcggtcttgtcttttaagtgttcccagtctactccttgcccagtcaatagaaaactctggattccttggatgaagagcaaggagggccatctgcaaaatggaaaaatgcagactaagccaaacgcaaacttcgttcagcctggggacctggttctcagccacactccagggcagccactgcatatcaaagtgactcctgatcatgtccagaataccgccacattggagatcacttccccgactaccgagtcaccgcatagctacacctccaccgctgttattcccaattgcggtacgcccaagcagagaatcaccatcctgcagaacgccagcataaccccagtaaagtcaaaaactagcaccgaagatctcatgaaccttgaacagggaatgagccccataacgatggccacgtttgcgcgagctcaaaccccagagtcctgcggaagtctcacccctgaaagaacgatgagtcctatccaggtactggcagtaaccggcagcgccagtagccctgagcaaggcagatctccagaacctacagaaatcagcgcgaaacatgcgatatttagggtttcgcctgacaggcagagcagctggcagtttcaacgcagcaattctaattcgtcctcagtaataactactgaggacaataagatccacatacatttgggtagtccgtatatgcaggccgttgctagccctgttcggccagcatccccttccgccccactccaggacaatagaacacagggacttataaatggggcactgaataagactaccaacaaagtcacatcatccattactattaccccaaccgcgactcctctgcccaggcagagtcagatcaccgtcgagcctcttctcctacctcactag

SEQ ID NO: 257166 - DNA, 3408 bp, Artificial Sequence
  derived and/or modified sequence
atgagaagcagaggcagcgacaccgagggcagcgcccagaagaagttccccagacacaccaagggccacagcttccagggccccaagaacatgaagcacagacagcaggacaaggacagccccagcgagagcgacgtgatcctgccctgccccaaggccgagaagccccacagcggcaacggccaccaggccgaggacctgagcagagacgacctgctgttcctgctgagcatcctggagggcgagctgcaggccagagacgaggtgatcggcatcctgaaggccgagaagatggacctggccctgctggaggcccagtacggcttcgtgacccccaagaaggtgctggaggccctgcagagagacgccttccaggccaagagcaccccctggcaggaggacatctacgagaagcccatgaacgagctggacaaggtggtggagaagcacaaggagagctacagaagaatcctgggccagctgctggtggccgagaagagcagaagacagaccatcctggagctggaggaggagaagagaaagcacaaggagtacatggagaagagcgacgagttcatctgcctgctggagcaggagtgcgagagactgaagaagctgatcgaccaggagatcaagagccaggaggagaaggagcaggagaaggagaagagagtgaccaccctgaaggaggagctgaccaagctgaagagcttcgccctgatggtggtggacgagcagcagagactgaccgcccagctgaccctgcagagacagaagatccaggagctgaccaccaacgccaaggagacccacaccaagctggccctggccgaggccagagtgcaggaggaggagcagaaggccaccagactggagaaggagctgcagacccagaccaccaagttccaccaggaccaggacaccatcatggccaagctgaccaacgaggacagccagaacagacagctgcagcagaagctggccgccctgagcagacagatcgacgagctggaggagaccaacagaagcctgagaaaggccgaggaggagctgcaggacatcaaggagaagatcagcaagggcgagtacggcaacgccggcatcatggccgaggtggaggagctgagaaagagagtgctggacatggagggcaaggacgaggagctgatcaagatggaggagcagtgcagagacctgaacaagagactggagagagagaccctgcagagcaaggacttcaagctggaggtggagaagctgagcaagagaatcatggccctggagaagctggaggacgccttcaacaagagcaagcaggagtgctacagcctgaagtgcaacctggagaaggagagaatgaccaccaagcagctgagccaggagctggagagcctgaaggtgagaatcaaggagctggaggccatcgagagcagactggagaagaccgagttcaccctgaaggaggacctgaccaagctgaagaccctgaccgtgatgttcgtggacgagagaaagaccatgagcgagaagctgaagaagaccgaggacaagctgcaggccgccagcagccagctgcaggtggagcagaacaaggtgaccaccgtgaccgagaagctgatcgaggagaccaagagagccctgaagagcaagaccgacgtggaggagaagatgtacagcgtgaccaaggagagagacgacctgaagaacaagctgaaggccgaggaggagaagggcaacgacctgctgagcagagtgaacatgctgaagaacagactgcagagcctggaggccatcgagaaggacttcctgaagaacaagctgaaccaggacagcggcaagagcaccaccgccctgcaccaggagaacaacaagatcaaggagctgagccaggaggtggagagactgaagctgaagctgaaggacatgaaggccatcgaggacgacctgatgaagaccgaggacgagtacgagaccctggagagaagatacgccaacgagagagacaaggcccagttcctgagcaaggagctggagcacgtgaagatggagctggccaagtacaagctggccgagaagaccgagaccagccacgagcagtggctgttcaagagactgcaggaggaggaggccaagagcggccacctgagcagagaggtggacgccctgaaggagaagatccacgagtacatggccaccgaggacctgatctgccacctgcagggcgaccacagcgtgctgcagaagaagctgaaccagcaggagaacagaaacagagacctgggcagagagatcgagaacctgaccaaggagctggagagatacagacacttcagcaagagcctgagacccagcctgaacggcagaagaatcagcgacccccaggtgttcagcaaggaggtgcagaccgaggccgtggacaacgagccccccgactacaagagcctgatccccctggagagagccgtgatcaacggccagctgtacgaggagagcgagaaccaggacgaggaccccaacgacgagggcagcgtgctgagcttcaagtgcagccagagcaccccctgccccgtgaacagaaagctgtggatcccctggatgaagagcaaggagggccacctgcagaacggcaagatgcagaccaagcccaacgccaacttcgtgcagcccggcgacctggtgctgagccacacccccggccagcccctgcacatcaaggtgacccccgaccacgtgcagaacaccgccaccctggagatcaccagccccaccaccgagagcccccacagctacaccagcaccgccgtgatccccaactgcggcacccccaagcagagaatcaccatcctgcagaacgccagcatcacccccgtgaagagcaagaccagcaccgaggacctgatgaacctggagcagggcatgagccccatcaccatggccaccttcgccagagcccagacccccgagagctgcggcagcctgacccccgagagaaccatgagccccatccaggtgctggccgtgaccggcagcgccagcagccccgagcagggcagaagccccgagcccaccgagatcagcgccaagcacgccatcttcagagtgagccccgacagacagagcagctggcagttccagagaagcaacagcaacagcagcagcgtgatcaccaccgaggacaacaagatccacatccacctgggcagcccctacatgcaggccgtggccagccccgtgagacccgccagccccagcgcccccctgcaggacaacagaacccagggcctgatcaacggcgccctgaacaagaccaccaacaaggtgaccagcagcatcaccatcacccccaccgccacccccctgcccagacagagccagatcaccgtggagcccctgctgctgccccactag

SEQ ID NO: 257167 - protein, 429 aa, Artificial Sequence
  derived and/or modified sequence
MEGDRNVPPVPPASSTPYKPPYGKLLLPPGTDGGKEGPRVLNGNPQQEDGGLAGITEQQSGAFDRWEMIQAQELHNKLKIKQNLQQLNSDISAITTWLKKTEAELEMLKMAKPPSDIQEIELRVKRLQEILKAFDTYKALVVSVNVSSKEFLQTESPESTELQSRLRQLSLLWEAAQGAVDSWRGGLRQSLMQCQGSKTRPRSDVLFFKDFHQLSQNLLLWLASAKNRRQKAHVTDPKADPRALLECRRELMQLEKELVERQPQVDMLQEISNSLLIKGHGEDCIEAEEKVHVIEKKLKQLREQVSQDLMALQGTQNPASPLPSFDEVDSGDQPPATSVPAPRAKFRAVRTTEGEEETESRVPGSTRPQRSFLSRVVRAALPLQLLLLLLLLLACLLPSSEEDYSCTQANNFARSFYPMLRYTNGPPPT

SEQ ID NO: 257168 - DNA, 1290 bp, Artificial Sequence
  derived and/or modified sequence
atggagggcgacagaaacgtgccccccgtgccccccgccagcagcaccccctacaagcccccctacggcaagctgctgctgccccccggcaccgacggcggcaaggagggccccagagtgctgaacggcaacccccagcaggaggacggcggcctggccggcatcaccgagcagcagagcggcgccttcgacagatgggagatgatccaggcccaggagctgcacaacaagctgaagatcaagcagaacctgcagcagctgaacagcgacatcagcgccatcaccacctggctgaagaagaccgaggccgagctggagatgctgaagatggccaagccccccagcgacatccaggagatcgagctgagagtgaagagactgcaggagatcctgaaggccttcgacacctacaaggccctggtggtgagcgtgaacgtgagcagcaaggagttcctgcagaccgagagccccgagagcaccgagctgcagagcagactgagacagctgagcctgctgtgggaggccgcccagggcgccgtggacagctggagaggcggcctgagacagagcctgatgcagtgccagggcagcaagaccagacccagaagcgacgtgctgttcttcaaggacttccaccagctgagccagaacctgctgctgtggctggccagcgccaagaacagaagacagaaggcccacgtgaccgaccccaaggccgaccccagagccctgctggagtgcagaagagagctgatgcagctggagaaggagctggtggagagacagccccaggtggacatgctgcaggagatcagcaacagcctgctgatcaagggccacggcgaggactgcatcgaggccgaggagaaggtgcacgtgatcgagaagaagctgaagcagctgagagagcaggtgagccaggacctgatggccctgcagggcacccagaaccccgccagccccctgcccagcttcgacgaggtggacagcggcgaccagccccccgccaccagcgtgcccgcccccagagccaagttcagagccgtgagaaccaccgagggcgaggaggagaccgagagcagagtgcccggcagcaccagaccccagagaagcttcctgagcagagtggtgagagccgccctgcccctgcagctgctgctgctgctgctgctgctgctggcctgcctgctgcccagcagcgaggaggactacagctgcacccaggccaacaacttcgccagaagcttctaccccatgctgagatacaccaacggccccccccccacctag

SEQ ID NO: 257169 - DNA, 1290 bp, Artificial Sequence
  derived and/or modified sequence
atggaaggcgacaggaacgttcctccggtgccccccgcctctagcactccctataagcctccttatgggaagctgctgctaccaccgggaacagatggcggcaaggaaggccctcgagtgttgaatggtaatccacagcaggaggatggtgggcttgcaggaatcacagagcagcaaagcggagctttcgaccgctgggaaatgattcaggcccaggagttgcataataaactcaagatcaaacagaacctgcagcagcttaattccgatatctcagccatcactacatggctgaaaaaaaccgaggcagaattggagatgctaaagatggccaagcctccttccgatattcaagaaattgagctgagagtcaaacggttgcaggagatcctaaaagcctttgatacttacaaagccctggtggttagtgtgaatgtgtccagcaaggagttccttcagacagaaagcccagagtctacagagttacaatcccggctaagacaattgtcactgttatgggaagccgcccagggcgcggtggactcttggcgcggaggtctccgacagtccctcatgcaatgccagggctccaagactagacccaggtccgatgtcctcttttttaaagatttccaccagttgagtcagaatttgctgttatggctggcaagtgccaaaaacaggaggcagaaagctcacgttacagaccccaaagcggaccctcgcgctctgctcgagtgcaggcgggaactgatgcagctggagaaggaactggttgagcgacagccccaggtggacatgctgcaggaaatatctaactcactcttaatcaaggggcatggcgaggactgtatcgaagctgaggaaaaagtgcacgtcattgagaaaaaactgaaacagctgcgagaacaggtgtcacaagacctgatggcattacaaggaacacagaacccagccagccccctaccatcctttgacgaagtggatagtggcgatcaaccccccgctacaagcgtacctgcgccacgcgccaaattcagagctgtacgcacgactgagggagaggaagaaacagagagccgggtgccaggaagcaccagacctcagaggtccttcctctcccgtgttgtacgagcagccctgcccttgcagctcctcttgcttctgctacttctattggcctgcctgctgccatctagtgaggaggactattcctgtacgcaggctaataatttcgcccgctccttttaccccatgctccgctacaccaatggtccaccccctacctag

SEQ ID NO: 257170 - DNA, 1290 bp, Artificial Sequence
  derived and/or modified sequence
atggagggggacagaaatgtgccccctgtgcccccagccagcagcaccccctacaagccaccctacggcaagctgctgctgcccccaggcacagatggcggcaaggagggcccccgggtgctgaatggaaacccccagcaggaggatggcggcctggccggcatcacagagcagcagagcggggcctttgaccgctgggagatgatccaggcccaggagctgcacaacaagctgaagatcaagcagaacctgcagcagctgaacagcgacatcagcgccatcaccacctggctgaagaagacagaagctgagctggagatgctgaagatggccaagcccccaagtgacatccaggagattgagctgcgggtgaagaggctgcaggagatcctgaaggcctttgacacctacaaggccctggtggtgtctgtgaatgtgagcagcaaggagttcctgcagacagagagccctgagagcacagagctgcagagccggctgcggcagctgagcctgctgtgggaggccgcccagggcgctgtggacagctggaggggcggcctgcggcagagcctgatgcagtgccagggcagcaagacccggcccaggagtgatgtgctcttcttcaaggacttccaccagctgagccagaacctgctgctgtggctggccagcgccaagaacagacggcagaaggcccacgtgacagaccccaaggctgacccccgggccctgctggagtgccggcgggagctgatgcagctggagaaggagctggtggagcggcagccccaggtggacatgctgcaggagatcagcaacagcctgctgatcaagggccacggggaggactgcattgaagctgaggagaaggtgcacgtgattgagaagaagctgaagcagctgcgggagcaggtgtcccaggacctgatggccctgcagggcacccagaacccagccagccccctgcccagctttgatgaggtggacagcggggaccagcccccagccacctctgtgcctgccccccgggccaagttccgggctgtgaggaccacagaaggagaggaggagacagagagccgggtgcccggcagcacccggccccagaggagcttcctgagccgggtggtgcgggccgccctgcccctgcagctgctgctgctgctgctgctgctgctggcctgcctgctgcccagcagcgaggaggactacagctgcacccaggccaacaactttgcccgctccttctaccccatgctgcgctacaccaacggccccccacccacctag

SEQ ID NO: 257171 - DNA, 1290 bp, Artificial Sequence
  derived and/or modified sequence
atggagggcgaccggaacgtgccccccgtgccccccgccagcagcacgccctataaaccaccctacggaaaactccttctcccccctggaaccgatggcgggaaggagggcccccgcgtcctcaatggcaatccccagcaggaagacggagggctggcagggattactgaacagcagagcggcgcctttgatcgttgggaaatgattcaggcacaggagttgcataataagctgaaaatcaaacagaatctgcagcagttgaatagcgatatcagtgccattactacctggctcaaaaagaccgaggccgagctggagatgctgaagatggccaaacctcctagcgacatccaggaaattgagcttcgtgtcaagcgacttcaagaaatactcaaagcattcgacacttataaagccctggtagtctccgttaatgtctcttcaaaagagtttctgcagacggagtctccagaatcaacagagctccagtcacggctcaggcagttgagcttgctgtgggaagccgcccagggggccgtggacagttggagaggggggctccgccagtcattaatgcaatgtcagggctcgaagacacgacctcgttcagatgtgctgtttttcaaagacttccatcagctttcacagaaccttctgctctggctagccagtgccaagaataggcgccaaaaggctcatgtaacagatccaaaggctgacccacgggctctcctggaatgtagacgcgagctaatgcagctggagaaggaactagttgagcgtcaacctcaggttgatatgctccaggagatctccaatagcctgctcattaaagggcatggagaggactgcattgaagccgaagaaaaagtgcatgtgatcgaaaagaaactcaagcagctcagagagcaggtgtcccaagatctgatggctcttcagggaacccagaaccctgcaagtcccttgcccagcttcgatgaggtggactccggagaccagcctccagccacatctgtgcctgccccaagggcaaaatttagggccgtacgcaccacggagggcgaggaggaaaccgagagtcgagttcccgggtcaacaagacctcagaggtcattcctttcgcgagttgtgcgggccgccctgcccttgcagctgctccttctgctgcttctgctccttgcctgccttctgccatcttctgaggaagactactcatgtactcaggctaataattttgcacggagtttctatccaatgttgcgctataccaatggccctccacctacatag

SEQ ID NO: 257172 - DNA, 1290 bp, Artificial Sequence
  derived and/or modified sequence
atggaaggtgataggaacgttccaccagtgccaccggcatcttctaccccttataagcccccatacgggaagctactgctccctcccggtaccgacggcggtaaggagggaccacgcgttctaaacggcaaccctcagcaagaggacggcggattggcagggatcactgaacaacagtctggagccttcgacagatgggagatgattcaggctcaggaactgcacaataaactaaagatcaagcagaacctccagcagctgaacagcgacatcagtgctattacgacctggcttaagaagaccgaggctgaactggagatgctgaaaatggccaaaccaccttctgatatccaagagatagaactgagggtgaagcgcttacaggagatcttaaaggcttttgacacctacaaagctctcgtggtgtccgtgaatgttagtagtaaggagttcctgcaaactgaatcacccgagtctacagaactgcagagcaggcttcggcaacttagcctcctgtgggaagcggctcagggcgctgtggatagctggaggggcggtctccggcagagtctgatgcagtgtcaaggatctaagacacgacctcgcagcgacgtgctgttttttaaggatttccatcagctctcccagaacttgctgttatggctcgcgtccgctaaaaacagaagacagaaggcccacgtgactgatcctaaggcggatccgagagctttactggaatgccggagagaattgatgcaacttgaaaaagaactggttgagcggcaacctcaagtggacatgttacaggagattagcaacagcttattgataaaggggcatggggaggactgcattgaggctgaagagaaggtccatgtcattgaaaagaaactgaaacaactgagggaacaggtgagccaagatctaatggccctacagggcactcagaaccccgcttcccccctgccctccttcgatgaagtggacagcggggatcagcctccagctacttccgtgcctgctccaagggcgaaattcagggccgtgcgtacgactgagggggaggaggaaactgagtccagggtgcccggaagcactcgccctcaacgaagttttctctcgagagtagttagagcggctctccctctacaactcctcctgttattactgttactgctcgcttgcctgcttccaagctccgaggaggattattcgtgtacgcaggctaacaattttgccaggagcttttacccgatgctgcggtatactaacggcccacctccaacctag

SEQ ID NO: 257173 - DNA, 2097 bp, Artificial Sequence
  derived and/or modified sequence
atgatgagaagcagaagcaagagccccagaagacccagccccaccgccagaggcgccaactgcgacgtggagctgctgaagaccaccaccagagacagagaggagctgaagtgcatgctggagaagtacgagagacacctggccgagatccagggcaacgtgaaggtgctgaagagcgagagagacaagatcttcctgctgtacgagcaggcccaggaggagatcaccagactgagaagagagatgatgaagagctgcaagagccccaagagcaccaccgcccacgccatcctgagaagagtggagaccgagagagacgtggccttcaccgacctgagaagaatgaccaccgagagagacagcctgagagagagactgaagatcgcccaggagaccgccttcaacgagaaggcccacctggagcagagaatcgaggagctggagtgcaccgtgcacaacctggacgacgagagaatggagcagatgagcaacatgaccctgatgaaggagaccatcagcaccgtggagaaggagatgaagagcctggccagaaaggccatggacaccgagagcgagctgggcagacagaaggccgagaacaacagcctgagactgctgtacgagaacaccgagaaggacctgagcgacacccagagacacctggccaagaagaagtacgagctgcagctgacccaggagaagatcatgtgcctggacgagaagatcgacaacttcaccagacagaacatcgcccagagagaggagatcagcatcctgggcggcaccctgaacgacctggccaaggagaaggagtgcctgcaggcctgcctggacaagaagagcgagaacatcgccagcctgggcgagagcctggccatgaaggagaagaccatcagcggcatgaagaacatcatcgccgagatggagcaggccagcagacagtgcaccgaggccctgatcgtgtgcgagcaggacgtgagcagaatgagaagacagctggacgagaccaacgacgagctggcccagatcgccagagagagagacatcctggcccacgacaacgacaacctgcaggagcagttcgccaaggccaagcaggagaaccaggccctgagcaagaagctgaacgacacccacaacgagctgaacgacatcaagcagaaggtgcaggacaccaacctggaggtgaacaagctgaagaacatcctgaagagcgaggagagcgagaacagacagatgatggagcagctgagaaaggccaacgaggacgccgagaactgggagaacaaggccagacagagcgaggccgacaacaacaccctgaagctggagctgatcaccgccgaggccgagggcaacagactgaaggagaaggtggacagcctgaacagagaggtggagcagcacctgaacgccgagagaagctacaagagccagatcagcaccctgcacaagagcgtggtgaagatggaggaggagctgcagaaggtgcagttcgagaaggtgagcgccctggccgacctgagcagcaccagagagctgtgcatcaagctggacagcagcaaggagctgctgaacagacagctggtggccaaggaccaggagatcgagatgagagagaacgagctggacagcgcccacagcgagatcgagctgctgagaagccagatggccaacgagagaatcagcatgcagaacctggaggccctgctggtggccaacagagacaaggagtaccagagccagatcgccctgcaggagaaggagagcgagatccagctgctgaaggagcacctgtgcctggccgagaacaagatggccatccagagcagagacgtggcccagttcagaaacgtggtgacccagctggaggccgacctggacatcaccaagagacagctgggcaccgagagattcgagagagagagagccgtgcaggagctgagaagacagaactacagcagcaacgcctaccacatgagcagcaccatgaagcccaacaccaagtgccacagccccgagagagcccaccacagaagccccgacagaggcctggacagaagcctggaggagaacctgtgctacagagacttctag

SEQ ID NO: 257174 - DNA, 2073 bp, Artificial Sequence
  derived and/or modified sequence
atgatgagaagcagaagcaagagccccagaagacccagccccaccgccagaggcgccaactgcgacgtggagctgctgaagaccaccaccagagacagagaggagctgaagtgcatgctggagaagtacgagagacacctggccgagatccagggcaacgtgaaggtgctgaagagcgagagagacaagatcttcctgctgtacgagcaggcccaggaggagatcaccagactgagaagagagatgatgaagagctgcaagagccccaagagcaccaccgcccacgccatcctgagaagagtggagaccgagagagacgtggccttcaccgacctgagaagaatgaccaccgagagagacagcctgagagagagactgaagatcgcccaggagaccgccttcaacgagaaggcccacctggagcagagaatcgaggagctggagtgcaccgtgcacaacctggacgacgagagaatggagcagatgagcaacatgaccctgatgaaggagaccatcagcaccgtggagaaggagatgaagagcctggccagaaaggccatggacaccgagagcgagctgggcagacagaaggccgagaacaacagcctgagactgctgtacgagaacaccgagaaggacctgagcgacacccagagacacctggccaagaagaagtacgagctgcagctgacccaggagaagatcatgtgcctggacgagaagatcgacaacttcaccagacagaacatcgcccagagagaggagatcagcatcctgggcggcaccctgaacgacctggccaaggagaaggagtgcctgcaggcctgcctggacaagaagagcgagaacatcgccagcctgggcgagagcctggccatgaaggagaagaccatcagcggcatgaagaacatcatcgccgagatggagcaggccagcagacagtgcaccgaggccctgatcgtgtgcgagcaggacgtgagcagaatgagaagacagctggacgagaccaacgacgagctggcccagatcgccagagagagagacatcctggcccacgacaacgacaacctgcaggagcagttcgccaaggccaagcaggagaaccaggccctgagcaagaagctgaacgacacccacaacgagctgaacgacatcaagcagaaggtgcaggacaccaacctggaggtgaacaagctgaagaacatcctgaagagcgaggagagcgagaacagacagatgatggagcagctgagaaaggccaacgaggacgccgagaactgggagaacaaggccagacagagcgaggccgacaacaacaccctgaagctggagctgatcaccgccgaggccgagggcaacagactgaaggagaaggtggacagcctgaacagagaggtggagcagcacctgaacgccgagagaagctacaagagccagatcagcaccctgcacaagagcgtggtgaagatggaggaggagctgcagaaggtgcagttcgagaaggtgagcgccctggccgacctgagcagcaccagagagctgtgcatcaagctggacagcagcaaggagctgctgaacagacagctggtggccaaggaccaggagatcgagatgagagagaacgagctggacagcgcccacagcgagatcgagctgctgagaagccagatggccaacgagagaatcagcatgcagaacctggaggccctgctggtggccaacagagacaaggagtaccagagccagatcgccctgcaggagaaggagagcgagatccagctgctgaaggagcacctgtgcctggccgagaacaagatggccatccagagcagagacgtggcccagttcagaaacgtggtgacccagctggaggccgacctggacatcaccaagagacagctgggcaccgagagattcgagagagagagagccgtgcaggagctgagaagacagaactacagcagcaacgcctaccacatgagcagcaccatgaagcccaacaccaagtgccacagccccgagagagcccaccacagaagccccgacagaggcctggacagaagcctggagtag

SEQ ID NO: 257175 - DNA, 2097 bp, Artificial Sequence
  derived and/or modified sequence
atgatgcgctctcgctccaaaagccctagacgcccatcgcctaccgcccggggtgccaactgtgacgtagagctcctcaaaacaactactcgcgacagggaagaactgaaatgcatgctcgaaaaatacgaacgccatcttgctgaaattcagggcaatgttaaggtgctgaagagtgagcgggacaagatctttttgctctatgagcaggcgcaggaagaaatcacgcgtctgaggcgtgaaatgatgaaaagctgcaagtctcccaaaagtactactgcccacgccatactccgccgcgtggagacagaaagggatgtggcttttacagacctgcgccggatgacaacagaacgagacagcctgcgggagcgcctgaaaattgcccaggaaaccgcctttaacgaaaaagctcacctcgagcagcgcatcgaggagctcgaatgtacagttcataacctcgacgacgagaggatggaacaaatgtctaatatgactctcatgaaggaaaccatatccacagttgagaaagagatgaagtcattagctcgaaaagccatggatactgagtccgaactggggcgacagaaggccgaaaataacagcctgaggcttctgtacgagaacacagagaaagacctgtcggacacccagaggcatctggctaagaagaagtatgagcttcagctgacccaggagaaaattatgtgccttgatgagaaaattgacaattttactcggcagaacatagcgcaacgcgaagagatctctatccttggggggacattgaatgacctcgccaaggagaaggaatgtcttcaggcctgcctcgacaagaagtctgaaaacattgccagtctgggcgagagtcttgctatgaaagaaaaaaccatttctggcatgaagaacatcattgccgagatggaacaggcttcacgacagtgtactgaagccctcatcgtgtgcgagcaggatgtgtctcgaatgcgccgacaactcgatgagacgaacgacgaactggcacagatagccagagagcgggatatcctggcacatgacaacgataacctccaggagcagtttgccaaggccaagcaggagaatcaggccctgagcaaaaagctgaacgatacacacaacgaattgaacgacattaagcagaaggttcaggataccaatctggaagtgaacaaactcaaaaatatcctgaagagcgaagagtcagagaacagacagatgatggagcagcttcggaaagccaacgaggatgccgaaaactgggaaaacaaagcacggcagtctgaagccgacaataacaccctcaaacttgagctgataactgccgaagctgaaggtaaccgcttaaaggagaaagtggacagcctcaatcgcgaagtcgaacagcatctgaatgctgagagatcatataaaagtcagatctcgacactgcacaaatccgtggtcaagatggaggaagagttgcagaaagtgcagtttgagaaggtgtctgcacttgcggatctgtcttcgacccgggagctctgtatcaagttggactctagcaaggagctgctgaataggcaactcgttgcaaaggaccaggagatcgagatgcgagaaaacgaactggattctgcccactccgaaattgaactactgagaagtcagatggctaacgagcgcatttctatgcagaacctggaggctctgttggtggctaaccgggataaagaatatcagtctcagattgccctgcaggagaaagagagtgaaatccagctgctgaaagagcatctgtgtttagcagagaataaaatggctatacagtccagagatgtggctcaatttaggaacgtagtgactcaactagaggcagatcttgacattacgaagaggcaactaggaacagagagatttgaaagggagcgtgccgtacaggagttgagacgccagaattattcttctaatgcttatcatatgagttcgaccatgaagcctaacacaaagtgccattcacccgagagagcacatcacagaagccccgatcgtgggctggatagatcccttgaggaaaacctctgctaccgggatttctag

SEQ ID NO: 257176 - DNA, 2073 bp, Artificial Sequence
  derived and/or modified sequence
atgatgcggagccgtagtaaatctcctcgcaggcctagtccaaccgctagaggtgctaactgtgacgtggaactgctcaagaccacaaccagagaccgtgaagagttaaaatgcatgctggagaagtacgagcgacacctggcggagattcagggaaatgtgaaagtactgaaatccgaacgagataaaatcttcctgctgtacgagcaggcccaggaagaaatcacccgtctgaggcgcgagatgatgaagagttgcaaatcacctaagtcaaccaccgcacatgctatactgcgcagagtggagacagagagagatgtagcctttacggaccttcggcgtatgacaaccgaacgggacagtctcagagagcgcttgaagatcgcacaggagacagcctttaatgaaaaggcccacctggaacagcggattgaggagctcgagtgtactgttcacaacctggacgatgagcgcatggaacagatgagtaacatgactcttatgaaggagaccatcagtactgtggaaaaggaaatgaagtcgttggcacgcaaagctatggataccgagtctgaactgggacgccagaaagccgaaaataactctttaaggttgctatatgagaacacggagaaggacctgtccgacactcagagacatctggcaaaaaagaagtacgagctccagctgactcaagagaaaatcatgtgcttggatgagaagattgataattttacaagacagaatatcgcacagagggaagaaatttccattctcggtggcaccctcaatgacctggctaaggagaaagagtgcttgcaggcttgcttggataagaaatcggaaaacatagccagtttgggggagtcattagctatgaaggagaagacaataagtggaatgaagaatattatcgctgagatggaacaagcatcccggcagtgtacagaggccctcattgtatgtgaacaggacgtgtctcggatgcgcaggcagctcgacgagacgaacgatgaactcgcccagatagctcgcgagcgggatatcctagcacatgataatgacaacttgcaggagcagtttgcaaaggctaagcaagaaaatcaggcactgagtaaaaaacttaatgacacccacaatgaacttaatgacatcaaacagaaggtccaggacaccaatcttgaagttaacaaactcaaaaacatccttaagtccgaagagagtgaaaaccgacagatgatggagcagctacgcaaggctaacgaagatgctgaaaattgggagaacaaagccagacagtcagaagctgataacaataccttgaagttagaactcatcacagccgaagccgagggtaatagactcaaggagaaggtcgattccctaaatcgagaagtcgagcagcatctgaatgcagagaggagctataagtcccagatttctaccttgcacaagtctgtggtgaagatggaagaagagctccagaaggtccagtttgaaaaagtttcagcactcgccgacctatctagtactcgggaactttgcattaagcttgattccagtaaagagctcctgaaccgacaactggtcgccaaagatcaggaaatcgaaatgcgagaaaacgaactggattctgcccacagcgagattgaattactgcgcagtcaaatggctaatgagcgaatctctatgcagaacctagaagcattactggtcgcaaaccgggacaaggagtaccagtcccagatcgctttgcaggagaaagagagcgagatccagctgctgaaagagcacttgtgtctggccgaaaacaaaatggccatccagtcgagggatgtggctcaatttcgtaacgttgtaacccagctcgaagccgatttagatatcaccaagcggcaactgggcaccgagcggtttgagcgcgagagagccgtgcaggagctgcggcgtcaaaactatagcagtaatgcatatcatatgtcctcgacaatgaagcccaacacaaagtgtcattcccccgagagagctcaccacagatcacctgatcgaggtcttgaccgttcacttgagtag

SEQ ID NO: 257177 - DNA, 2097 bp, Artificial Sequence
  derived and/or modified sequence
atgatgaggtcccgcagcaagagcccaagaaggccctctccaaccgcaagaggtgctaattgtgatgtggagctactcaaaacaaccacacgcgatagggaggaactgaagtgtatgctcgagaagtacgagcgacacctcgctgagatccagggtaatgttaaagttctaaaaagcgaacgtgataaaattttcctgctgtatgagcaagcccaggaggagattacgaggctccgcagggagatgatgaaatcttgtaagtccccgaagtccaccaccgcccatgctatcctgcgtcgggtagagaccgaacgcgatgtcgcatttacggaccttcgccggatgactacagaacgcgattcccttcgtgaaagacttaagattgcccaggaaactgcttttaacgagaaggctcacctcgagcagaggatcgaagaactggaatgcaccgtgcacaatctggatgatgagaggatggaacagatgtccaatatgacactcatgaaggaaacaatcagcacagtcgaaaaagaaatgaagtcactcgcacgcaaggctatggatacggaatctgaactaggcagacagaaggcagaaaacaactctctccggctcttgtacgagaatacagagaaggacctgtcagacacccagcggcacctggccaaaaagaagtacgaactgcagttaacccaggagaagattatgtgtttggatgagaagatcgacaattttacacgccagaatattgcccaaagggaagagatcagcatcctgggtggaactctgaacgatctggctaaagagaaagaatgtctccaggcttgcttggataagaagagtgaaaacatcgcatcactcggggagagcttagcaatgaaagaaaagactattagcgggatgaagaacatcattgccgaaatggaacaagcctcaaggcagtgcaccgaagctttgattgtgtgcgagcaggatgtgtcacggatgcgacggcagctggacgaaaccaatgatgaattagcgcagatagcacgggaaagagatatacttgctcacgataatgataacttgcaggagcaatttgctaaggctaagcaggagaatcaggccctgtctaaaaagctgaacgatacacacaacgagttaaatgacatcaagcaaaaggtgcaagacacaaacttggaagtcaacaaactgaagaacattctgaagtctgaggagtcagaaaaccgccaaatgatggaacagctgcgaaaagccaatgaagacgccgaaaactgggaaaacaaggcccgtcagtctgaagcagataataatacactgaagctggaactcatcacggccgaggccgagggtaatcggttgaaggagaaggtcgactccttaaacagggaggtggaacagcacctgaacgctgagcgatcttacaaaagccaaatatccaccctgcacaaaagtgtggtaaaaatggaagaggaactccagaaagtccaatttgaaaaggtgtcagccttagccgacctgtcatcaacacgggagctatgcattaagttggacagcagtaaggaattgctcaacagacaactagtggctaaagatcaggagatagagatgcgggaaaacgaattggacagcgcgcacagcgagattgagcttctgcggagccagatggcaaacgaacgcatttccatgcagaacctggaggctctcctggtagcaaacagagataaggagtatcaatcccagatagcccttcaggagaaggagagtgaaatccagctgctgaaggaacacctttgcctggccgaaaacaagatggccatccagtcgcgggacgtggctcaattccgcaacgttgttacccaactggaagctgatttggatataaccaagcggcagctaggaacagaaagatttgaaagagagagggccgtacaggagttgcggagacaaaactattcctccaacgcctaccacatgagcagtaccatgaaaccgaacactaagtgccactcccctgaaagagcacatcatagatcccccgatcgcggtctagacaggagcttggaagagaacctctgttacagggatttttag

SEQ ID NO: 257178 - DNA, 2097 bp, Artificial Sequence
  derived and/or modified sequence
atgatgaggagccggagcaaaagccctcggcgacccagccctaccgctcggggcgctaattgcgatgttgaactactgaagacaacaacaagagaccgggaggaactcaagtgcatgctggagaagtatgaacgccatctggccgagatacagggaaatgtgaaggtgcttaagtctgagcgggacaagatctttctcttgtacgagcaagctcaggaagagatcactcggcttaggcgggaaatgatgaaaagttgcaaatctccaaagagtacaacagctcacgctatcctccgcagggtcgaaactgagagggacgtagcctttacagacctgaggcgtatgacaactgagcgggattccctgcgggaaagacttaaaatcgcgcaagagactgcttttaacgagaaagcccacttggagcaacggattgaggagctggagtgtaccgttcacaatctcgacgacgagcgtatggagcaaatgtccaacatgaccttgatgaaagaaacaatctcaaccgtagaaaaagaaatgaagtccctggctcgcaaagccatggacacagaatcagagctcggtcgccaaaaggccgaaaacaactcgttacggttattatacgagaatactgaaaaggacctgtctgatacgcagcgtcatctggctaagaagaaatatgagttgcaactgacacaggaaaagatcatgtgcctcgacgagaagatagataatttcactcggcagaatatcgctcagagggaagagatcagtattcttggcggaactcttaatgatctcgctaaggagaaggaatgtctccaggcttgtttagacaaaaagagcgaaaatattgcatcgctgggtgagtcattggccatgaaagagaaaaccatctccgggatgaaaaacatcatcgccgagatggaacaggcatcaagacagtgtaccgaggccctcattgtgtgcgaacaggatgtgtcaagaatgagacggcagctggacgagacgaatgatgaactcgcacaaatcgcccgggagagagatatcctcgcccacgacaacgacaaccttcaggagcagtttgctaaggccaagcaagagaaccaagcgctgagcaagaagcttaacgacacgcataatgaactcaacgacatcaagcagaaggtgcaggatactaatttagaggtgaacaagctgaaaaacattttgaaaagtgaagagtccgagaacagacaaatgatggaacagctgaggaaagctaatgaggatgctgaaaactgggagaacaaggcccgtcagtctgaggctgataataatactctcaagctggagcttattaccgcagaggcagagggaaatcgtctcaaagagaaggttgactccctaaatcgtgaagtggaacagcacctaaatgccgaaaggtcctataaaagccagatttcgaccctgcacaaatctgtagtgaaaatggaggaggagcttcagaaggtacagttcgagaaggtgtctgccttggcagatttgtcctcaaccagggagctctgtattaaacttgactccagtaaggagctgttaaatagacagttagtggctaaggaccaggagatcgagatgagggagaacgagcttgattcagcacactcagaaattgagctgctcaggagccagatggccaatgaaagaataagcatgcaaaatctggaagcactcctggtcgctaacagagataaggagtaccagagccaaatcgcgcttcaagaaaaagagtccgagatccaactcttgaaggaacacctgtgcctggcagaaaataaaatggctatccaaagcagagatgtagctcagttcagaaatgtagtgacgcagctggaagccgacctcgacattaccaagaggcagctgggaacggagaggttcgaacgtgagcgagcggtgcaagagttgcgtcgacagaattactccagcaacgcataccacatgtcatctaccatgaaacctaacacgaagtgccacagtcccgaacgtgcacaccatcgaagcccggaccggggactcgatagaagcctcgaggagaacctttgctaccgggatttttag

SEQ ID NO: 257179 - DNA, 2097 bp, Artificial Sequence
  derived and/or modified sequence
atgatgcgctctaggagcaaatcacctagaaggccttcaccaacagcccgtggcgccaattgtgacgtcgaactgctgaagaccacaacccgtgaccgcgaagagctcaagtgtatgttggagaagtacgagaggcacctcgcagagatccagggcaacgtaaaagtactcaagtccgaaagggataaaatctttctactgtatgagcaggcccaggaggagatcacccgccttagacgggaaatgatgaagtcatgcaagtctcctaaatctacaactgctcacgccatactcagaagagttgaaaccgagagagacgtagcctttactgatcttcgtcggatgacaactgagagggactcattgagagagcgtctcaaaattgcccaggaaacggcatttaacgagaaggctcatctggagcaaagaattgaggaactcgagtgcaccgtgcacaatctcgatgatgagcggatggagcaaatgagcaatatgacattaatgaaagagacaatctccaccgtggagaaggagatgaagtctcttgctaggaaggccatggacacagagtctgagttagggcgccagaaggccgaaaacaattcgctccgcttactgtacgagaacacagaaaaggatctcagcgatactcagagacacctggccaaaaagaagtatgagttgcaactgacccaggaaaagattatgtgcttggatgaaaaaattgataatttcaccagacagaacatcgctcaacgggaagagatttcgatcctgggaggcacgttaaacgatctggctaaggaaaaagagtgtctccaggcatgcctggataagaagtccgagaacattgcctccttgggggagtctctggctatgaaagaaaaaaccattagcgggatgaaaaacatcattgcggagatggagcaggcttctagacagtgtaccgaggccctaatcgtgtgtgaacaggacgtatcgagaatgcggcgtcaactcgatgaaaccaacgacgagttagcccaaatcgcgcgagagcgtgatattttggcccacgacaacgacaacctgcaggaacaattcgccaaggccaagcaggaaaaccaagccttaagtaagaaattgaatgatacacacaacgaactgaatgatataaagcagaaggtgcaagacacgaaccttgaggtcaataagctgaaaaatatcctcaagtccgaagagtcagaaaaccgccaaatgatggaacagttgcggaaagcaaacgaagatgccgagaattgggagaacaaagccaggcagtcggaagccgataacaatacccttaaactggagctgattaccgccgaagctgaaggcaacagactcaaggagaaggtcgatagccttaatagagaagtagaacaacacttgaatgccgaacgatcttacaaatcccagattagtacgctgcataagagtgtcgtgaaaatggaggaggaactacaaaaggttcagttcgaaaaagtttccgccttggctgacctctcctctactagagaactgtgcatcaagttggactccagcaaagagcttctgaacaggcagctggtcgctaaagatcaggagatcgaaatgagggaaaacgagttagatagtgcccatagcgagattgaactgctacggagccagatggctaatgagcgcatctctatgcagaacctggaggccctccttgttgcaaatagggacaaagagtaccaaagccagattgctctacaggaaaaggaatctgagatccagttgctcaaggagcatctgtgccttgcagaaaataagatggccatacagtctagggatgtagcccagttcaggaatgtagtgacacagctggaggcggacctggacataactaagcgccagcttggaacagagagatttgagagagaacgcgctgtgcaggaattacggaggcagaactattcttctaatgcataccatatgtctagcaccatgaagccgaacaccaagtgccatagtccagagcgggcccatcatagatcccccgataggggactggatcgctcactcgaggaaaacctctgctatagggatttttag

SEQ ID NO: 257180 - DNA, 2097 bp, Artificial Sequence
  derived and/or modified sequence
atgatgaggagccgcagcaagagcccccggcggcccagccccacagcccggggggccaactgtgatgtggagctgctgaagaccaccacccgggaccgggaggagctgaagtgcatgctggagaagtatgagcggcacctggccgagatccagggcaatgtgaaggtgctgaagtctgagcgggacaagatcttcctgctgtatgagcaggcccaggaggagatcacccggctgcggcgggagatgatgaagagctgcaagagccccaagagcaccacagcccacgccatcctgcggcgggtggagacagaaagagatgtggccttcacagacctgcggaggatgaccacagagcgggacagcctgcgggagcggctgaagatcgcccaggagacagccttcaatgagaaggcccacctggagcagagaattgaggagctggagtgcaccgtgcacaacctggatgatgagaggatggagcagatgagcaacatgaccctgatgaaggagaccatcagcacagtggagaaggagatgaagagcctggccaggaaggccatggacacagaaagtgagctgggccggcagaaggccgagaacaacagcctgcggctgctgtatgagaacacagagaaggacctgagtgacacccagaggcacctggccaagaagaagtatgagctgcagctgacccaggagaagatcatgtgcctggatgagaagattgacaacttcacccggcagaacatcgcccagcgggaggagatcagcatcctgggcggcaccctgaatgacctggccaaggagaaggaatgtctgcaggcctgcctggacaagaagtctgagaacatcgccagcctgggggagagcctggccatgaaggagaagaccatcagcggcatgaagaacatcatcgccgagatggagcaggccagccggcagtgcacagaggccctgattgtgtgtgagcaggatgtgtccaggatgaggcggcagctggatgagaccaatgatgagctggcccagatcgcccgggagcgggacatcctggcccatgacaatgacaacctgcaggagcagtttgccaaggccaagcaggagaaccaggccctgagcaagaagctgaatgacacccacaatgagctgaatgacatcaagcagaaggtgcaggacaccaacctggaggtgaacaagctgaagaacatcctgaagtctgaggagagtgaaaatcggcagatgatggagcagctgaggaaggccaatgaagatgctgagaactgggagaacaaggcccggcagagcgaggccgacaacaacaccctgaagctggagctgatcacagctgaggccgagggcaaccggctgaaggagaaggtggacagcctgaaccgggaggtggagcagcacctgaatgctgagaggagctacaagagccagatcagcaccctgcacaagtctgtggtgaagatggaggaggagctgcagaaggtgcagtttgagaaggtgtctgccctggccgacctgagcagcacccgggagctgtgcatcaagctggacagcagcaaggagctgctgaaccggcagctggtggccaaggaccaggagattgagatgagagaaaatgagctggacagcgcccacagcgagattgagctgctgcggagccagatggccaatgaaagaatctccatgcagaacctggaggccctgctggtggccaacagagacaaggagtaccagagccagatcgccctgcaggagaaggagagcgagatccagctgctgaaggagcacctgtgcctggccgagaacaagatggccatccagagcagagatgtggcccagttcagaaatgtggtgacccagctggaggccgacctggacatcaccaagaggcagctgggcacagaaagatttgagcgggagagagctgtgcaggagctgcggcggcagaactacagcagcaatgcctaccacatgagcagcaccatgaagcccaacaccaagtgccacagccctgagcgggcccaccacaggagcccagaccggggcctggacaggagcctggaggagaacctgtgctacagagacttctag

SEQ ID NO: 257181 - DNA, 2073 bp, Artificial Sequence
  derived and/or modified sequence
atgatgaggagccgcagcaagagcccccggcggcccagccccacagcccggggggccaactgtgatgtggagctgctgaagaccaccacccgggaccgggaggagctgaagtgcatgctggagaagtatgagcggcacctggccgagatccagggcaatgtgaaggtgctgaagtctgagcgggacaagatcttcctgctgtatgagcaggcccaggaggagatcacccggctgcggcgggagatgatgaagagctgcaagagccccaagagcaccacagcccacgccatcctgcggcgggtggagacagaaagagatgtggccttcacagacctgcggaggatgaccacagagcgggacagcctgcgggagcggctgaagatcgcccaggagacagccttcaatgagaaggcccacctggagcagagaattgaggagctggagtgcaccgtgcacaacctggatgatgagaggatggagcagatgagcaacatgaccctgatgaaggagaccatcagcacagtggagaaggagatgaagagcctggccaggaaggccatggacacagaaagtgagctgggccggcagaaggccgagaacaacagcctgcggctgctgtatgagaacacagagaaggacctgagtgacacccagaggcacctggccaagaagaagtatgagctgcagctgacccaggagaagatcatgtgcctggatgagaagattgacaacttcacccggcagaacatcgcccagcgggaggagatcagcatcctgggcggcaccctgaatgacctggccaaggagaaggaatgtctgcaggcctgcctggacaagaagtctgagaacatcgccagcctgggggagagcctggccatgaaggagaagaccatcagcggcatgaagaacatcatcgccgagatggagcaggccagccggcagtgcacagaggccctgattgtgtgtgagcaggatgtgtccaggatgaggcggcagctggatgagaccaatgatgagctggcccagatcgcccgggagcgggacatcctggcccatgacaatgacaacctgcaggagcagtttgccaaggccaagcaggagaaccaggccctgagcaagaagctgaatgacacccacaatgagctgaatgacatcaagcagaaggtgcaggacaccaacctggaggtgaacaagctgaagaacatcctgaagtctgaggagagtgaaaatcggcagatgatggagcagctgaggaaggccaatgaagatgctgagaactgggagaacaaggcccggcagagcgaggccgacaacaacaccctgaagctggagctgatcacagctgaggccgagggcaaccggctgaaggagaaggtggacagcctgaaccgggaggtggagcagcacctgaatgctgagaggagctacaagagccagatcagcaccctgcacaagtctgtggtgaagatggaggaggagctgcagaaggtgcagtttgagaaggtgtctgccctggccgacctgagcagcacccgggagctgtgcatcaagctggacagcagcaaggagctgctgaaccggcagctggtggccaaggaccaggagattgagatgagagaaaatgagctggacagcgcccacagcgagattgagctgctgcggagccagatggccaatgaaagaatctccatgcagaacctggaggccctgctggtggccaacagagacaaggagtaccagagccagatcgccctgcaggagaaggagagcgagatccagctgctgaaggagcacctgtgcctggccgagaacaagatggccatccagagcagagatgtggcccagttcagaaatgtggtgacccagctggaggccgacctggacatcaccaagaggcagctgggcacagaaagatttgagcgggagagagctgtgcaggagctgcggcggcagaactacagcagcaatgcctaccacatgagcagcaccatgaagcccaacaccaagtgccacagccctgagcgggcccaccacaggagcccagaccggggcctggacaggagcctggagtag

SEQ ID NO: 257182 - DNA, 2097 bp, Artificial Sequence
  derived and/or modified sequence
atgatgcggagccggagcaagagcccccggcggcccagccccaccgccaggggcgcaaattgcgatgtagagctattgaagaccactaccagggatagagaagaattaaagtgcatgctcgagaagtacgagcgtcatctggctgaaattcagggtaacgtgaaggtcctgaaaagcgaaagggacaagatcttcctgctgtacgaacaggcccaagaggagataacccggctgcgccgcgagatgatgaaaagctgcaaaagccccaaatcgaccacggcccatgcaatcctgaggcgcgtggagacagaacgcgacgtggcctttaccgacctgcgtcgcatgactactgaaagagatagcttgagagagcgtttaaagatagcccaggagaccgcgttcaacgaaaaggcccacttggagcagcgcattgaagaactggagtgcactgttcataacctcgatgacgaacggatggaacagatgtccaatatgaccctaatgaaagagaccataagtacagtggagaaagaaatgaagtctttggcgagaaaggctatggataccgaatccgagttggggcgccagaaggctgaaaataactctttacgcttgctttacgagaacacggagaaagacctgtcggacacccagaggcatctggcaaagaaaaagtacgagctgcaactgacccaggaaaaaattatgtgtctggatgagaagatagataacttcactcgtcagaacattgcccagcgcgaagaaataagcattctcggaggtacactgaacgacctggcaaaagagaaggagtgcctacaagcctgtctcgataagaaatctgaaaacatcgcctcactgggcgaatctctggctatgaaggaaaaaacgatttcaggtatgaaaaatattatcgccgaaatggaacaagcttccaggcagtgcacggaggcactgatcgtttgtgagcaggacgtctccagaatgcggagacaactggacgagactaacgacgagcttgctcagatcgctagggaaagagatattctggcacacgacaatgataacctgcaggagcaattcgccaaggctaagcaggagaaccaggcactgtcgaagaagttgaacgacacacacaatgaacttaatgacatcaagcagaaggtccaggacacgaatctggaggtgaacaagctgaaaaatatcctgaaatccgaggagagtgagaatcggcagatgatggagcagctccgtaaggccaacgaggacgcggagaactgggagaataaggcccggcagagcgaagctgacaacaacaccctgaaactggagctcatcaccgccgaagcggaggggaatagactgaaggagaaggtcgatagcttaaatcgagaagtcgaacagcatctcaatgccgaaagaagctataagagccagatctccaccttacacaagagtgtagttaaaatggaagaggaattgcagaaggttcagtttgagaaagtttccgctctcgctgacctatcaagtacgcgagaactctgtatcaagctcgattcatccaaagaactcctgaataggcagctggtcgcaaaggatcaagagatcgaaatgcgtgaaaacgaactggattctgcacactcagagattgagttactgcggtcgcagatggctaatgagcgaatttcaatgcagaacctggaggccctgctggtggccaatagagacaaagagtaccaatcccagatagctctgcaggagaaggagagcgaaattcagctgctgaaggaacatctttgcctagctgagaacaagatggctattcagtcccgggacgtggcacagtttcggaacgtcgtgactcagctggaggctgatcttgacataacgaaacgacagttagggacggagcgctttgagcgggagcgagccgtacaggagttgagacgccagaattactcctctaatgcataccacatgtcatcaaccatgaagcccaatacaaaatgccacagccccgagcgagctcatcatagaagtcccgacaggggacttgacaggtccctcgaggaaaacctgtgttaccgcgatttttag

SEQ ID NO: 257183 - DNA, 2073 bp, Artificial Sequence
  derived and/or modified sequence
atgatgcggagccggagcaagagcccccggcggcccagccccaccgcgcgaggcgctaactgcgacgtcgaacttttgaaaaccacaacaagagatcgagaagaactgaagtgcatgctggaaaaatatgaaagacatctcgcggaaatccagggcaacgtcaaagtgctgaaatctgagcgcgacaaaattttcctgctatatgagcaggcccaggaagagatcacccggctgagaagggaaatgatgaagagctgtaagtcccccaaaagcaccaccgctcatgcaatcctgagaagagtggaaacggaacgagatgtcgctttcaccgacctacgccgtatgactaccgagcgtgattcactgagggagcgccttaagatcgcacaggaaactgccttcaacgaaaaggctcatctcgaacaacgaatcgaagagcttgaatgtactgtacataacctggatgatgaacgcatggagcagatgagcaatatgacgctgatgaaagaaacaatctccaccgtagaaaaggagatgaagagtctcgcaaggaaggccatggatactgaatccgagctgggccgacagaaggctgagaataattctctccgcctcctgtacgagaataccgagaaggacctaagcgacacacagcgtcatctagcgaaaaagaaatacgaactgcagctcacacaagaaaagattatgtgcttggatgagaaaattgacaattttacccgccaaaatatcgcacaacgcgaggagatctcaatcctgggaggcacactgaatgatttggccaaagaaaaggagtgtctacaagcttgtctagataagaagtcagagaacatcgctagccttggcgagtcgctggccatgaaagaaaagaccatctcaggcatgaaaaatataattgctgaaatggagcaagcttcaaggcagtgcacagaggccttgattgtttgtgagcaggatgtcagccgaatgcgaagacagctggatgagaccaacgacgaactggcacagattgctcgcgagagggatattttggcccatgataacgataatctgcaagaacaatttgctaaggcgaagcaggagaatcaggccctgtcaaaaaagctcaacgacacacataacgaactgaatgacatcaagcagaaagtacaggacaccaatttggaagtgaacaaactgaaaaacatcttaaagtctgaggagtctgaaaaccgccagatgatggagcaactaagaaaagctaacgaggacgccgagaactgggagaataaagcccgccagtctgaggcagacaataacactttaaagctggaactgataaccgctgaggctgaggggaatcggctcaaggagaaggtagactcactcaaccgggaagtggaacagcacctcaacgctgaacgttcttacaaatcacaaatatccacactccacaaaagtgtggtgaagatggaggaggaactgcagaaggtgcagtttgaaaaggttagcgcactggcagacctctcctctacgagggagctctgcattaagctggactctagtaaggaattgctgaataggcagctcgtcgcaaaggatcaggagattgaaatgagagaaaacgagcttgattcagcccattccgaaattgagctcctgagaagccagatggccaatgaaaggattagcatgcaaaatctagaggctctactggttgcaaaccgagataaggaataccaatcacaaatagcattgcaggaaaaagagagtgaaatacagcttttgaaagaacatctgtgtttagcagagaataaaatggccatccagtctcgcgacgtggcccaattccgcaatgtcgtgacgcagctagaggctgacctggatattactaaaaggcagttgggtactgaacggtttgagcgtgaaagggcagtgcaggagctccgaagacagaactatagctccaatgcttatcacatgtcatctacaatgaaacctaatacgaagtgtcacagtccagagcgggcccaccaccgatcaccagatcgtggtctggacaggtccctagaatag

SEQ ID NO: 257184 - DNA, 2097 bp, Artificial Sequence
  derived and/or modified sequence
atgatgcggagccggagcaagagcccccggcggcccagccccaccgctcggggagcaaattgtgacgttgaactgttaaaaaccactactagagaccgagaggaattgaagtgcatgctggagaaatacgaaaggcatctggctgagatacagggaaacgtaaaggtcctgaagtccgaacgagacaagatatttctgctgtacgagcaggcccaggaggagatcactagactaagacgagagatgatgaaaagctgtaagagtcctaagagcactactgctcacgccatccttcgccgggttgaaactgagcgggatgtggcattcaccgaccttagacgaatgactaccgagagggattctctgagggagcgactgaagatcgctcaagaaactgcctttaatgagaaagcccacctggagcagagaattgaggaacttgagtgtactgtgcacaatctcgatgatgagcgcatggagcagatgtccaacatgacactcatgaaggagaccattagcaccgtggaaaaagaaatgaaaagtctggcccgcaaggccatggatacagaatctgaattgggcagacagaaggccgagaacaattctctcaggcttttatacgaaaatactgaaaaggaccttagcgatacacaaaggcacctcgcaaagaagaagtatgagctccagctgacgcaggaaaaaattatgtgtctagacgagaagattgataattttactagacagaacattgcccaacgagaggagatttctatcctgggtgggactttaaacgacctcgcgaaggaaaaagaatgtctgcaagcttgcctcgacaagaaaagcgaaaatattgccagtctgggtgagagcctagcaatgaaggaaaaaactatatctggcatgaaaaatattatcgcagaaatggaacaagcctccaggcagtgtactgaggcattaattgtatgtgagcaggatgtatcccgcatgcgccggcagctcgacgaaacaaatgacgagttggcacaaatcgccagggagagggatattcttgcccatgataatgacaatctgcaagaacagtttgcaaaagccaaacaggagaaccaggctctctctaagaagcttaacgatactcataacgagctgaacgacatcaagcagaaagttcaggacaccaatcttgaagtgaataaactgaagaacatcctgaagtcagaggagtccgagaaccgccagatgatggagcagctgaggaaggcaaacgaggatgccgagaactgggaaaacaaggcaaggcaatctgaagctgacaacaacacgcttaagcttgagctcataacagccgaggccgagggaaatcgcctgaaggagaaagttgatagcctaaatagagaggtcgaacagcatctgaatgccgagagaagctataagagtcagatttctacactgcataagtcagttgttaaaatggaagaggagcttcagaaggtgcagttcgagaaagtgagcgccctcgccgacttgtcaagtactagggagctctgcatcaaattagattcgagcaaggagctcctgaacagacaactagtcgcaaaagaccaggagatcgagatgagggagaatgagctggacagcgctcacagtgagatcgagttgttgcgttctcagatggctaatgagaggataagcatgcagaacctggaggccttgctcgtcgccaacagggacaaggaatatcagagccagattgctcttcaagaaaaagagagcgaaatccagctactgaaagagcatctgtgtctggcagagaacaagatggctatccagtccagagatgttgcccagttcaggaacgtagtgactcaattagaagccgatcttgacattactaagaggcagctaggaaccgagaggttcgaacgcgagcgcgcagttcaggagctgagacggcagaactactcctctaatgcatatcacatgtcatcgacaatgaagcccaataccaagtgccattcgccagagagagctcaccaccgcagccccgatagggggctagatcggagtctggaggagaacctgtgctacagggatttttag

SEQ ID NO: 257185 - DNA, 2097 bp, Artificial Sequence
  derived and/or modified sequence
atgatgcggagccggagcaagagcccccggcggcccagccccaccgccaggggtgccaactgcgatgtagagttattgaaaactaccacccgggatagggaagagctcaagtgcatgctggagaaatatgagcgccacctggctgaaatccagggaaacgttaaagttcttaagagcgagcgcgacaaaatcttcctgctgtatgagcaggcccaggaagagatcactaggctcaggagagagatgatgaaatcctgcaagtctccaaaaagcacaactgctcatgccatacttcgccgagtggaaaccgaacgcgacgtggcattcactgacctcagacgtatgacaaccgagcgcgactctctcagggagagattgaagatcgcccaggagaccgcctttaatgagaaagcccatctcgaacaaagaatcgaagaactggagtgcacagtgcataacctcgatgacgagcggatggaacaaatgtctaatatgacgttaatgaaagaaactatcagcacagtggagaaagaaatgaagtcccttgctcgtaaggccatggacaccgaatcagagcttgggaggcagaaggcagagaacaactctctccgacttctctatgaaaacacagaaaaggacctgagtgacacccagcgtcatctggctaaaaagaaatacgagttgcagctcactcaagagaagatcatgtgcctggatgagaaaatcgacaacttcacccgccagaatattgcccaaagggaagagatcagtatcctgggaggtactttgaacgacctggcaaaggagaaagaatgtctgcaggcatgtttggacaaaaagagtgagaatatcgcatctctcggagagtcactggctatgaaggagaagactatttccggaatgaagaacatcatcgctgagatggagcaggcatctcgccagtgtaccgaagctttgatcgtgtgtgagcaagatgtcagtaggatgaggaggcaactggacgaaactaacgacgagctagctcagatcgccagggagagagatattctggcccacgataatgacaatctgcaggagcagttcgctaaggctaagcaggagaaccaagccctgagtaagaagcttaatgacacacacaatgaactgaacgatattaagcagaaggtccaggatactaaccttgaagtgaacaagcttaagaacatcctgaaaagtgaagagtccgagaacagacagatgatggaacaactgcggaaggctaatgaagacgccgaaaattgggagaataaggcacgacaaagtgaagccgataataatactcttaaacttgagttaattaccgctgaggcagagggaaacaggctcaaagagaaagtcgatagcttgaatcgagaggtggaacagcacctgaatgctgagaggagttacaaaagtcaaatcagtaccctgcataagagcgttgtgaagatggaagaggagctccagaaggtccaattcgagaaggtgagcgctttggctgatctgagtagtacaagggaactgtgcataaagctggactcaagtaaagaattgctgaataggcaactggtcgcgaaggaccaagagatcgagatgcgggagaacgagctcgactcagcccactccgagatcgagctcttgagaagccagatggccaatgagcgcatctccatgcagaatctggaggccctgttggtcgcaaatagggacaaggagtatcagtcccagatcgcactgcaggaaaaagagagtgagattcagctgttgaaagagcatctgtgtctggccgagaataaaatggccatacaatccagggacgtggcacagtttcgcaacgtggtgactcaactggaggccgacctggacattaccaagcggcagctggggactgaaaggttcgagagagaaagggcagtgcaagaactaagacgtcagaactattcgagtaatgcctaccacatgtccagtacaatgaaacctaataccaaatgccactcaccggagagggcccatcaccggtcacccgataggggccttgacaggtcattggaggagaatctttgctaccgggacttttag

SEQ ID NO: 257186 - DNA, 2097 bp, Artificial Sequence
  derived and/or modified sequence
atgatgcggagccggagcaagagcccccggcggcccagccccaccgcccgcggcgcgaactgtgacgtcgaactgctgaaaaccacaacccgcgacagagaagagttgaaatgtatgctggaaaagtacgagaggcacctcgccgaaattcagggaaatgtgaaagtgcttaagagcgagagagacaaaattttcctgttgtacgaacaggcacaagaagagatcactaggctgaggagagagatgatgaagtcctgtaagtccccgaaatcaaccacagcgcacgccatcctacgaagggtggagaccgaacgcgacgtggcattcacagacttgcgtcggatgacaactgagcgcgattcactgagagagcgattgaagattgctcaggagactgccttcaacgaaaaggcccacttggaacagaggatcgaagaattagagtgcacggtgcataacctggacgatgaacgcatggaacagatgagtaatatgaccctcatgaaagagaccatctcaacggtcgagaaggagatgaagagtttggcccgcaaagctatggatacggagagtgaactggggcgccagaaagctgaaaataattcgctgaggctgctgtatgagaatactgagaaggacttatcagatactcagcgccatcttgctaagaaaaaatatgagttgcaactgactcaggaaaagattatgtgcttggatgagaagattgacaatttcaccaggcagaacatagcacaaagggaggagatctccattctcggcgggacccttaatgacctcgccaaagaaaaagagtgcctgcaggcttgcctggataagaagtctgaaaatatcgcctccctgggggaatcgctggcaatgaaggagaagaccatctccggcatgaaaaacatcatagcagagatggagcaggcgtcgcgccagtgcactgaggcgctcatcgtgtgcgaacaggacgtgtccagaatgagacggcagctagacgaaactaacgacgaactagcccagattgccagggaaagagacattctggcgcatgataatgacaatctccaggagcagttcgctaaagctaaacaggagaaccaggctcttagcaagaagttgaatgatacgcataacgagctgaatgatatcaagcagaaggtacaggatactaatttagaggtgaataaacttaagaatattctgaaaagcgaagagagtgaaaaccgacagatgatggagcagctgcgaaaggctaacgaagatgccgagaattgggagaataaggctagacagtcagaggcggacaataatacgcttaagctggaactgatcacagccgaggctgagggcaaccgtttaaaagaaaaagtggacagcctgaacagagaggtcgagcagcaccttaacgctgaaagatcgtataagagtcagattagcacactccataaatctgtggttaaaatggaggaggaactgcagaaagttcagttcgaaaaggtgagcgcgctggccgatctgtcctcaaccagagaactgtgcatcaagttagattccagcaaggaactcttgaatagacaactggtggccaaagaccaggaaattgagatgcgcgaaaacgagcttgactcggcccatagtgagatcgagctcctgcggagccaaatggctaacgagaggattagcatgcagaacttggaagctctactggtggctaatagggataaggaatatcagagccagatcgcactacaggagaaagaatctgaaatacagctcctcaaagaacatctgtgtctggccgaaaataagatggccatacagtcacgcgatgtggcccagtttcggaatgtcgtgacacagcttgaggctgatctggatataacgaaacgtcagctcggcacggaaaggtttgagagggaaagagcagttcaggagttacgccgacagaactatagcagtaatgcctatcatatgagcagtaccatgaagccaaacaccaagtgccatagccccgagcgcgctcatcaccggtcccccgatcgtgggctcgataggtcccttgaggagaacttgtgttaccgggacttctag

SEQ ID NO: 257187 - DNA, 2097 bp, Artificial Sequence
  derived and/or modified sequence
atgatgcgcagccgctccaagagcccgagacggcctagccccaccgctcggggtgctaattgcgacgtggaactgctcaagaccacgaccagggaccgggaggagctaaagtgtatgctggaaaagtatgagagacacctcgctgagatacaggggaacgtgaaagtcctgaaatcggaacgggacaagatattcctcttgtacgagcaggctcaggaagagataacccggcttcgcagagagatgatgaaatcatgcaagtcccccaagagcaccacagcacacgccattctgcggagggtggaaactgagcgggatgtggccttcaccgacctgagacgcatgaccactgagcgggatagcctccgggagcgactgaaaatcgcccaggaaaccgcctttaacgaaaaagctcaccttgaacagcgtattgaggagcttgaatgcacagtccataatctggatgacgagcgaatggaacaaatgagcaacatgacccttatgaaagagacaatttcaacagtggaaaaggagatgaaaagcctggcgaggaaggctatggataccgagtcggagctgggcaggcagaaagctgagaacaacagtttgagactgctgtatgagaacacagaaaaggatctgtcggatacacagagacatctagcgaagaaaaagtatgagttgcaactaactcaagaaaagatcatgtgtttggatgaaaagatagacaacttcacaagacagaacattgctcagcgggaggaaattagtatactgggaggcaccctgaatgatttggccaaggaaaaagaatgcctgcaggcttgcttggacaaaaagtcagagaacattgccagcctgggagaatccctggctatgaaggagaaaaccatttccggtatgaagaacattatcgccgaaatggaacaagcctcacgccaatgtaccgaggcccttatcgtctgtgaacaggatgtcagcagaatgagacggcagcttgatgagaccaatgatgaactggcacaaattgcacgcgaacgggacatcctggcgcatgataacgataatctccaggaacagttcgctaaggcaaaacaggagaatcaggccctcagtaaaaagttgaacgacacacataatgaactgaatgatatcaaacaaaaggttcaggacactaaccttgaggtcaataagctgaagaatatccttaagtccgaagaaagtgagaataggcaaatgatggagcagctccgtaaagccaatgaagacgctgagaattgggagaacaaggcccgacagtcagaagcggataacaacacactcaagctcgagttgataactgctgaggctgaaggaaatcggctgaaggagaaagtggacagtctgaaccgggaagtggaacaacaccttaacgccgagcgcagctataaaagtcagatctcaaccttgcacaaatcagtggtaaagatggaagaagaacttcagaaggtgcagttcgagaaggtcagtgcactcgctgatctgtcaagcactcgcgaactgtgtattaaactcgacagctcaaaagaactgctgaacaggcagctggttgccaaagatcaggagatcgagatgcgggaaaacgagttagattccgcccacagcgaaattgaacttctgcgcagccagatggccaacgagcgcatttcgatgcagaacttggaggcacttctggtggcaaatcgggacaaggagtaccagagccagattgcgctgcaggaaaaagagtcagagatacagctcttgaaggagcacctctgtctcgctgagaacaaaatggcgatccaatccagagatgttgcccagttccggaatgtagtgacccagcttgaggctgacttagacatcaccaagcgtcagctcgggacggaaagattcgagcgggagcgagccgtgcaagagctacgcaggcagaactacagtagcaacgcatatcatatgtcttccactatgaaaccaaacactaaatgccacagccccgaaagagctcaccaccgctcacctgatagggggctggaccgctctctagaagaaaacctttgctatcgggacttttag

SEQ ID NO: 257188 - DNA, 2073 bp, Artificial Sequence
  derived and/or modified sequence
atgatgagaagccgctccaaatctcctaggcgaccatctcctaccgcccgtggggcaaattgcgacgtggaactcttgaagacaaccactagagaccgagaagaactgaagtgcatgttggagaagtatgagcggcatctagctgagatacagggaaatgtaaaggtgctgaaatctgagagggataagattttcctgctgtacgagcaggctcaggaagagatcaccagactccgcagggagatgatgaagtcctgcaagtccccaaagtccactacggcacacgcaatcctccgacgggtcgaaacggagagagatgtggcatttaccgacctgagaagaatgactaccgaaagggactcactgcgcgagcgattaaagatcgcacaggagacggccttcaatgaaaaggcccatctggaacagaggatagaggaactggagtgtactgttcacaacctggacgatgaacgcatggagcagatgtcaaatatgacactaatgaaggaaaccatttcgactgttgagaaagagatgaagagcctggctcggaaggccatggacactgaatcagagctaggacgacagaaggcagaaaacaacagtcttaggctgctatacgaaaataccgaaaaggatttgagtgacactcagagacacttagccaagaagaagtacgagctgcagttgacccaagagaaaattatgtgtctcgacgagaagatcgataattttaccagacagaatatcgcacaaagagaagagatttcaatacttgggggaacactcaatgacttggccaaagaaaaggagtgtctccaggcctgcttggataagaaaagcgaaaatatagcgagtcttggagaaagcctcgctatgaaggagaaaacgatttctggcatgaagaatatcattgctgagatggagcaagcatcaaggcagtgtactgaggctctgatcgtgtgtgaacaggatgtttcccggatgcggaggcaactggatgagacaaacgatgagctggctcagatcgccagagaacgcgatatattagcccacgacaatgacaacctgcaggaacaatttgctaaggccaagcaggagaaccaggcactgtcaaaaaagcttaatgacacccacaacgaactgaatgacataaaacagaaagtccaggacacaaacctcgaagtgaataagctgaaaaatatacttaaaagcgaggaaagcgagaacagacagatgatggaacagcttcgaaaggcgaacgaggatgcagaaaactgggagaacaaagccaggcagagcgaggccgataataataccttaaagctcgaactgattaccgctgaggccgaggggaaccggctgaaggagaaggtcgatagtctcaacagagaagttgaacagcaccttaacgccgagaggagttacaaaagccagatttctaccctgcataagagcgtggtcaagatggaagaggaattgcagaaggtacaatttgagaaggtcagcgccttggctgacctgtcctccacccgggagttgtgtattaagctggactcctcaaaagaactgttgaacagacagctcgttgccaaagatcaggagattgagatgcgtgagaacgaactcgattctgcccacagcgagatcgagctgcttcggagccagatggcgaatgaacgcatttctatgcaaaatttggaagcattactcgtcgctaacagagacaaagaataccagtctcagattgcattacaggaaaaagagagcgagatccagcttttgaaagagcacctttgcctggccgagaacaagatggcaattcagtcaagagacgtggcccagttccgtaacgtcgtcactcagctggaggctgatctcgacattactaagagacagctcggaacagaacgattcgagcgcgagagagcggtgcaggagctaagacgacaaaattactcttctaacgcctatcacatgtcatctaccatgaagcccaatactaaatgtcactcaccagaacgcgctcaccatcggtcccccgatcgcggtctggatcgcagtttggagtag

SEQ ID NO: 257189 - DNA, 2097 bp, Artificial Sequence
  derived and/or modified sequence
atgatgaggagtagatcaaagtctcctcgtagaccatcacccactgcacgcggtgccaactgcgacgtggagcttctcaaaacgacaacccgagacagggaggagctcaagtgcatgctggaaaagtacgagaggcacctcgccgaaatccaggggaacgtaaaagtcctaaaatcagaacgtgacaaaatttttcttctgtacgagcaagcgcaggaagagatcaccaggctgcgcagggaaatgatgaaaagttgtaagagtcccaagtccactaccgcgcatgccattctgcggagggtggaaaccgagcgggatgtggcttttacggatcttcgcaggatgaccaccgaaagggattctctgcgggagcgtttgaagatcgctcaagagaccgcttttaacgagaaagcgcatctagaacaaaggatcgaggaactggaatgcaccgtccataatctggatgacgagaggatggagcagatgagtaacatgaccctaatgaaggagaccatttcgactgtagagaaggagatgaaaagcctggccaggaaagccatggacaccgagagcgagctgggccgacagaaggctgagaacaactccctccgactgctctatgagaatacagaaaaagacctcagcgacactcagcgtcatttggctaagaagaagtacgaattgcagttgacacaagaaaagattatgtgcctggacgagaaaatcgacaactttaccagacaaaacatcgcacagcgggaagaaatctccatactaggtggcactctgaatgatctggctaaagagaaggaatgcttgcaggcctgcctggacaagaaaagcgagaacatcgcaagtttgggcgaaagcctggccatgaaggagaaaacgatcagcggtatgaagaacatcatcgccgagatggaacaggcgagccgacagtgcaccgaggccttaattgtttgcgagcaggatgtttcacggatgcgcagacagctggatgagactaatgatgagctcgcgcagatagccagggagagggacatcctcgctcacgataatgacaacctgcaggaacaatttgccaaagctaaacaagaaaaccaggcgctgagtaagaagcttaacgacacccataatgagctcaatgacatcaagcagaaagtccaggatactaatctggaagtcaacaaactcaaaaatatcctgaaatcagaggaaagcgagaaccgacagatgatggagcagttgaggaaagcaaatgaagacgccgaaaattgggaaaataaggcaagacagagtgaagcagacaacaacacactaaagctagaactgatcaccgcggaagcagagggcaacaggctgaaagaaaaggtcgatagcctaaaccgtgaggttgaacagcacctgaatgccgaaaggagctacaagagccagatttcaacactacacaagagcgtcgtgaagatggaagaagaactccagaaggttcagttcgaaaaggtgtccgctctcgccgatctgtcaagcactagagaactttgcatcaagttggattccagcaaagaactgctaaaccgccaactggtagccaaagaccaggaaatcgagatgagggagaatgaactcgattcagcccatagcgaaatagagctgttgcgctcacaaatggcgaatgagcgcatttccatgcagaatcttgaagccctactcgtagcaaatagagacaaagaatatcaaagccagatagccctgcaggaaaaagagagcgagatccagttacttaaggaacacctgtgcctggccgagaacaagatggccatccagtccagagatgtggctcaattccgcaatgtggtgactcagctcgaagccgatcttgacataacaaaaagacagctcgggactgaacgatttgagcgggagcgggcagtacaagagctgaggcggcagaattactcctcgaacgcttatcacatgtcctcaacaatgaagcccaataccaaatgtcactccccggagagagcacatcatagatctccggacaggggcttagatcgctctctggaggaaaatttgtgctatcgcgacttttag

SEQ ID NO: 257190 - DNA, 2097 bp, Artificial Sequence
  derived and/or modified sequence
atgatgcgcagtcggtctaagtctcccaggaggccttctcctacggcaagaggtgccaattgcgatgtcgagcttttgaaaaccacaaccagggacagagaagaattaaagtgcatgctcgagaaatacgaaagacacctggccgagatccaaggtaacgttaaagtacttaaatctgaaagggataagatctttctgctgtacgaacaagcccaggaagagattacgcgtttacgacgtgaaatgatgaagagttgtaagtcacctaagtcaactaccgcccacgccatcctgcgccgagtggagaccgagcgggacgtggcttttactgacctcagacgcatgaccacagaacgagattcacttcgggagcggctcaaaatagctcaggaaacagcgttcaatgaaaaggcccatctggaacaaagaatcgaagagctggaatgcactgtccataacctcgacgacgaaaggatggagcagatgtccaacatgacactgatgaaagaaaccattagtaccgttgagaaagagatgaagtccctggccagaaaggccatggatacagaatccgagctggggcgtcagaaagcagagaataacagtctgcgactactgtacgaaaacacagaaaaagacctctctgacactcagcggcacctggccaaaaagaaatatgagttacaactcacacaggagaagatcatgtgccttgatgagaagatcgataattttactcgtcagaatatcgcgcagagggaggaaattagcattttgggcggtacacttaacgatttggctaaggagaaggaatgccttcaggcgtgtctagacaagaaaagcgagaacattgcctcattaggcgagagtttggcaatgaaggaaaagaccatctcaggaatgaagaacattattgctgagatggaacaggcttcacggcaatgtactgaggccctcattgtgtgtgagcaggatgtctcccgcatgcggaggcagctggatgaaacaaacgacgaattggctcagatcgctagagagcgtgacatcctggcccacgacaatgacaaccttcaagaacagtttgctaaggcaaagcaggagaatcaagcattatcaaagaagttaaacgacacccacaacgagttaaatgatattaaacagaaagttcaagataccaatttggaagtgaacaaactgaaaaacatactgaaatccgaagaatcggagaatcggcagatgatggagcagctccgcaaggctaacgaggatgcagagaattgggaaaataaggccagacagtcagaagcagataataatactcttaagctcgagctgatcactgctgaggcagagggaaacaggctcaaagaaaaggtggacagtctgaatagggaggtcgagcagcatctgaacgcagaaaggtcgtacaagtcccaaatttcaacacttcataagagcgtcgtgaagatggaagaggagctgcagaaggtgcaatttgagaaagtatccgcactagctgatctctcatccacgagggaattatgtattaagctagattcgtccaaagagttgcttaacaggcaacttgtggccaaagatcaagagattgagatgcgggagaacgaactcgactccgcgcactccgagatagagctgctgcgctcccagatggctaatgagcggatcagcatgcagaacttagaggccctgctggttgctaatcgcgacaaagaatatcagagccagattgcactgcaagaaaaggaatcagaaattcaactgttgaaggagcatctctgcctggccgaaaataagatggcaattcagtccagggatgttgcccaattcaggaacgtggtcacccagcttgaggcggatctagatattacgaaacgtcaactcggcacagagaggttcgagagagagagggcagtccaagagttgagacggcagaattactcgtcaaatgcctatcacatgtccagtacaatgaagccaaataccaagtgtcactccccggaacgcgctcaccatcgaagcccagataggggactggataggagcttggaagagaacctctgctatagagatttttag

SEQ ID NO: 257191 - DNA, 2097 bp, Artificial Sequence
  derived and/or modified sequence
atgatgcgctcgagatccaaatcacctcgtcgcccttcaccaaccgctcgtggcgctaactgcgacgtggaactcctaaaaaccaccaccagggaccgggaggagctgaagtgcatgttagaaaagtacgagcggcatctagccgagatccaggggaatgtgaaggttttgaaatccgaaagggacaaaatcttcctgttgtatgaacaggcgcaggaggagattacaaggctgagaagagagatgatgaaaagctgtaagagccccaagtcaacgacagcccatgccatcctgcggagggttgagacagaacgagacgtagcgttcaccgacctgcgacgaatgacaaccgagagggatagcctacgggaacgcctcaagattgcgcaggagaccgcattcaatgagaaggctcatctggaacaacggatcgaggagctggaatgcactgttcacaaccttgacgatgaacgcatggaacaaatgtctaatatgaccttaatgaaggagaccatctctaccgtagagaaggaaatgaagtctctcgcgaggaaggccatggacaccgaatcagagctcgggagacagaaggcagagaacaatagtctgagactcctgtatgagaatacagaaaaagacctgtctgacacccaacggcatctggcaaagaaaaagtacgaactgcagctgacacaggagaagatcatgtgtctagacgaaaagatagacaatttcacaaggcagaatattgcacagagggaggaaatcagtatcctcggtggaacactgaacgatctggcaaaggagaaagaatgccttcaggcctgcttggacaaaaagtccgaaaatattgccagccttggggagagtcttgctatgaaagagaagactattagtggtatgaagaacattatcgccgagatggagcaggccagccggcagtgcacagaggccctcatagtctgtgagcaggatgtgagccgaatgcgacgccagttagacgaaaccaatgacgagctggcccagatagccagagagagggatatcctcgcccacgacaacgataaccttcaggagcaatttgcaaaagccaagcaggaaaaccaagcgctatctaagaaactcaacgacacacacaacgagctgaacgatatcaaacagaaagtgcaagacacgaacttagaggtaaacaagctcaagaacatcctcaagagcgaggaaagtgagaatagacagatgatggagcagctgagaaaggccaatgaagatgccgagaattgggagaataaagctcgacaaagcgaagcggataacaacaccttaaagttagagctcattactgctgaagccgagggcaaccgccttaaagagaaggtggattccttgaacagggaggttgaacaacacctcaacgctgaacgcagttataaatcccaaatctctacgctgcacaaatctgtggtcaagatggaggaagagctgcaaaaagtgcagttcgagaaggtgtcagctctggcagacctcagttccacccgggaactctgcattaaattagactcaagcaaagagctgctgaatcgtcaactggtggctaaggaccaagaaatcgagatgagagagaacgaactagactcggctcactctgagatcgagctcctgcggtcacagatggcaaacgagagaatttccatgcagaatttagaggcattgctggtggccaaccgggacaaggaatatcagagccagatcgctttgcaggagaaagagagcgagatccagctgctcaaggagcatctgtgcctcgctgagaataagatggcaattcagagtcgggatgtggctcagttccggaatgtagtcacccagctggaggcggacttggacatcacaaagcggcaactcggcacagagcgtttcgagcgcgagagggcggtccaagagctgaggaggcagaattactccagcaatgcatatcacatgtcctcaacaatgaaacccaatacaaaatgccactctccggagagggcccaccatcgttctccagaccgagggctggacagatccctggaggagaatttatgctatagggacttttag

SEQ ID NO: 257192 - protein, 556 aa, Artificial Sequence
  derived and/or modified sequence
MEDPREIQTDSWRKRGESEEPSSPQSLCHLVAPGHERSGCETPVSVDSIPLEWDHTGDVGGSSSHEEDEEGPYYSALSDVEIPENPEAYLKMTTKTLKASSGKSISDGHSWHVPDSPSCPEHHYKQMEGDRNVPPVPPASSTPYKPPYGKLLLPPGTDGGKEGPRVLNGNPQQEDGGLAGITEQQSGAFDRWEMIQAQELHNKLKIKQNLQQLNSDISAITTWLKKTEAELEMLKMAKPPSDIQEIELRVKRLQEILKAFDTYKALVVSVNVSSKEFLQTESPESTELQSRLRQLSLLWEAAQGAVDSWRGGLRQSLMQCQGSKTRPRSDVLFFKDFHQLSQNLLLWLASAKNRRQKAHVTDPKADPRALLECRRELMQLEKELVERQPQVDMLQEISNSLLIKGHGEDCIEAEEKVHVIEKKLKQLREQVSQDLMALQGTQNPASPLPSFDEVDSGDQPPATSVPAPRAKQFRAVRTTEGEEETESRVPGSTRPQRSFLSRVVRAALPLQLLLLLLLLLACLLPSSEEDYSCTQANNFARSFYPMLRYTNGPPPT

SEQ ID NO: 257193 - DNA, 1671 bp, Artificial Sequence
  derived and/or modified sequence
atggaggaccccagagagatccagaccgacagctggagaaagagaggcgagagcgaggagcccagcagcccccagagcctgtgccacctggtggcccccggccacgagagaagcggctgcgagacccccgtgagcgtggacagcatccccctggagtgggaccacaccggcgacgtgggcggcagcagcagccacgaggaggacgaggagggcccctactacagcgccctgagcgacgtggagatccccgagaaccccgaggcctacctgaagatgaccaccaagaccctgaaggccagcagcggcaagagcatcagcgacggccacagctggcacgtgcccgacagccccagctgccccgagcaccactacaagcagatggagggcgacagaaacgtgccccccgtgccccccgccagcagcaccccctacaagcccccctacggcaagctgctgctgccccccggcaccgacggcggcaaggagggccccagagtgctgaacggcaacccccagcaggaggacggcggcctggccggcatcaccgagcagcagagcggcgccttcgacagatgggagatgatccaggcccaggagctgcacaacaagctgaagatcaagcagaacctgcagcagctgaacagcgacatcagcgccatcaccacctggctgaagaagaccgaggccgagctggagatgctgaagatggccaagccccccagcgacatccaggagatcgagctgagagtgaagagactgcaggagatcctgaaggccttcgacacctacaaggccctggtggtgagcgtgaacgtgagcagcaaggagttcctgcagaccgagagccccgagagcaccgagctgcagagcagactgagacagctgagcctgctgtgggaggccgcccagggcgccgtggacagctggagaggcggcctgagacagagcctgatgcagtgccagggcagcaagaccagacccagaagcgacgtgctgttcttcaaggacttccaccagctgagccagaacctgctgctgtggctggccagcgccaagaacagaagacagaaggcccacgtgaccgaccccaaggccgaccccagagccctgctggagtgcagaagagagctgatgcagctggagaaggagctggtggagagacagccccaggtggacatgctgcaggagatcagcaacagcctgctgatcaagggccacggcgaggactgcatcgaggccgaggagaaggtgcacgtgatcgagaagaagctgaagcagctgagagagcaggtgagccaggacctgatggccctgcagggcacccagaaccccgccagccccctgcccagcttcgacgaggtggacagcggcgaccagccccccgccaccagcgtgcccgcccccagagccaagcagttcagagccgtgagaaccaccgagggcgaggaggagaccgagagcagagtgcccggcagcaccagaccccagagaagcttcctgagcagagtggtgagagccgccctgcccctgcagctgctgctgctgctgctgctgctgctggcctgcctgctgcccagcagcgaggaggactacagctgcacccaggccaacaacttcgccagaagcttctaccccatgctgagatacaccaacggccccccccccacctag

SEQ ID NO: 257194 - DNA, 1671 bp, Artificial Sequence
  derived and/or modified sequence
atggaggatccccgggagattcagaccgattcctggaggaagcgaggcgaaagcgaagagccttctagtccccagagtctttgccacctagtggcccccggccacgagaggtctggatgtgagactcctgtgtccgtggacagcatcccattggaatgggaccacacaggcgacgtcggcggatcctcctcacacgaagaagatgaggaaggaccatactactctgccctctccgatgtcgagattcctgagaatcctgaagcctacctcaagatgaccactaaaacattaaaagctagtagtggtaaatctatcagcgacggacattcgtggcacgtgccagactcccccagctgccctgagcaccattacaagcaaatggagggagatagaaacgtgcctcctgtaccccccgcatctagcactccttacaaaccgccgtacggaaagctgcttctcccacccggtactgacggcggtaaagaaggccctagggtcctgaatggcaatccacagcaggaagacggcggtcttgcagggataactgagcagcagagcggagccttcgatagatgggagatgatccaggcccaagaactccacaacaagttaaaaataaaacaaaatctccagcagttaaattctgatatctctgcaatcaccacctggctcaagaaaaccgaggctgaactggaaatgctgaaaatggccaagccaccatccgacattcaagagatagaactcagagttaagcgcctacaggagatactgaaggccttcgatacctataaagcccttgtcgtctctgtgaatgtgagcagcaaggagttcctgcagacagagtcccctgagtccaccgaactgcagtcaagattaagacagctgtccctgctgtgggaggccgcgcaaggtgcagtggacagctggcgcggtgggcttaggcagtctttgatgcaatgccagggaagtaagactagaccccgttccgatgttctgtttttcaaggactttcaccagctttcacagaatctgctgctgtggttagcaagtgccaagaaccgcagacagaaggcccacgtgacggaccccaaagctgacccgcgcgccttgcttgagtgccgtcgcgagctcatgcagcttgagaaagaactagtggaaagacagcctcaggttgacatgctgcaagagatatcaaatagtcttctgatcaaaggacatggggaagattgtatagaagctgaagagaaggtgcacgtcatcgagaaaaaattgaagcagcttcgtgaacaggtgtcccaagacctcatggcactacagggcacccagaatcctgcttcgcccctgccatcttttgacgaggtcgattccggcgatcagccacccgccacttcagtcccggccccccgggccaaacagtttcgggctgtgcggaccaccgaaggagaggaagaaacggaaagtagagtgccaggatctacccggccacagcggtcttttctgagccgggtggtcagggctgccctccctctgcagctgctccttctgttattgcttctgctcgcctgtctcctgccgtccagcgaggaggactactcctgtacacaggctaataactttgcccgctctttctacccaatgctgcggtatactaatggccccccaccgacctag

SEQ ID NO: 257195 - DNA, 1671 bp, Artificial Sequence
  derived and/or modified sequence
atggaggacccccgggagatccagacagacagctggaggaagagaggagagagcgaggagcccagcagcccccagagcctgtgccacctggtggcccctggccacgagaggagcggctgtgagacccctgtgtctgtggacagcatccccctggagtgggaccacactggagatgtgggcggcagcagcagccatgaagaagatgaggagggcccctactacagcgccctgagtgatgtggagatccctgagaaccctgaggcctacctgaagatgaccaccaagaccctgaaggccagcagcggcaagagcatcagtgatggccacagctggcacgtgcctgacagccccagctgcccagagcaccactacaagcagatggagggggacagaaatgtgccccctgtgcccccagccagcagcaccccctacaagccaccctacggcaagctgctgctgcccccaggcacagatggcggcaaggagggcccccgggtgctgaatggaaacccccagcaggaggatggcggcctggccggcatcacagagcagcagagcggggcctttgaccgctgggagatgatccaggcccaggagctgcacaacaagctgaagatcaagcagaacctgcagcagctgaacagcgacatcagcgccatcaccacctggctgaagaagacagaagctgagctggagatgctgaagatggccaagcccccaagtgacatccaggagattgagctgcgggtgaagaggctgcaggagatcctgaaggcctttgacacctacaaggccctggtggtgtctgtgaatgtgagcagcaaggagttcctgcagacagagagccctgagagcacagagctgcagagccggctgcggcagctgagcctgctgtgggaggccgcccagggcgctgtggacagctggaggggcggcctgcggcagagcctgatgcagtgccagggcagcaagacccggcccaggagtgatgtgctcttcttcaaggacttccaccagctgagccagaacctgctgctgtggctggccagcgccaagaacagacggcagaaggcccacgtgacagaccccaaggctgacccccgggccctgctggagtgccggcgggagctgatgcagctggagaaggagctggtggagcggcagccccaggtggacatgctgcaggagatcagcaacagcctgctgatcaagggccacggggaggactgcattgaagctgaggagaaggtgcacgtgattgagaagaagctgaagcagctgcgggagcaggtgtcccaggacctgatggccctgcagggcacccagaacccagccagccccctgcccagctttgatgaggtggacagcggggaccagcccccagccacctctgtgcctgccccccgggccaagcagttccgggctgtgaggaccacagaaggagaggaggagacagagagccgggtgcccggcagcacccggccccagaggagcttcctgagccgggtggtgcgggccgccctgcccctgcagctgctgctgctgctgctgctgctgctggcctgcctgctgcccagcagcgaggaggactacagctgcacccaggccaacaactttgcccggagcttctaccccatgctgcgctacaccaatggacctccacccacctag

SEQ ID NO: 257196 - DNA, 1671 bp, Artificial Sequence
  derived and/or modified sequence
atggaggacccccgggagatccagaccgacagctggcggaagcggggcgaatcagaagaaccaagttcaccgcagtcactctgccatctggtcgcaccaggacacgagcggagtggttgcgaaactcccgtcagcgtggattcaatccccctggaatgggatcacaccggggatgtgggagggtcaagtagccacgaggaggacgaggaggggccctattactccgccctttccgatgttgaaattccggaaaaccctgaggcctaccttaaaatgactaccaagacgttgaaagctagctccggtaagtcaatttccgacgggcatagctggcacgtgcctgattcacctagctgtcctgagcatcactacaagcagatggagggtgacagaaacgtcccccccgttccaccagcttcttccacgccctacaaacccccgtacggcaaactgctcctcccacccggaacggacggcggaaaggagggtcccagggttctaaatggtaatccccagcaggaagacggaggactggctggaatcactgaacagcagtctggtgcgttcgacaggtgggagatgatccaggctcaggagctgcataacaaacttaagatcaagcagaacctccagcagttgaattctgacatctcggccatcactacatggctcaagaaaacagaggctgaattagagatgctcaagatggccaaaccaccgtctgacattcaggagatagagctgcgagtcaagcggctccaggagattttgaaagcctttgatacctacaaggctcttgtggtgagcgttaacgtttcttctaaggagttcctgcaaacagagagccctgagagcaccgaacttcagagccgattgcgtcagcttagtcttctctgggaggccgcacaaggtgccgttgacagttggagaggaggactgcgacagagcctcatgcagtgccagggctccaagacacgccctcgcagtgatgtgctgtttttcaaggatttccaccagctctcccagaacctgttgttgtggctggcgtccgccaagaatagacgacagaaggcgcacgtgacagacccaaaggcagatcctagagcactgcttgagtgtcggcgtgagttgatgcagctggagaaggagctcgttgagaggcaaccacaagtagatatgctgcaggaaattagcaacagtctccttataaaaggccacggggaagactgcatcgaagccgaagaaaaagtccacgtcattgagaagaaactcaagcagctgcgagaacaggtgagccaggacctaatggcattacaaggcacccagaaccctgcaagtccccttccaagctttgacgaagtcgactccggagaccaaccacctgctaccagtgtgcccgctcctcgcgccaagcagttcagggctgtgcgtactaccgaaggggaggaagagacagagtccagggtgcctggctcgacaagaccgcaaagaagtttcctctccagagtggttcgcgccgccttgccactgcagctgttacttctccttctcctgctgctggcctgcttgctgccctcctcagaagaggattacagctgtactcaggcgaacaactttgcccgctcattttacccaatgctcaggtatacaaacgggcctcctcctacctag

SEQ ID NO: 257197 - DNA, 1671 bp, Artificial Sequence
  derived and/or modified sequence
atggaagatcctcgagagattcaaaccgattcctggaggaaaagaggagaaagcgaggaaccatctagtccacaatctctgtgtcatctggttgctccaggacatgagcggagtgggtgcgaaacacccgttagcgtcgactccatcccactagaatgggaccataccggggatgttggtggaagttccagccatgaggaagacgaggaggggccatattacagcgcactgagcgatgttgaaattccagaaaatcctgaagcctacctgaaaatgaccactaaaacactgaaggcatcaagtggcaaaagtatctctgatggacactcgtggcacgtgcccgattccccttcttgccctgagcaccactacaagcaaatggagggcgacaggaatgtacctcccgtgcctcctgcaagcagtaccccttacaagccaccctatgggaaattgcttttgccccctggtacagatggcggtaaagaggggccaagagtactgaacggcaacccccagcaagaggatgggggattagcaggtatcaccgaacagcagagtggggcatttgaccgatgggaaatgattcaggcgcaggagctacacaacaagctgaagatcaaacagaaccttcagcagctgaactctgatattagcgccattaccacatggcttaaaaagactgaggctgaacttgaaatgctgaagatggcaaagcctccctcagacatccaggaaattgagttacgagtcaagaggcttcaggagatcctcaaagccttcgacacatataaagcgttagtggtgtccgtgaacgtgagctctaaagaattcctgcagaccgaatctcctgagagcaccgagctacagtcacggctccgacagctgtctttactgtgggaagcggctcagggcgctgtggatagctggcggggaggcttaaggcagagtcttatgcagtgtcaaggtagtaaaacaagacccaggtctgatgtattatttttcaaggactttcatcagctgtctcagaacctactgctgtggctggccagcgctaagaaccgccgacagaaggcccatgtgacggaccccaaggctgatcccagggcccttctggagtgtcggcgagagctcatgcagctggagaaggagctggtcgaaaggcagccacaagtggacatgctgcaggaaatcagtaacagcctgctgattaagggacacggtgaggactgtatcgaagccgaagaaaaagttcacgtgattgaaaaaaaactgaagcagttaagagaacaggtctcacaggatctgatggctctccaggggacgcagaatcctgcctcccctcttccgtcattcgatgaagtcgattctggcgaccagccccctgccacgtctgttccagcccctcgcgctaagcagttcagagcggtcaggactaccgagggcgaagaggagactgagtcccgggtgccaggctccacgaggccacagcggagcttcttgtctagagtcgtacgcgctgcgcttcctctacagttgttgctgctgctgctgctgcttctcgcctgtttgctgccatcaagtgaggaagactactcctgcacccaagctaataatttcgccagatctttctatccaatgttgcgttataccaatggcccacctcccacctag

SEQ ID NO: 257198 - DNA, 3084 bp, Artificial Sequence
  derived and/or modified sequence
cgtgtctacctctgccttctgtggacaccatgcgccttggtccttgtgtcatggtgtatttacactgccgtactcacccataactgcgtgctccttacaaaaccccatccaagccagagccgtctcgatgccaaccccctctcctcccttcaggcctgtgcagagggaatttttcatggtgcctgttttgatgatttttttctccatctaactgaagtcctttggcatgggccaagctttcttcatggtggcttggtttggaactgtttccttgctttactgggatcccctggtggaaaggggtggggggttggggcggtaaagggtgctgatgatttgccacaggagggaaaaaaccttcctttccttgatttgcagctctaatcctcatccttagccccatccctatctgccatggtgggtcggggagagccctgaggagccttttggttcccaagtccatcttgatgttcactcttcccctcactcctgagaggccttctgccatcttggtccccagacccggccttgccactcagtgtccctaccactcgagaccctggctccaaaacgccactcatcccacagcaaatcatgttggtcgtgctccgttgtgtacccatctagtgaaggcacagtgttgctgagttgcatgactcatctcattctcttctgggacatactgacattttgcaaacatgcatgctttgcaaggaaagctgcagaactcattttcatactgtaacctgatgccatgtcacccgtgacccgttcagtaggagagaatagactgtcgcttgctgtctttcgtttcaggtaaatccatttcggatggccactcgtggcatgttcccgacagcccttcctgtcccgagcatcactacaagcaaatggaaggtgacaggaatgttccacctgttccccctgcgtccagcaccccttataaaccaccctatggaaagctactattacctccaggcacggatggtggcaaagaaggcccgcgagtcctgaatggcaacccacagcaggaagacgggggactggccggtatcacagagcagcagtcaggtgccttcgacagatgggagatgattcaagcacaggagcttcacaataagctcaaaataaaacaaaatttgcaacagctgaactctgatatcagcgccatcactacttggctgaaaaaaactgaagcagagctggaaatgttaaagatggcaaagcctccctctgatatccaggaaatagaactgagagtgaagagactgcaggagatactgaaagcctttgacacttacaaggcattagtggtctctgtcaacgtgagcagcaaggaatttctgcaaaccgagagccccgaatccacagagctccaaagtagactccgccagctgagcctgctctgggaagcagcacagggcgcagtggacagctggagagggggcttacgacagtcgctcatgcagtgccagggctctaagacacggccgcgctctgatgtgttgttttttaaggacttccaccagttgagtcaaaatctgctgctgtggttagcgagtgccaagaaccggaggcagaaggctcatgtcaccgatccaaaggcagacccccgggctctcctagagtgtcggagggaactaatgcaactggaaaaggagctggtagaacgtcaacctcaagtggacatgttacaggagatttcaaacagccttctcattaagggacatggagaagactgtattgaagctgaagaaaaggtgcatgttattgagaagaaactcaaacagttacgggagcaagtgtcccaagatttaatggccttgcagggaacccagaacccagcctcacccctgcccagcttcgacgaggtagactcgggggaccagcctcctgcaacatccgtgccagctccccgagcaaagttcagagcagtgagaactacagaaggcgaggaggagacagagagcagggtccccggcagcacacggccacagcgctccttcctctcaagggtggtccgggcagccctacccctgcagctgctcctcctgctgctgctgctcctggcctgcctgctgccctcctccgaagaagactacagctgcactcaggccaacaactttgcccggtccttttaccccatgctgaggtacaccaatgggccaccccccacatagagggcatagctggccacagtgctacaccacctgcctgattgccaagggtgcccagcacgtggccccagaccaatctgagtgacttagtgttggcaaggtcccgggacctgtgcagacttcttctgggcttacccagcacgggctccctggagcccagggcagctttcagattgtgttcctccccaggagcagggaacctgtgtggcaggtgccccgggtattttggcagaactagttgattagtttagggatctctggaaatgtcagtttcctgaagagccaagcactttgtgaattctggtttgtttgtaaaacagcattattataatgtaggtatggtcaatgagcagtggtgtccatcacatatattatagaagcaagcgaggacattccaccctagaaatggttcagaaactcataggcacccttagctgatggaaacaatcaatcatatttaatacgcttagaatcagttttactccaatcagctggcaattttgagctgccggttatacaccaaaatgttctgttcagtacctagctctgctcttttatattgctttaaatttttaaagaaattgtattgcatggatgtggttatttgtgcatattttttaacaatgcccaatctgtatgaataatgtaaacttcgatttttttttaaaaaaattagattttagctggagcttttgactaatgtaaagtaaatgccaaactaccgacttgatagggatgtttttgtaagttaattttctaagactttttcacatccaaagtgatgctttgctttgggttttaactgtttggccacggcgggggtgggggcggggggttggtacagaaacttgaagctgtttgtgatatgtacaactcagatgtttctcattaaaaaacaaaattagcc

SEQ ID NO: 257199 - protein, 6907 aa, Artificial Sequence
  derived and/or modified sequence
MASSPELPTEDEQGSWGIDDLHISLQAEQEDTQKKAFTCWINSQLARHTSPSVISDLFTDIKKGHVLLDLLEVLSGQQLPRDKGSNTFQCRINIEHALTFLRNRSIKLINIHVTDIIDGNPSIILGLIWTIILHFHIEKLAQTLSCNYNQPSLDDVSVVDSSPASSPPAKKCSKVQARWQMSARKALLLWAQEQCATYESVNVTDFKSSWRNGMAFLAIIHALRPDLIDMKSVKHRSNKDNLREAFRIAEQELKIPRLLEPEDVDVVDPDEKSIMTYVAQFLQYSKDAPGTGEEAQGKVKDAMGWLTLQKEKLQKLLKDSENDTYFKKYNSLLSFMESFNEEKKSFLDVLSIKRDLDELDKDHLQLREAWDGLDHQINAWKIKLNYALPPPLHQTEAWLQEVEELMDEDLSASQDHSQAVTLIQEKMTLFKSLMDRFEHHSNILLTFENKDENHLPLVPPNKLEEMKRRINNILEKKFILLLEFHYYKCLVLGLVDEVKSKLDIWNIKYGSRESVELLLEDWHKFIEEKEFLARLDTSFQKCGEIYKNLAGECQNINKQYMMVKSDVCMYRKNIYNVKSTLQKVLACWATYVENLRLLRACFEETKKEEIKEVPFETLAQWNLEHATLNEAGNFLVEVSNDVVGSSISKELRRLNKRWRKLVSKTQLEMNLPLMIKKQDQPTFDNSGNILSKEEKATVEFSTDMSVELPENYNQNIKAGEKHEKENEEFTGQLKVAKDVEKLIGQVEIWEAEAKSVLDQDDVDTSMEESLKHLIAKGSMFDELMARSEDMLQMDIQNISSQESFQHVLTTGLQAKIQEAKEKVQINVVKLIAALKNLTDVSPDLDIRLKMEESQKELESYMMRAQQLLGQRESPGELISKHKEALIISNTKSLAKYLKAVEELKNNVTEDIKMSLEEKSRDVCAKWESLHHELSLYVQQLKIDIEKGKLSDNILKLEKQINKEKKLIRRGRTKGLIKEHEACFSEEGCLYQLNHHMEVLRELCEELPSQKSQQEVKRLLKDYEQKIERLLKCASEIHMTLQPTAGGTSKNEGTITTSENRGGDPHSEAPFAKSDNQPSTEKAMEPTMKFSLASVLRPLQEESIMEKDYSASINSLLERYDTYRDILEHHLQNNKFRITSDFSSEEDRSSSCLQAKLTDLQVIKNETDARWKEFEIISLKLENHVNDIKKPFVIKERDTLKERERELQMTLNTRMESLETALRLVLPVEKASLLLCGSDLPLHKMAIQGFHLIDADRIYQHLRNIQDSIAKQIEICNRLEEPGNFVLKELHPFDLHAMQNIILKYKTQFEGMNHRVQRSEDTLKALEDFLASLRTAKLSAEPVTDLSASDTQVAQENTLTVKNKEGEIHLMKDKAKHLDKCLKMLDMSFKDAERGDDTSCENLLDAFSIKLSETHGYGVQEEFTEENKLLEACIFKNNELLKNIQDVQSQISKIGLKDPTVPAVKHRKKSLIRLDKVLDEYEEEKRHLQEMANSLPHFKDGREKTVNQQCQNTVVLWENTKALVTECLEQCGRVLELLKQYQNFKSILTTLIQKEESVISLQASYMGKENLKKRIAEIEIVKEEFNEHLEVVDKINQVCKNLQFYLNKMKTFEEPPFEKEANIIVDRWLDINEKTEDYYENLGRALALWDKLFNLKNVIDEWTEKALQKMELHQLTEEDRERLKEELQVHEQKTSEFSRRVAEIQFLLQSSEIPLELQVMESSILNKMEHVQKCLTGESNCHALSGSTAELREDLDQAKTQIGMTESLLKALSPSDSLEIFTKLEEIQQQILQQKHSMILLENQIGCLTPELSELKKQYESVSDLFNTKKSVLQDHFSKLLNDQCKNFNDWFSNIKVNLKECFESSETKKSVEQKLQKLSDFLTLEGRNSKIKQVDSVLKHVKKHLPKAHVKELISWLVGQEFELEKMESICQARAKELEDSLQQLLRLQDDHRNLRKWLTNQEEKWKGMEEPGEKTELFCQALARKREQFESVAQLNNSLKEYGFTEEEEIIMEATCLMDRYQTLLRQLSEIEEEDKLLPTEDQSFNDLAHDVIHWIKEIKESLMVLNSSEGKMPLEERIQKIKEIILLKPEGDARIETIMKQAESSEAPLVQKTLTDISNQWDNTLHLASTYLSHQEKLLLEGEKYLQSKEDLRLMLIELKKKQEAGFALQHGLQEKKAQLKIYKKFLKKAQDLTSLLKELKSQGNYLLECTKNPSFSEEPWLEIKHLHESLLQQLQDSVQNLDGHVREHDSYQVCVTDLNTTLDNFSKEFVSFSDKPVDQIAVEEKLQKLQELENRLSLQDGTLKKILALAKSVKQNTSSVGQKIIKDDIKSLQCKQKDLENRLASAKQEMECCLNSILKSKRSTEKKGKFTLPGREKQATSDVQESTQESAAVEKLEEDWEINKDSAVEMAMSKQLSLNAQESMKNTEDERKVNELQNQPLELDTMLRNEQLEEIEKLYTQLEAKKAAIKPLEQTECLNKTETGALVLHNIGYSAQHLDNLLQALITLKKNKESQYCVLRDFQEYLAAVESSMKALLTDKESLKVGPLDSVTYLDKIKKFIASIEKEKDSLGNLKIKWENLSNHVTDMDKKLLESQIKQLEHGWEQVEQQIQKKYSQQVVEYDEFTTLMNKVQDTEISLQQQQQHLQLRLKSPEERAGNQSMIALTTDLQATKHGFSVLKGQAELQMKRIWGEKEKKNLEDGINNLKKQWETLEPLHLEAENQIKKCDIRNKMKETILWAKNLLGELNPSIPLLPDDILSQIRKCKVTHDGILARQQSVESLAEEVKDKVPSLTTYEGSDLNNTLEDLRNQYQMLVLKSTQRSQQLEFKLEERSNFFAIIRKFQLMVQESETLIIPRVETAATEAELKHHHVTLEASQKELQEIDSGISTHLQELTNIYEELNVFERLFLEDQLKNLKIRTNRIQRFIQNTCNEVEHKIKFCRQFHEKTSALQEEADSIQRNELLLNQEVNKGVKEEIYNLKDRLTAIKCCILQVLKLKKVFDYIGLNWDFSQLDQLQTQVFEKEKELEEKIKQLDTFEEEHGKYQALLSKMRAIDLQIKKMTEVVLKAPDSSPESRRLNAQILSQRIEKAKCLCDEIIKKLNENKTFDDSFKEKEILQIKLNAEENDKLYKVLQNMVLELSPKELDEKNCQDKLETSLHVLNQIKSQLQQPLLINLEIKHIQNEKDNCEAFQEQVWAEMCSIKAVTAIEKQREENSSEASDVETKLREFEDLQMQLNTSIDLRTNVLNDAYENLTRYKEAVTRAVESITSLEAIIIPYRVDVGNPEESLEMPLRKQEELESTVAHIQDLTEKLGMISSPEAKLQLQYTLQELVSKNSAMKEAFKAQETEAERYLENYKCYRKMEEDIYTNLSKMETVLGQSMSSLPLSYREALERLEQSKALVSNLISTKEELMKLRQILRLLRLRCTENDGICLLKIVSALWEKWLSLLEAAKEWEMWCEELKQEWKFVSEEIEREAIILDNLQEELPEISKTKEAATTEELSELLDCLCQYGENVEKQQLLLTLLLQRIRSIQNVPESSGAVETVPAFQEITSMKERCNKLLQKVQKNKELVQTEIQERHSFTKEIIALKNFFQQTTTSFQNMAFQDHPEKSEQFEELQSILKKGKLTFENIMEKLRIKYSEMYTIVPAEIESQVEECRKALEDIDEKISNEVLKSSPSYAMRRKIEEINNGLHNVEKMLQQKSKNIEKAQEIQKKMWDELDLWHSKLNELDSEVQDIVEQDPGQAQEWMDNLMIPFQQYQQVSQRAECRTSQLNKATVKMEEYSDLLKSTEAWIENTSHLLANPADYDSLRTLSHHASTVQMALEDSEQKHNLLHSIFMDLEDLSIIFETDELTQSIQELSNQVTALQQKIMESLPQIQRMADDVVAIESEVKSMEKRVSKIKTILLSKEIFDFSPEEHLKHGEVILENIRPMKKTIAEIVSYQVELRLPQTGMKPLPVFQRTNQLLQDIKLLENVTQEQNELLKVVIKQTNEWDEEIENLKQILNNYSAQFSLEHMSPDQADKLPQLQGEIERMEKQILSLNQRKEDLLVDLKATVLNLHQHLKQEQEGVERDRLPAVTSEEGGVAERDASERKLNRRGSMSYLAAVEEEVEESSVKSDNGDEKAEPSPQSWSSLWKHDKDMEEDRASSSSGTIVQEAYGKISTSDNSMAQILTPDSLNTEQGPECSLRPNQTEEGTTPPIEADTLDSSDAQGGLEPRVEKTRPEPTEVLHACKTQVAELELWLQQANVAVEPETLNADMQQVLEQQLVGCQAMLTEIEHKVAFLLETCKDQGLGDNGATQHEAEALSLKLKTVKCNLEKVQMMLQEKHSEDQHPTILKKSSEPEHQEALQPVNLSELESIVTERPQFSRQKDFQQQQVLELKPMEQKDFIKFIEFNAKKMWPQYCQHDNDTTQESSASNQASSPENDVPDSILSPQGQNGDKWQYLHHELSSKIKLPLPQLVEPQVSTNMGILPSVTMYNFRYPTTEELKTYTTQLEDLRQEASNLQTQENMTEEAYINLDKKLFELFLTLSQCLSSVEEMLEMPRLYREDGSGQQVHYETLALELKKLYLALSDKKGDLLKAMTWPGENTNLLLECFDNLQVCLEHTQAAAVCRSKSLKAGLDYNRSYQNEIKRLYHQLIKSKTSLQQSLNEISGQSVAEQLQKADAYTVELENAESRVAKLRDEGERLHLPYALLQEVYKLEDVLDSMWGMLRARYTELSSPFVTESQQDALLQGMVELVKIGKEKLAHGHLKQTKSKVALQAQIENHKVFFQKLVADMLLIQAYSAKILPSLLQNRETFWAEQVTEVKILEEKSRQCGMKLQSLLQKWEEFDENYASLEKDLEILISTLPSVSLVEETEERLVERISFYQQIKRNIGGKHARLYQTLNEGKQLVASVSCPELEGQIAKLEEQWLSLNKKIDHELHRLQALLKHLLSYNRDSDQLTKWLESSQHTLNYWKEQSLNVSQDLDTIRSNINNFFEFSKEVDEKSSLKTAVISIGNQLLHLKETDTATLRASLAQFEQKWTMLITQLPDIQEKLHQLQMEKLPSRKAITEMISWMNNVEHQTSDEDSVHSPSSASQVKHLLQKHKEFRMEMDYKQWIVDFVNQSLLQLSTCDVESKRYERTEFAEHLGEMNRQWHRVHGMLNRKIQHLEQLLESITESENKIQILNNWLEAQEERLKTLQKPESVISVQKLLLDCQDIENQLAIKSKALDELKQSYLTLESGAVPLLEDTASRIDELFQKRSSVLTQVNQLKTSMQSVLQEWKIYDQLYDEVNMMTIRFWYCMEHSKPVVLSLETLRCQVENLQSLQDEAESSEGSWEKLQEVIGKLKGLCPSVAEIIEEKCQNTHKRWTQVNQAIADQLQKAQSLLQLWKAYSNAHGEAAARLKQQEAKFQQLANISMSGNNLAEILPPALQDIKELQHDVQKTKEAFLQNSSVLDRLPQPAESSTHMLLPGPLHSLQRAAYLEKMLLVKANEFEFVLSQFKDFGVRLESLKGLIMHEEENLDRLHQQEKENPDSFLNHVLALTAQSPDIEHLNEVSLKLPLSDVAVKTLQNMNRQWIRATATALERCSELQGIGLNEKFLYCCEKWIQLLEKIEEALKVDVANSLPELLEQQKTYKMLEAEVSINQTIADSYVTQSLQLLDTTEIENRPEFITEFSKLTDRWQNAVQGVRQRKGDVDGLVRQWQDFTTSVENLFRFLTDTSHLLSAVKGQERFSLYQTRSLIHELKNKEIHFQRRRTTCALTLEAGEKLLLTTDLKTKESVGRRISQLQDSWKDMEPQLAEMIKQFQSTVETWDQCEKKIKELKSRLQVLKAQSEDPLPELHEDLHNEKELIKELEQSLASWTQNLKELQTMKADLTRHVLVEDVMVLKEQIEHLHRQWEDLCLRVAIRKQEIEDRLNTWVVFNEKNKELCAWLVQMENKVLQTADISIEEMIEKLQKDCMEEINLFSENKLQLKQMGDQLIKASNKSRAAEIDDKLNKINDRWQHLFDVIGSRVKKLKETFAFIQQLDKNMSNLRTWLARIESELSKPVVYDVCDDQEIQKRLAEQQDLQRDIEQHSAGVESVFNICDVLLHDSDACANETECDSIQQTTRSLDRRWRNICAMSMERRMKIEETWRLWQKFLDDYSRFEDWLKSAERTAACPNSSEVLYTSAKEELKRFEAFQRQIHERLTQLELINKQYRRLARENRTDTASRLKQMVHEGNQRWDNLQRRVTAVLRRLRHFTNQREEFEGTRESILVWLTEMDLQLTNVEHFSESDADDKMRQLNGFQQEITLNTNKIDQLIVFGEQLIQKSEPLDAVLIEDELEELHRYCQEVFGRVSRFHRRLTSCTPGLEDEKEASENETDMEDPREIQTDSWRKRGESEEPSSPQSLCHLVAPGHERSGCETPVSVDSIPLEWDHTGDVGGSSSHEEDEEGPYYSALSDVEIPENPEAYLKMTTKTLKASSGKSISDGHSWHVPDSPSCPEHHYKQMEGDRNVPPVPPASSTPYKPPYGKLLLPPGTDGGKEGPRVLNGNPQQEDGGLAGITEQQSGAFDRWEMIQAQELHNKLKIKQNLQQLNSDISAITTWLKKTEAELEMLKMAKPPSDIQEIELRVKRLQEILKAFDTYKALVVSVNVSSKEFLQTESPESTELQSRLRQLSLLWEAAQGAVDSWRGGLRQSLMQCQDFHQLSQNLLLWLASAKNRRQKAHVTDPKADPRALLECRRELMQLEKELVERQPQVDMLQEISNSLLIKGHGEDCIEAEEKVHVIEKKLKQLREQVSQDLMALQGTQNPASPLPSFDEVDSGDQPPATSVPAPRAKFRAVRTTEGEEETESRVPGSTRPQRSFLSRVVRAALPLQLLLLLLLLLACLLPSSEEDYSCTQANNFARSFYPMLRYTNGPPPT

SEQ ID NO: 257200 - protein, 3541 aa, Artificial Sequence
  derived and/or modified sequence
MEEDIYTNLSKMETVLGQSMSSLPLSYREALERLEQSKALVSNLISTKEELMKLRQILRLLRLRCTENDGICLLKIVSALWEKWLSLLEAAKEWEMWCEELKQEWKFVSEEIEREAIILDNLQEELPEISKTKEAATTEELSELLDCLCQYGENVEKQQLLLTLLLQRIRSIQNVPESSGAVETVPAFQEITSMKERCNKLLQKVQKNKELVQTEIQERHSFTKEIIALKNFFQQTTTSFQNMAFQDHPEKSEQFEELQSILKKGKLTFENIMEKLRIKYSEMYTIVPAEIESQVEECRKALEDIDEKISNEVLKSSPSYAMRRKIEEINNGLHNVEKMLQQKSKNIEKAQEIQKKMWDELDLWHSKLNELDSEVQDIVEQDPGQAQEWMDNLMIPFQQYQQVSQRAECRTSQLNKATVKMEEYSDLLKSTEAWIENTSHLLANPADYDSLRTLSHHASTVQMALEDSEQKHNLLHSIFMDLEDLSIIFETDELTQSIQELSNQVTALQQKIMESLPQIQRMADDVVAIESEVKSMEKRVSKIKTILLSKEIFDFSPEEHLKHGEVILENIRPMKKTIAEIVSYQVELRLPQTGMKPLPVFQRTNQLLQDIKLLENVTQEQNELLKVVIKQTNEWDEEIENLKQILNNYSAQFSLEHMSPDQADKLPQLQGEIERMEKQILSLNQRKEDLLVDLKATVLNLHQHLKQEQEGVERDRLPAVTSEEGGVAERDASERKLNRRGSMSYLAAVEEEVEESSVKSDNGDEKAEPSPQSWSSLWKHDKDMEEDRASSSSGTIVQEAYGKISTSDNSMAQILTPDSLNTEQGPECSLRPNQTEEGTTPPIEADTLDSSDAQGGLEPRVEKTRPEPTEVLHACKTQVAELELWLQQANVAVEPETLNADMQQVLEQQLVGCQAMLTEIEHKVAFLLETCKDQGLGDNGATQHEAEALSLKLKTVKCNLEKVQMMLQEKHSEDQHPTILKKSSEPEHQEALQPVNLSELESIVTERPQFSRQKDFQQQQVLELKPMEQKDFIKFIEFNAKKMWPQYCQHDNDTTQESSASNQASSPENDVPDSILSPQGQNGDKWQYLHHELSSKIKLPLPQLVEPQVSTNMGILPSVTMYNFRYPTTEELKTYTTQLEDLRQEASNLQTQENMTEEAYINLDKKLFELFLTLSQCLSSVEEMLEMPRLYREDGSGQQVHYETLALELKKLYLALSDKKGDLLKAMTWPGENTNLLLECFDNLQVCLEHTQAAAVCRSKSLKAGLDYNRSYQNEIKRLYHQLIKSKTSLQQSLNEISGQSVAEQLQKADAYTVELENAESRVAKLRDEGERLHLPYALLQEVYKLEDVLDSMWGMLRARYTELSSPFVTESQQDALLQGMVELVKIGKEKLAHGHLKQTKSKVALQAQIENHKVFFQKLVADMLLIQAYSAKILPSLLQNRETFWAEQVTEVKILEEKSRQCGMKLQSLLQKWEEFDENYASLEKDLEILISTLPSVSLVEETEERLVERISFYQQIKRNIGGKHARLYQTLNEGKQLVASVSCPELEGQIAKLEEQWLSLNKKIDHELHRLQALLKHLLSYNRDSDQLTKWLESSQHTLNYWKEQSLNVSQDLDTIRSNINNFFEFSKEVDEKSSLKTAVISIGNQLLHLKETDTATLRASLAQFEQKWTMLITQLPDIQEKLHQLQMEKLPSRKAITEMISWMNNVEHQTSDEDSVHSPSSASQVKHLLQKHKEFRMEMDYKQWIVDFVNQSLLQLSTCDVESKRYERTEFAEHLGEMNRQWHRVHGMLNRKIQHLEQLLESITESENKIQILNNWLEAQEERLKTLQKPESVISVQKLLLDCQDIENQLAIKSKALDELKQSYLTLESGAVPLLEDTASRIDELFQKRSSVLTQVNQLKTSMQSVLQEWKIYDQLYDEVNMMTIRFWYCMEHSKPVVLSLETLRCQVENLQSLQDEAESSEGSWEKLQEVIGKLKGLCPSVAEIIEEKCQNTHKRWTQVNQAIADQLQKAQSLLQLWKAYSNAHGEAAARLKQQEAKFQQLANISMSGNNLAEILPPALQDIKELQHDVQKTKEAFLQNSSVLDRLPQPAESSTHMLLPGPLHSLQRAAYLEKMLLVKANEFEFVLSQFKDFGVRLESLKGLIMHEEENLDRLHQQEKENPDSFLNHVLALTAQSPDIEHLNEVSLKLPLSDVAVKTLQNMNRQWIRATATALERCSELQGIGLNEKFLYCCEKWIQLLEKIEEALKVDVANSLPELLEQQKTYKMLEAEVSINQTIADSYVTQSLQLLDTTEIENRPEFITEFSKLTDRWQNAVQGVRQRKGDVDGLVRQWQDFTTSVENLFRFLTDTSHLLSAVKGQERFSLYQTRSLIHELKNKEIHFQRRRTTCALTLEAGEKLLLTTDLKTKESVGRRISQLQDSWKDMEPQLAEMIKQFQSTVETWDQCEKKIKELKSRLQVLKAQSEDPLPELHEDLHNEKELIKELEQSLASWTQNLKELQTMKADLTRHVLVEDVMVLKEQIEHLHRQWEDLCLRVAIRKQEIEDRLNTWVVFNEKNKELCAWLVQMENKVLQTADISIEEMIEKLQKDCMEEINLFSENKLQLKQMGDQLIKASNKSRAAEIDDKLNKINDRWQHLFDVIGSRVKKLKETFAFIQQLDKNMSNLRTWLARIESELSKPVVYDVCDDQEIQKRLAEQQDLQRDIEQHSAGVESVFNICDVLLHDSDACANETECDSIQQTTRSLDRRWRNICAMSMERRMKIEETWRLWQKFLDDYSRFEDWLKSAERTAACPNSSEVLYTSAKEELKRFEAFQRQIHERLTQLELINKQYRRLARENRTDTASRLKQMVHEGNQRWDNLQRRVTAVLRRLRHFTNQREEFEGTRESILVWLTEMDLQLTNVEHFSESDADDKMRQLNGFQQEITLNTNKIDQLIVFGEQLIQKSEPLDAVLIEDELEELHRYCQEVFGRVSRFHRRLTSCTPGLEDEKEASENETDMEDPREIQTDSWRKRGESEEPSSPQSLCHLVAPGHERSGCETPVSVDSIPLEWDHTGDVGGSSSHEEDEEGPYYSALSDVEIPENPEAYLKMTTKTLKASSGKSISDGHSWHVPDSPSCPEHHYKQMEGDRNVPPVPPASSTPYKPPYGKLLLPPGTDGGKEGPRVLNGNPQQEDGGLAGITEQQSGAFDRWEMIQAQELHNKLKIKQNLQQLNSDISAITTWLKKTEAELEMLKMAKPPSDIQEIELRVKRLQEILKAFDTYKALVVSVNVSSKEFLQTESPESTELQSRLRQLSLLWEAAQGAVDSWRGGLRQSLMQCQDFHQLSQNLLLWLASAKNRRQKAHVTDPKADPRALLECRRELMQLEKELVERQPQVDMLQEISNSLLIKGHGEDCIEAEEKVHVIEKKLKQLREQVSQDLMALQGTQNPASPLPSFDEVDSGDQPPATSVPAPRAKFRAVRTTEGEEETESRVPGSTRPQRSFLSRVVRAALPLQLLLLLLLLLACLLPSSEEDYSCTQANNFARSFYPMLRYTNGPPPT

SEQ ID NO: 257201 - DNA, 20724 bp, Artificial Sequence
  derived and/or modified sequence
atggccagcagccccgagctgcccaccgaggacgagcagggcagctggggcatcgacgacctgcacatcagcctgcaggccgagcaggaggacacccagaagaaggccttcacctgctggatcaacagccagctggccagacacaccagccccagcgtgatcagcgacctgttcaccgacatcaagaagggccacgtgctgctggacctgctggaggtgctgagcggccagcagctgcccagagacaagggcagcaacaccttccagtgcagaatcaacatcgagcacgccctgaccttcctgagaaacagaagcatcaagctgatcaacatccacgtgaccgacatcatcgacggcaaccccagcatcatcctgggcctgatctggaccatcatcctgcacttccacatcgagaagctggcccagaccctgagctgcaactacaaccagcccagcctggacgacgtgagcgtggtggacagcagccccgccagcagcccccccgccaagaagtgcagcaaggtgcaggccagatggcagatgagcgccagaaaggccctgctgctgtgggcccaggagcagtgcgccacctacgagagcgtgaacgtgaccgacttcaagagcagctggagaaacggcatggccttcctggccatcatccacgccctgagacccgacctgatcgacatgaagagcgtgaagcacagaagcaacaaggacaacctgagagaggccttcagaatcgccgagcaggagctgaagatccccagactgctggagcccgaggacgtggacgtggtggaccccgacgagaagagcatcatgacctacgtggcccagttcctgcagtacagcaaggacgcccccggcaccggcgaggaggcccagggcaaggtgaaggacgccatgggctggctgaccctgcagaaggagaagctgcagaagctgctgaaggacagcgagaacgacacctacttcaagaagtacaacagcctgctgagcttcatggagagcttcaacgaggagaagaagagcttcctggacgtgctgagcatcaagagagacctggacgagctggacaaggaccacctgcagctgagagaggcctgggacggcctggaccaccagatcaacgcctggaagatcaagctgaactacgccctgcccccccccctgcaccagaccgaggcctggctgcaggaggtggaggagctgatggacgaggacctgagcgccagccaggaccacagccaggccgtgaccctgatccaggagaagatgaccctgttcaagagcctgatggacagattcgagcaccacagcaacatcctgctgaccttcgagaacaaggacgagaaccacctgcccctggtgccccccaacaagctggaggagatgaagagaagaatcaacaacatcctggagaagaagttcatcctgctgctggagttccactactacaagtgcctggtgctgggcctggtggacgaggtgaagagcaagctggacatctggaacatcaagtacggcagcagagagagcgtggagctgctgctggaggactggcacaagttcatcgaggagaaggagttcctggccagactggacaccagcttccagaagtgcggcgagatctacaagaacctggccggcgagtgccagaacatcaacaagcagtacatgatggtgaagagcgacgtgtgcatgtacagaaagaacatctacaacgtgaagagcaccctgcagaaggtgctggcctgctgggccacctacgtggagaacctgagactgctgagagcctgcttcgaggagaccaagaaggaggagatcaaggaggtgcccttcgagaccctggcccagtggaacctggagcacgccaccctgaacgaggccggcaacttcctggtggaggtgagcaacgacgtggtgggcagcagcatcagcaaggagctgagaagactgaacaagagatggagaaagctggtgagcaagacccagctggagatgaacctgcccctgatgatcaagaagcaggaccagcccaccttcgacaacagcggcaacatcctgagcaaggaggagaaggccaccgtggagttcagcaccgacatgagcgtggagctgcccgagaactacaaccagaacatcaaggccggcgagaagcacgagaaggagaacgaggagttcaccggccagctgaaggtggccaaggacgtggagaagctgatcggccaggtggagatctgggaggccgaggccaagagcgtgctggaccaggacgacgtggacaccagcatggaggagagcctgaagcacctgatcgccaagggcagcatgttcgacgagctgatggccagaagcgaggacatgctgcagatggacatccagaacatcagcagccaggagagcttccagcacgtgctgaccaccggcctgcaggccaagatccaggaggccaaggagaaggtgcagatcaacgtggtgaagctgatcgccgccctgaagaacctgaccgacgtgagccccgacctggacatcagactgaagatggaggagagccagaaggagctggagagctacatgatgagagcccagcagctgctgggccagagagagagccccggcgagctgatcagcaagcacaaggaggccctgatcatcagcaacaccaagagcctggccaagtacctgaaggccgtggaggagctgaagaacaacgtgaccgaggacatcaagatgagcctggaggagaagagcagagacgtgtgcgccaagtgggagagcctgcaccacgagctgagcctgtacgtgcagcagctgaagatcgacatcgagaagggcaagctgagcgacaacatcctgaagctggagaagcagatcaacaaggagaagaagctgatcagaagaggcagaaccaagggcctgatcaaggagcacgaggcctgcttcagcgaggagggctgcctgtaccagctgaaccaccacatggaggtgctgagagagctgtgcgaggagctgcccagccagaagagccagcaggaggtgaagagactgctgaaggactacgagcagaagatcgagagactgctgaagtgcgccagcgagatccacatgaccctgcagcccaccgccggcggcaccagcaagaacgagggcaccatcaccaccagcgagaacagaggcggcgacccccacagcgaggcccccttcgccaagagcgacaaccagcccagcaccgagaaggccatggagcccaccatgaagttcagcctggccagcgtgctgagacccctgcaggaggagagcatcatggagaaggactacagcgccagcatcaacagcctgctggagagatacgacacctacagagacatcctggagcaccacctgcagaacaacaagttcagaatcaccagcgacttcagcagcgaggaggacagaagcagcagctgcctgcaggccaagctgaccgacctgcaggtgatcaagaacgagaccgacgccagatggaaggagttcgagatcatcagcctgaagctggagaaccacgtgaacgacatcaagaagcccttcgtgatcaaggagagagacaccctgaaggagagagagagagagctgcagatgaccctgaacaccagaatggagagcctggagaccgccctgagactggtgctgcccgtggagaaggccagcctgctgctgtgcggcagcgacctgcccctgcacaagatggccatccagggcttccacctgatcgacgccgacagaatctaccagcacctgagaaacatccaggacagcatcgccaagcagatcgagatctgcaacagactggaggagcccggcaacttcgtgctgaaggagctgcaccccttcgacctgcacgccatgcagaacatcatcctgaagtacaagacccagttcgagggcatgaaccacagagtgcagagaagcgaggacaccctgaaggccctggaggacttcctggccagcctgagaaccgccaagctgagcgccgagcccgtgaccgacctgagcgccagcgacacccaggtggcccaggagaacaccctgaccgtgaagaacaaggagggcgagatccacctgatgaaggacaaggccaagcacctggacaagtgcctgaagatgctggacatgagcttcaaggacgccgagagaggcgacgacaccagctgcgagaacctgctggacgccttcagcatcaagctgagcgagacccacggctacggcgtgcaggaggagttcaccgaggagaacaagctgctggaggcctgcatcttcaagaacaacgagctgctgaagaacatccaggacgtgcagagccagatcagcaagatcggcctgaaggaccccaccgtgcccgccgtgaagcacagaaagaagagcctgatcagactggacaaggtgctggacgagtacgaggaggagaagagacacctgcaggagatggccaacagcctgccccacttcaaggacggcagagagaagaccgtgaaccagcagtgccagaacaccgtggtgctgtgggagaacaccaaggccctggtgaccgagtgcctggagcagtgcggcagagtgctggagctgctgaagcagtaccagaacttcaagagcatcctgaccaccctgatccagaaggaggagagcgtgatcagcctgcaggccagctacatgggcaaggagaacctgaagaagagaatcgccgagatcgagatcgtgaaggaggagttcaacgagcacctggaggtggtggacaagatcaaccaggtgtgcaagaacctgcagttctacctgaacaagatgaagaccttcgaggagccccccttcgagaaggaggccaacatcatcgtggacagatggctggacatcaacgagaagaccgaggactactacgagaacctgggcagagccctggccctgtgggacaagctgttcaacctgaagaacgtgatcgacgagtggaccgagaaggccctgcagaagatggagctgcaccagctgaccgaggaggacagagagagactgaaggaggagctgcaggtgcacgagcagaagaccagcgagttcagcagaagagtggccgagatccagttcctgctgcagagcagcgagatccccctggagctgcaggtgatggagagcagcatcctgaacaagatggagcacgtgcagaagtgcctgaccggcgagagcaactgccacgccctgagcggcagcaccgccgagctgagagaggacctggaccaggccaagacccagatcggcatgaccgagagcctgctgaaggccctgagccccagcgacagcctggagatcttcaccaagctggaggagatccagcagcagatcctgcagcagaagcacagcatgatcctgctggagaaccagatcggctgcctgacccccgagctgagcgagctgaagaagcagtacgagagcgtgagcgacctgttcaacaccaagaagagcgtgctgcaggaccacttcagcaagctgctgaacgaccagtgcaagaacttcaacgactggttcagcaacatcaaggtgaacctgaaggagtgcttcgagagcagcgagaccaagaagagcgtggagcagaagctgcagaagctgagcgacttcctgaccctggagggcagaaacagcaagatcaagcaggtggacagcgtgctgaagcacgtgaagaagcacctgcccaaggcccacgtgaaggagctgatcagctggctggtgggccaggagttcgagctggagaagatggagagcatctgccaggccagagccaaggagctggaggacagcctgcagcagctgctgagactgcaggacgaccacagaaacctgagaaagtggctgaccaaccaggaggagaagtggaagggcatggaggagcccggcgagaagaccgagctgttctgccaggccctggccagaaagagagagcagttcgagagcgtggcccagctgaacaacagcctgaaggagtacggcttcaccgaggaggaggagatcatcatggaggccacctgcctgatggacagataccagaccctgctgagacagctgagcgagatcgaggaggaggacaagctgctgcccaccgaggaccagagcttcaacgacctggcccacgacgtgatccactggatcaaggagatcaaggagagcctgatggtgctgaacagcagcgagggcaagatgcccctggaggagagaatccagaagatcaaggagatcatcctgctgaagcccgagggcgacgccagaatcgagaccatcatgaagcaggccgagagcagcgaggcccccctggtgcagaagaccctgaccgacatcagcaaccagtgggacaacaccctgcacctggccagcacctacctgagccaccaggagaagctgctgctggagggcgagaagtacctgcagagcaaggaggacctgagactgatgctgatcgagctgaagaagaagcaggaggccggcttcgccctgcagcacggcctgcaggagaagaaggcccagctgaagatctacaagaagttcctgaagaaggcccaggacctgaccagcctgctgaaggagctgaagagccagggcaactacctgctggagtgcaccaagaaccccagcttcagcgaggagccctggctggagatcaagcacctgcacgagagcctgctgcagcagctgcaggacagcgtgcagaacctggacggccacgtgagagagcacgacagctaccaggtgtgcgtgaccgacctgaacaccaccctggacaacttcagcaaggagttcgtgagcttcagcgacaagcccgtggaccagatcgccgtggaggagaagctgcagaagctgcaggagctggagaacagactgagcctgcaggacggcaccctgaagaagatcctggccctggccaagagcgtgaagcagaacaccagcagcgtgggccagaagatcatcaaggacgacatcaagagcctgcagtgcaagcagaaggacctggagaacagactggccagcgccaagcaggagatggagtgctgcctgaacagcatcctgaagagcaagagaagcaccgagaagaagggcaagttcaccctgcccggcagagagaagcaggccaccagcgacgtgcaggagagcacccaggagagcgccgccgtggagaagctggaggaggactgggagatcaacaaggacagcgccgtggagatggccatgagcaagcagctgagcctgaacgcccaggagagcatgaagaacaccgaggacgagagaaaggtgaacgagctgcagaaccagcccctggagctggacaccatgctgagaaacgagcagctggaggagatcgagaagctgtacacccagctggaggccaagaaggccgccatcaagcccctggagcagaccgagtgcctgaacaagaccgagaccggcgccctggtgctgcacaacatcggctacagcgcccagcacctggacaacctgctgcaggccctgatcaccctgaagaagaacaaggagagccagtactgcgtgctgagagacttccaggagtacctggccgccgtggagagcagcatgaaggccctgctgaccgacaaggagagcctgaaggtgggccccctggacagcgtgacctacctggacaagatcaagaagttcatcgccagcatcgagaaggagaaggacagcctgggcaacctgaagatcaagtgggagaacctgagcaaccacgtgaccgacatggacaagaagctgctggagagccagatcaagcagctggagcacggctgggagcaggtggagcagcagatccagaagaagtacagccagcaggtggtggagtacgacgagttcaccaccctgatgaacaaggtgcaggacaccgagatcagcctgcagcagcagcagcagcacctgcagctgagactgaagagccccgaggagagagccggcaaccagagcatgatcgccctgaccaccgacctgcaggccaccaagcacggcttcagcgtgctgaagggccaggccgagctgcagatgaagagaatctggggcgagaaggagaagaagaacctggaggacggcatcaacaacctgaagaagcagtgggagaccctggagcccctgcacctggaggccgagaaccagatcaagaagtgcgacatcagaaacaagatgaaggagaccatcctgtgggccaagaacctgctgggcgagctgaaccccagcatccccctgctgcccgacgacatcctgagccagatcagaaagtgcaaggtgacccacgacggcatcctggccagacagcagagcgtggagagcctggccgaggaggtgaaggacaaggtgcccagcctgaccacctacgagggcagcgacctgaacaacaccctggaggacctgagaaaccagtaccagatgctggtgctgaagagcacccagagaagccagcagctggagttcaagctggaggagagaagcaacttcttcgccatcatcagaaagttccagctgatggtgcaggagagcgagaccctgatcatccccagagtggagaccgccgccaccgaggccgagctgaagcaccaccacgtgaccctggaggccagccagaaggagctgcaggagatcgacagcggcatcagcacccacctgcaggagctgaccaacatctacgaggagctgaacgtgttcgagagactgttcctggaggaccagctgaagaacctgaagatcagaaccaacagaatccagagattcatccagaacacctgcaacgaggtggagcacaagatcaagttctgcagacagttccacgagaagaccagcgccctgcaggaggaggccgacagcatccagagaaacgagctgctgctgaaccaggaggtgaacaagggcgtgaaggaggagatctacaacctgaaggacagactgaccgccatcaagtgctgcatcctgcaggtgctgaagctgaagaaggtgttcgactacatcggcctgaactgggacttcagccagctggaccagctgcagacccaggtgttcgagaaggagaaggagctggaggagaagatcaagcagctggacaccttcgaggaggagcacggcaagtaccaggccctgctgagcaagatgagagccatcgacctgcagatcaagaagatgaccgaggtggtgctgaaggcccccgacagcagccccgagagcagaagactgaacgcccagatcctgagccagagaatcgagaaggccaagtgcctgtgcgacgagatcatcaagaagctgaacgagaacaagaccttcgacgacagcttcaaggagaaggagatcctgcagatcaagctgaacgccgaggagaacgacaagctgtacaaggtgctgcagaacatggtgctggagctgagccccaaggagctggacgagaagaactgccaggacaagctggagaccagcctgcacgtgctgaaccagatcaagagccagctgcagcagcccctgctgatcaacctggagatcaagcacatccagaacgagaaggacaactgcgaggccttccaggagcaggtgtgggccgagatgtgcagcatcaaggccgtgaccgccatcgagaagcagagagaggagaacagcagcgaggccagcgacgtggagaccaagctgagagagttcgaggacctgcagatgcagctgaacaccagcatcgacctgagaaccaacgtgctgaacgacgcctacgagaacctgaccagatacaaggaggccgtgaccagagccgtggagagcatcaccagcctggaggccatcatcatcccctacagagtggacgtgggcaaccccgaggagagcctggagatgcccctgagaaagcaggaggagctggagagcaccgtggcccacatccaggacctgaccgagaagctgggcatgatcagcagccccgaggccaagctgcagctgcagtacaccctgcaggagctggtgagcaagaacagcgccatgaaggaggccttcaaggcccaggagaccgaggccgagagatacctggagaactacaagtgctacagaaagatggaggaggacatctacaccaacctgagcaagatggagaccgtgctgggccagagcatgagcagcctgcccctgagctacagagaggccctggagagactggagcagagcaaggccctggtgagcaacctgatcagcaccaaggaggagctgatgaagctgagacagatcctgagactgctgagactgagatgcaccgagaacgacggcatctgcctgctgaagatcgtgagcgccctgtgggagaagtggctgagcctgctggaggccgccaaggagtgggagatgtggtgcgaggagctgaagcaggagtggaagttcgtgagcgaggagatcgagagagaggccatcatcctggacaacctgcaggaggagctgcccgagatcagcaagaccaaggaggccgccaccaccgaggagctgagcgagctgctggactgcctgtgccagtacggcgagaacgtggagaagcagcagctgctgctgaccctgctgctgcagagaatcagaagcatccagaacgtgcccgagagcagcggcgccgtggagaccgtgcccgccttccaggagatcaccagcatgaaggagagatgcaacaagctgctgcagaaggtgcagaagaacaaggagctggtgcagaccgagatccaggagagacacagcttcaccaaggagatcatcgccctgaagaacttcttccagcagaccaccaccagcttccagaacatggccttccaggaccaccccgagaagagcgagcagttcgaggagctgcagagcatcctgaagaagggcaagctgaccttcgagaacatcatggagaagctgagaatcaagtacagcgagatgtacaccatcgtgcccgccgagatcgagagccaggtggaggagtgcagaaaggccctggaggacatcgacgagaagatcagcaacgaggtgctgaagagcagccccagctacgccatgagaagaaagatcgaggagatcaacaacggcctgcacaacgtggagaagatgctgcagcagaagagcaagaacatcgagaaggcccaggagatccagaagaagatgtgggacgagctggacctgtggcacagcaagctgaacgagctggacagcgaggtgcaggacatcgtggagcaggaccccggccaggcccaggagtggatggacaacctgatgatccccttccagcagtaccagcaggtgagccagagagccgagtgcagaaccagccagctgaacaaggccaccgtgaagatggaggagtacagcgacctgctgaagagcaccgaggcctggatcgagaacaccagccacctgctggccaaccccgccgactacgacagcctgagaaccctgagccaccacgccagcaccgtgcagatggccctggaggacagcgagcagaagcacaacctgctgcacagcatcttcatggacctggaggacctgagcatcatcttcgagaccgacgagctgacccagagcatccaggagctgagcaaccaggtgaccgccctgcagcagaagatcatggagagcctgccccagatccagagaatggccgacgacgtggtggccatcgagagcgaggtgaagagcatggagaagagagtgagcaagatcaagaccatcctgctgagcaaggagatcttcgacttcagccccgaggagcacctgaagcacggcgaggtgatcctggagaacatcagacccatgaagaagaccatcgccgagatcgtgagctaccaggtggagctgagactgccccagaccggcatgaagcccctgcccgtgttccagagaaccaaccagctgctgcaggacatcaagctgctggagaacgtgacccaggagcagaacgagctgctgaaggtggtgatcaagcagaccaacgagtgggacgaggagatcgagaacctgaagcagatcctgaacaactacagcgcccagttcagcctggagcacatgagccccgaccaggccgacaagctgccccagctgcagggcgagatcgagagaatggagaagcagatcctgagcctgaaccagagaaaggaggacctgctggtggacctgaaggccaccgtgctgaacctgcaccagcacctgaagcaggagcaggagggcgtggagagagacagactgcccgccgtgaccagcgaggagggcggcgtggccgagagagacgccagcgagagaaagctgaacagaagaggcagcatgagctacctggccgccgtggaggaggaggtggaggagagcagcgtgaagagcgacaacggcgacgagaaggccgagcccagcccccagagctggagcagcctgtggaagcacgacaaggacatggaggaggacagagccagcagcagcagcggcaccatcgtgcaggaggcctacggcaagatcagcaccagcgacaacagcatggcccagatcctgacccccgacagcctgaacaccgagcagggccccgagtgcagcctgagacccaaccagaccgaggagggcaccaccccccccatcgaggccgacaccctggacagcagcgacgcccagggcggcctggagcccagagtggagaagaccagacccgagcccaccgaggtgctgcacgcctgcaagacccaggtggccgagctggagctgtggctgcagcaggccaacgtggccgtggagcccgagaccctgaacgccgacatgcagcaggtgctggagcagcagctggtgggctgccaggccatgctgaccgagatcgagcacaaggtggccttcctgctggagacctgcaaggaccagggcctgggcgacaacggcgccacccagcacgaggccgaggccctgagcctgaagctgaagaccgtgaagtgcaacctggagaaggtgcagatgatgctgcaggagaagcacagcgaggaccagcaccccaccatcctgaagaagagcagcgagcccgagcaccaggaggccctgcagcccgtgaacctgagcgagctggagagcatcgtgaccgagagaccccagttcagcagacagaaggacttccagcagcagcaggtgctggagctgaagcccatggagcagaaggacttcatcaagttcatcgagttcaacgccaagaagatgtggccccagtactgccagcacgacaacgacaccacccaggagagcagcgccagcaaccaggccagcagccccgagaacgacgtgcccgacagcatcctgagcccccagggccagaacggcgacaagtggcagtacctgcaccacgagctgagcagcaagatcaagctgcccctgccccagctggtggagccccaggtgagcaccaacatgggcatcctgcccagcgtgaccatgtacaacttcagataccccaccaccgaggagctgaagacctacaccacccagctggaggacctgagacaggaggccagcaacctgcagacccaggagaacatgaccgaggaggcctacatcaacctggacaagaagctgttcgagctgttcctgaccctgagccagtgcctgagcagcgtggaggagatgctggagatgcccagactgtacagagaggacggcagcggccagcaggtgcactacgagaccctggccctggagctgaagaagctgtacctggccctgagcgacaagaagggcgacctgctgaaggccatgacctggcccggcgagaacaccaacctgctgctggagtgcttcgacaacctgcaggtgtgcctggagcacacccaggccgccgccgtgtgcagaagcaagagcctgaaggccggcctggactacaacagaagctaccagaacgagatcaagagactgtaccaccagctgatcaagagcaagaccagcctgcagcagagcctgaacgagatcagcggccagagcgtggccgagcagctgcagaaggccgacgcctacaccgtggagctggagaacgccgagagcagagtggccaagctgagagacgagggcgagagactgcacctgccctacgccctgctgcaggaggtgtacaagctggaggacgtgctggacagcatgtggggcatgctgagagccagatacaccgagctgagcagccccttcgtgaccgagagccagcaggacgccctgctgcagggcatggtggagctggtgaagatcggcaaggagaagctggcccacggccacctgaagcagaccaagagcaaggtggccctgcaggcccagatcgagaaccacaaggtgttcttccagaagctggtggccgacatgctgctgatccaggcctacagcgccaagatcctgcccagcctgctgcagaacagagagaccttctgggccgagcaggtgaccgaggtgaagatcctggaggagaagagcagacagtgcggcatgaagctgcagagcctgctgcagaagtgggaggagttcgacgagaactacgccagcctggagaaggacctggagatcctgatcagcaccctgcccagcgtgagcctggtggaggagaccgaggagagactggtggagagaatcagcttctaccagcagatcaagagaaacatcggcggcaagcacgccagactgtaccagaccctgaacgagggcaagcagctggtggccagcgtgagctgccccgagctggagggccagatcgccaagctggaggagcagtggctgagcctgaacaagaagatcgaccacgagctgcacagactgcaggccctgctgaagcacctgctgagctacaacagagacagcgaccagctgaccaagtggctggagagcagccagcacaccctgaactactggaaggagcagagcctgaacgtgagccaggacctggacaccatcagaagcaacatcaacaacttcttcgagttcagcaaggaggtggacgagaagagcagcctgaagaccgccgtgatcagcatcggcaaccagctgctgcacctgaaggagaccgacaccgccaccctgagagccagcctggcccagttcgagcagaagtggaccatgctgatcacccagctgcccgacatccaggagaagctgcaccagctgcagatggagaagctgcccagcagaaaggccatcaccgagatgatcagctggatgaacaacgtggagcaccagaccagcgacgaggacagcgtgcacagccccagcagcgccagccaggtgaagcacctgctgcagaagcacaaggagttcagaatggagatggactacaagcagtggatcgtggacttcgtgaaccagagcctgctgcagctgagcacctgcgacgtggagagcaagagatacgagagaaccgagttcgccgagcacctgggcgagatgaacagacagtggcacagagtgcacggcatgctgaacagaaagatccagcacctggagcagctgctggagagcatcaccgagagcgagaacaagatccagatcctgaacaactggctggaggcccaggaggagagactgaagaccctgcagaagcccgagagcgtgatcagcgtgcagaagctgctgctggactgccaggacatcgagaaccagctggccatcaagagcaaggccctggacgagctgaagcagagctacctgaccctggagagcggcgccgtgcccctgctggaggacaccgccagcagaatcgacgagctgttccagaagagaagcagcgtgctgacccaggtgaaccagctgaagaccagcatgcagagcgtgctgcaggagtggaagatctacgaccagctgtacgacgaggtgaacatgatgaccatcagattctggtactgcatggagcacagcaagcccgtggtgctgagcctggagaccctgagatgccaggtggagaacctgcagagcctgcaggacgaggccgagagcagcgagggcagctgggagaagctgcaggaggtgatcggcaagctgaagggcctgtgccccagcgtggccgagatcatcgaggagaagtgccagaacacccacaagagatggacccaggtgaaccaggccatcgccgaccagctgcagaaggcccagagcctgctgcagctgtggaaggcctacagcaacgcccacggcgaggccgccgccagactgaagcagcaggaggccaagttccagcagctggccaacatcagcatgagcggcaacaacctggccgagatcctgccccccgccctgcaggacatcaaggagctgcagcacgacgtgcagaagaccaaggaggccttcctgcagaacagcagcgtgctggacagactgccccagcccgccgagagcagcacccacatgctgctgcccggccccctgcacagcctgcagagagccgcctacctggagaagatgctgctggtgaaggccaacgagttcgagttcgtgctgagccagttcaaggacttcggcgtgagactggagagcctgaagggcctgatcatgcacgaggaggagaacctggacagactgcaccagcaggagaaggagaaccccgacagcttcctgaaccacgtgctggccctgaccgcccagagccccgacatcgagcacctgaacgaggtgagcctgaagctgcccctgagcgacgtggccgtgaagaccctgcagaacatgaacagacagtggatcagagccaccgccaccgccctggagagatgcagcgagctgcagggcatcggcctgaacgagaagttcctgtactgctgcgagaagtggatccagctgctggagaagatcgaggaggccctgaaggtggacgtggccaacagcctgcccgagctgctggagcagcagaagacctacaagatgctggaggccgaggtgagcatcaaccagaccatcgccgacagctacgtgacccagagcctgcagctgctggacaccaccgagatcgagaacagacccgagttcatcaccgagttcagcaagctgaccgacagatggcagaacgccgtgcagggcgtgagacagagaaagggcgacgtggacggcctggtgagacagtggcaggacttcaccaccagcgtggagaacctgttcagattcctgaccgacaccagccacctgctgagcgccgtgaagggccaggagagattcagcctgtaccagaccagaagcctgatccacgagctgaagaacaaggagatccacttccagagaagaagaaccacctgcgccctgaccctggaggccggcgagaagctgctgctgaccaccgacctgaagaccaaggagagcgtgggcagaagaatcagccagctgcaggacagctggaaggacatggagccccagctggccgagatgatcaagcagttccagagcaccgtggagacctgggaccagtgcgagaagaagatcaaggagctgaagagcagactgcaggtgctgaaggcccagagcgaggaccccctgcccgagctgcacgaggacctgcacaacgagaaggagctgatcaaggagctggagcagagcctggccagctggacccagaacctgaaggagctgcagaccatgaaggccgacctgaccagacacgtgctggtggaggacgtgatggtgctgaaggagcagatcgagcacctgcacagacagtgggaggacctgtgcctgagagtggccatcagaaagcaggagatcgaggacagactgaacacctgggtggtgttcaacgagaagaacaaggagctgtgcgcctggctggtgcagatggagaacaaggtgctgcagaccgccgacatcagcatcgaggagatgatcgagaagctgcagaaggactgcatggaggagatcaacctgttcagcgagaacaagctgcagctgaagcagatgggcgaccagctgatcaaggccagcaacaagagcagagccgccgagatcgacgacaagctgaacaagatcaacgacagatggcagcacctgttcgacgtgatcggcagcagagtgaagaagctgaaggagaccttcgccttcatccagcagctggacaagaacatgagcaacctgagaacctggctggccagaatcgagagcgagctgagcaagcccgtggtgtacgacgtgtgcgacgaccaggagatccagaagagactggccgagcagcaggacctgcagagagacatcgagcagcacagcgccggcgtggagagcgtgttcaacatctgcgacgtgctgctgcacgacagcgacgcctgcgccaacgagaccgagtgcgacagcatccagcagaccaccagaagcctggacagaagatggagaaacatctgcgccatgagcatggagagaagaatgaagatcgaggagacctggagactgtggcagaagttcctggacgactacagcagattcgaggactggctgaagagcgccgagagaaccgccgcctgccccaacagcagcgaggtgctgtacaccagcgccaaggaggagctgaagagattcgaggccttccagagacagatccacgagagactgacccagctggagctgatcaacaagcagtacagaagactggccagagagaacagaaccgacaccgccagcagactgaagcagatggtgcacgagggcaaccagagatgggacaacctgcagagaagagtgaccgccgtgctgagaagactgagacacttcaccaaccagagagaggagttcgagggcaccagagagagcatcctggtgtggctgaccgagatggacctgcagctgaccaacgtggagcacttcagcgagagcgacgccgacgacaagatgagacagctgaacggcttccagcaggagatcaccctgaacaccaacaagatcgaccagctgatcgtgttcggcgagcagctgatccagaagagcgagcccctggacgccgtgctgatcgaggacgagctggaggagctgcacagatactgccaggaggtgttcggcagagtgagcagattccacagaagactgaccagctgcacccccggcctggaggacgagaaggaggccagcgagaacgagaccgacatggaggaccccagagagatccagaccgacagctggagaaagagaggcgagagcgaggagcccagcagcccccagagcctgtgccacctggtggcccccggccacgagagaagcggctgcgagacccccgtgagcgtggacagcatccccctggagtgggaccacaccggcgacgtgggcggcagcagcagccacgaggaggacgaggagggcccctactacagcgccctgagcgacgtggagatccccgagaaccccgaggcctacctgaagatgaccaccaagaccctgaaggccagcagcggcaagagcatcagcgacggccacagctggcacgtgcccgacagccccagctgccccgagcaccactacaagcagatggagggcgacagaaacgtgccccccgtgccccccgccagcagcaccccctacaagcccccctacggcaagctgctgctgccccccggcaccgacggcggcaaggagggccccagagtgctgaacggcaacccccagcaggaggacggcggcctggccggcatcaccgagcagcagagcggcgccttcgacagatgggagatgatccaggcccaggagctgcacaacaagctgaagatcaagcagaacctgcagcagctgaacagcgacatcagcgccatcaccacctggctgaagaagaccgaggccgagctggagatgctgaagatggccaagccccccagcgacatccaggagatcgagctgagagtgaagagactgcaggagatcctgaaggccttcgacacctacaaggccctggtggtgagcgtgaacgtgagcagcaaggagttcctgcagaccgagagccccgagagcaccgagctgcagagcagactgagacagctgagcctgctgtgggaggccgcccagggcgccgtggacagctggagaggcggcctgagacagagcctgatgcagtgccaggacttccaccagctgagccagaacctgctgctgtggctggccagcgccaagaacagaagacagaaggcccacgtgaccgaccccaaggccgaccccagagccctgctggagtgcagaagagagctgatgcagctggagaaggagctggtggagagacagccccaggtggacatgctgcaggagatcagcaacagcctgctgatcaagggccacggcgaggactgcatcgaggccgaggagaaggtgcacgtgatcgagaagaagctgaagcagctgagagagcaggtgagccaggacctgatggccctgcagggcacccagaaccccgccagccccctgcccagcttcgacgaggtggacagcggcgaccagccccccgccaccagcgtgcccgcccccagagccaagttcagagccgtgagaaccaccgagggcgaggaggagaccgagagcagagtgcccggcagcaccagaccccagagaagcttcctgagcagagtggtgagagccgccctgcccctgcagctgctgctgctgctgctgctgctgctggcctgcctgctgcccagcagcgaggaggactacagctgcacccaggccaacaacttcgccagaagcttctaccccatgctgagatacaccaacggccccccccccacctag

SEQ ID NO: 257202 - DNA, 10626 bp, Artificial Sequence
  derived and/or modified sequence
atggaggaggacatctacaccaacctgagcaagatggagaccgtgctgggccagagcatgagcagcctgcccctgagctacagagaggccctggagagactggagcagagcaaggccctggtgagcaacctgatcagcaccaaggaggagctgatgaagctgagacagatcctgagactgctgagactgagatgcaccgagaacgacggcatctgcctgctgaagatcgtgagcgccctgtgggagaagtggctgagcctgctggaggccgccaaggagtgggagatgtggtgcgaggagctgaagcaggagtggaagttcgtgagcgaggagatcgagagagaggccatcatcctggacaacctgcaggaggagctgcccgagatcagcaagaccaaggaggccgccaccaccgaggagctgagcgagctgctggactgcctgtgccagtacggcgagaacgtggagaagcagcagctgctgctgaccctgctgctgcagagaatcagaagcatccagaacgtgcccgagagcagcggcgccgtggagaccgtgcccgccttccaggagatcaccagcatgaaggagagatgcaacaagctgctgcagaaggtgcagaagaacaaggagctggtgcagaccgagatccaggagagacacagcttcaccaaggagatcatcgccctgaagaacttcttccagcagaccaccaccagcttccagaacatggccttccaggaccaccccgagaagagcgagcagttcgaggagctgcagagcatcctgaagaagggcaagctgaccttcgagaacatcatggagaagctgagaatcaagtacagcgagatgtacaccatcgtgcccgccgagatcgagagccaggtggaggagtgcagaaaggccctggaggacatcgacgagaagatcagcaacgaggtgctgaagagcagccccagctacgccatgagaagaaagatcgaggagatcaacaacggcctgcacaacgtggagaagatgctgcagcagaagagcaagaacatcgagaaggcccaggagatccagaagaagatgtgggacgagctggacctgtggcacagcaagctgaacgagctggacagcgaggtgcaggacatcgtggagcaggaccccggccaggcccaggagtggatggacaacctgatgatccccttccagcagtaccagcaggtgagccagagagccgagtgcagaaccagccagctgaacaaggccaccgtgaagatggaggagtacagcgacctgctgaagagcaccgaggcctggatcgagaacaccagccacctgctggccaaccccgccgactacgacagcctgagaaccctgagccaccacgccagcaccgtgcagatggccctggaggacagcgagcagaagcacaacctgctgcacagcatcttcatggacctggaggacctgagcatcatcttcgagaccgacgagctgacccagagcatccaggagctgagcaaccaggtgaccgccctgcagcagaagatcatggagagcctgccccagatccagagaatggccgacgacgtggtggccatcgagagcgaggtgaagagcatggagaagagagtgagcaagatcaagaccatcctgctgagcaaggagatcttcgacttcagccccgaggagcacctgaagcacggcgaggtgatcctggagaacatcagacccatgaagaagaccatcgccgagatcgtgagctaccaggtggagctgagactgccccagaccggcatgaagcccctgcccgtgttccagagaaccaaccagctgctgcaggacatcaagctgctggagaacgtgacccaggagcagaacgagctgctgaaggtggtgatcaagcagaccaacgagtgggacgaggagatcgagaacctgaagcagatcctgaacaactacagcgcccagttcagcctggagcacatgagccccgaccaggccgacaagctgccccagctgcagggcgagatcgagagaatggagaagcagatcctgagcctgaaccagagaaaggaggacctgctggtggacctgaaggccaccgtgctgaacctgcaccagcacctgaagcaggagcaggagggcgtggagagagacagactgcccgccgtgaccagcgaggagggcggcgtggccgagagagacgccagcgagagaaagctgaacagaagaggcagcatgagctacctggccgccgtggaggaggaggtggaggagagcagcgtgaagagcgacaacggcgacgagaaggccgagcccagcccccagagctggagcagcctgtggaagcacgacaaggacatggaggaggacagagccagcagcagcagcggcaccatcgtgcaggaggcctacggcaagatcagcaccagcgacaacagcatggcccagatcctgacccccgacagcctgaacaccgagcagggccccgagtgcagcctgagacccaaccagaccgaggagggcaccaccccccccatcgaggccgacaccctggacagcagcgacgcccagggcggcctggagcccagagtggagaagaccagacccgagcccaccgaggtgctgcacgcctgcaagacccaggtggccgagctggagctgtggctgcagcaggccaacgtggccgtggagcccgagaccctgaacgccgacatgcagcaggtgctggagcagcagctggtgggctgccaggccatgctgaccgagatcgagcacaaggtggccttcctgctggagacctgcaaggaccagggcctgggcgacaacggcgccacccagcacgaggccgaggccctgagcctgaagctgaagaccgtgaagtgcaacctggagaaggtgcagatgatgctgcaggagaagcacagcgaggaccagcaccccaccatcctgaagaagagcagcgagcccgagcaccaggaggccctgcagcccgtgaacctgagcgagctggagagcatcgtgaccgagagaccccagttcagcagacagaaggacttccagcagcagcaggtgctggagctgaagcccatggagcagaaggacttcatcaagttcatcgagttcaacgccaagaagatgtggccccagtactgccagcacgacaacgacaccacccaggagagcagcgccagcaaccaggccagcagccccgagaacgacgtgcccgacagcatcctgagcccccagggccagaacggcgacaagtggcagtacctgcaccacgagctgagcagcaagatcaagctgcccctgccccagctggtggagccccaggtgagcaccaacatgggcatcctgcccagcgtgaccatgtacaacttcagataccccaccaccgaggagctgaagacctacaccacccagctggaggacctgagacaggaggccagcaacctgcagacccaggagaacatgaccgaggaggcctacatcaacctggacaagaagctgttcgagctgttcctgaccctgagccagtgcctgagcagcgtggaggagatgctggagatgcccagactgtacagagaggacggcagcggccagcaggtgcactacgagaccctggccctggagctgaagaagctgtacctggccctgagcgacaagaagggcgacctgctgaaggccatgacctggcccggcgagaacaccaacctgctgctggagtgcttcgacaacctgcaggtgtgcctggagcacacccaggccgccgccgtgtgcagaagcaagagcctgaaggccggcctggactacaacagaagctaccagaacgagatcaagagactgtaccaccagctgatcaagagcaagaccagcctgcagcagagcctgaacgagatcagcggccagagcgtggccgagcagctgcagaaggccgacgcctacaccgtggagctggagaacgccgagagcagagtggccaagctgagagacgagggcgagagactgcacctgccctacgccctgctgcaggaggtgtacaagctggaggacgtgctggacagcatgtggggcatgctgagagccagatacaccgagctgagcagccccttcgtgaccgagagccagcaggacgccctgctgcagggcatggtggagctggtgaagatcggcaaggagaagctggcccacggccacctgaagcagaccaagagcaaggtggccctgcaggcccagatcgagaaccacaaggtgttcttccagaagctggtggccgacatgctgctgatccaggcctacagcgccaagatcctgcccagcctgctgcagaacagagagaccttctgggccgagcaggtgaccgaggtgaagatcctggaggagaagagcagacagtgcggcatgaagctgcagagcctgctgcagaagtgggaggagttcgacgagaactacgccagcctggagaaggacctggagatcctgatcagcaccctgcccagcgtgagcctggtggaggagaccgaggagagactggtggagagaatcagcttctaccagcagatcaagagaaacatcggcggcaagcacgccagactgtaccagaccctgaacgagggcaagcagctggtggccagcgtgagctgccccgagctggagggccagatcgccaagctggaggagcagtggctgagcctgaacaagaagatcgaccacgagctgcacagactgcaggccctgctgaagcacctgctgagctacaacagagacagcgaccagctgaccaagtggctggagagcagccagcacaccctgaactactggaaggagcagagcctgaacgtgagccaggacctggacaccatcagaagcaacatcaacaacttcttcgagttcagcaaggaggtggacgagaagagcagcctgaagaccgccgtgatcagcatcggcaaccagctgctgcacctgaaggagaccgacaccgccaccctgagagccagcctggcccagttcgagcagaagtggaccatgctgatcacccagctgcccgacatccaggagaagctgcaccagctgcagatggagaagctgcccagcagaaaggccatcaccgagatgatcagctggatgaacaacgtggagcaccagaccagcgacgaggacagcgtgcacagccccagcagcgccagccaggtgaagcacctgctgcagaagcacaaggagttcagaatggagatggactacaagcagtggatcgtggacttcgtgaaccagagcctgctgcagctgagcacctgcgacgtggagagcaagagatacgagagaaccgagttcgccgagcacctgggcgagatgaacagacagtggcacagagtgcacggcatgctgaacagaaagatccagcacctggagcagctgctggagagcatcaccgagagcgagaacaagatccagatcctgaacaactggctggaggcccaggaggagagactgaagaccctgcagaagcccgagagcgtgatcagcgtgcagaagctgctgctggactgccaggacatcgagaaccagctggccatcaagagcaaggccctggacgagctgaagcagagctacctgaccctggagagcggcgccgtgcccctgctggaggacaccgccagcagaatcgacgagctgttccagaagagaagcagcgtgctgacccaggtgaaccagctgaagaccagcatgcagagcgtgctgcaggagtggaagatctacgaccagctgtacgacgaggtgaacatgatgaccatcagattctggtactgcatggagcacagcaagcccgtggtgctgagcctggagaccctgagatgccaggtggagaacctgcagagcctgcaggacgaggccgagagcagcgagggcagctgggagaagctgcaggaggtgatcggcaagctgaagggcctgtgccccagcgtggccgagatcatcgaggagaagtgccagaacacccacaagagatggacccaggtgaaccaggccatcgccgaccagctgcagaaggcccagagcctgctgcagctgtggaaggcctacagcaacgcccacggcgaggccgccgccagactgaagcagcaggaggccaagttccagcagctggccaacatcagcatgagcggcaacaacctggccgagatcctgccccccgccctgcaggacatcaaggagctgcagcacgacgtgcagaagaccaaggaggccttcctgcagaacagcagcgtgctggacagactgccccagcccgccgagagcagcacccacatgctgctgcccggccccctgcacagcctgcagagagccgcctacctggagaagatgctgctggtgaaggccaacgagttcgagttcgtgctgagccagttcaaggacttcggcgtgagactggagagcctgaagggcctgatcatgcacgaggaggagaacctggacagactgcaccagcaggagaaggagaaccccgacagcttcctgaaccacgtgctggccctgaccgcccagagccccgacatcgagcacctgaacgaggtgagcctgaagctgcccctgagcgacgtggccgtgaagaccctgcagaacatgaacagacagtggatcagagccaccgccaccgccctggagagatgcagcgagctgcagggcatcggcctgaacgagaagttcctgtactgctgcgagaagtggatccagctgctggagaagatcgaggaggccctgaaggtggacgtggccaacagcctgcccgagctgctggagcagcagaagacctacaagatgctggaggccgaggtgagcatcaaccagaccatcgccgacagctacgtgacccagagcctgcagctgctggacaccaccgagatcgagaacagacccgagttcatcaccgagttcagcaagctgaccgacagatggcagaacgccgtgcagggcgtgagacagagaaagggcgacgtggacggcctggtgagacagtggcaggacttcaccaccagcgtggagaacctgttcagattcctgaccgacaccagccacctgctgagcgccgtgaagggccaggagagattcagcctgtaccagaccagaagcctgatccacgagctgaagaacaaggagatccacttccagagaagaagaaccacctgcgccctgaccctggaggccggcgagaagctgctgctgaccaccgacctgaagaccaaggagagcgtgggcagaagaatcagccagctgcaggacagctggaaggacatggagccccagctggccgagatgatcaagcagttccagagcaccgtggagacctgggaccagtgcgagaagaagatcaaggagctgaagagcagactgcaggtgctgaaggcccagagcgaggaccccctgcccgagctgcacgaggacctgcacaacgagaaggagctgatcaaggagctggagcagagcctggccagctggacccagaacctgaaggagctgcagaccatgaaggccgacctgaccagacacgtgctggtggaggacgtgatggtgctgaaggagcagatcgagcacctgcacagacagtgggaggacctgtgcctgagagtggccatcagaaagcaggagatcgaggacagactgaacacctgggtggtgttcaacgagaagaacaaggagctgtgcgcctggctggtgcagatggagaacaaggtgctgcagaccgccgacatcagcatcgaggagatgatcgagaagctgcagaaggactgcatggaggagatcaacctgttcagcgagaacaagctgcagctgaagcagatgggcgaccagctgatcaaggccagcaacaagagcagagccgccgagatcgacgacaagctgaacaagatcaacgacagatggcagcacctgttcgacgtgatcggcagcagagtgaagaagctgaaggagaccttcgccttcatccagcagctggacaagaacatgagcaacctgagaacctggctggccagaatcgagagcgagctgagcaagcccgtggtgtacgacgtgtgcgacgaccaggagatccagaagagactggccgagcagcaggacctgcagagagacatcgagcagcacagcgccggcgtggagagcgtgttcaacatctgcgacgtgctgctgcacgacagcgacgcctgcgccaacgagaccgagtgcgacagcatccagcagaccaccagaagcctggacagaagatggagaaacatctgcgccatgagcatggagagaagaatgaagatcgaggagacctggagactgtggcagaagttcctggacgactacagcagattcgaggactggctgaagagcgccgagagaaccgccgcctgccccaacagcagcgaggtgctgtacaccagcgccaaggaggagctgaagagattcgaggccttccagagacagatccacgagagactgacccagctggagctgatcaacaagcagtacagaagactggccagagagaacagaaccgacaccgccagcagactgaagcagatggtgcacgagggcaaccagagatgggacaacctgcagagaagagtgaccgccgtgctgagaagactgagacacttcaccaaccagagagaggagttcgagggcaccagagagagcatcctggtgtggctgaccgagatggacctgcagctgaccaacgtggagcacttcagcgagagcgacgccgacgacaagatgagacagctgaacggcttccagcaggagatcaccctgaacaccaacaagatcgaccagctgatcgtgttcggcgagcagctgatccagaagagcgagcccctggacgccgtgctgatcgaggacgagctggaggagctgcacagatactgccaggaggtgttcggcagagtgagcagattccacagaagactgaccagctgcacccccggcctggaggacgagaaggaggccagcgagaacgagaccgacatggaggaccccagagagatccagaccgacagctggagaaagagaggcgagagcgaggagcccagcagcccccagagcctgtgccacctggtggcccccggccacgagagaagcggctgcgagacccccgtgagcgtggacagcatccccctggagtgggaccacaccggcgacgtgggcggcagcagcagccacgaggaggacgaggagggcccctactacagcgccctgagcgacgtggagatccccgagaaccccgaggcctacctgaagatgaccaccaagaccctgaaggccagcagcggcaagagcatcagcgacggccacagctggcacgtgcccgacagccccagctgccccgagcaccactacaagcagatggagggcgacagaaacgtgccccccgtgccccccgccagcagcaccccctacaagcccccctacggcaagctgctgctgccccccggcaccgacggcggcaaggagggccccagagtgctgaacggcaacccccagcaggaggacggcggcctggccggcatcaccgagcagcagagcggcgccttcgacagatgggagatgatccaggcccaggagctgcacaacaagctgaagatcaagcagaacctgcagcagctgaacagcgacatcagcgccatcaccacctggctgaagaagaccgaggccgagctggagatgctgaagatggccaagccccccagcgacatccaggagatcgagctgagagtgaagagactgcaggagatcctgaaggccttcgacacctacaaggccctggtggtgagcgtgaacgtgagcagcaaggagttcctgcagaccgagagccccgagagcaccgagctgcagagcagactgagacagctgagcctgctgtgggaggccgcccagggcgccgtggacagctggagaggcggcctgagacagagcctgatgcagtgccaggacttccaccagctgagccagaacctgctgctgtggctggccagcgccaagaacagaagacagaaggcccacgtgaccgaccccaaggccgaccccagagccctgctggagtgcagaagagagctgatgcagctggagaaggagctggtggagagacagccccaggtggacatgctgcaggagatcagcaacagcctgctgatcaagggccacggcgaggactgcatcgaggccgaggagaaggtgcacgtgatcgagaagaagctgaagcagctgagagagcaggtgagccaggacctgatggccctgcagggcacccagaaccccgccagccccctgcccagcttcgacgaggtggacagcggcgaccagccccccgccaccagcgtgcccgcccccagagccaagttcagagccgtgagaaccaccgagggcgaggaggagaccgagagcagagtgcccggcagcaccagaccccagagaagcttcctgagcagagtggtgagagccgccctgcccctgcagctgctgctgctgctgctgctgctgctggcctgcctgctgcccagcagcgaggaggactacagctgcacccaggccaacaacttcgccagaagcttctaccccatgctgagatacaccaacggccccccccccacctag

SEQ ID NO: 257203 - DNA, 20724 bp, Artificial Sequence
  derived and/or modified sequence
atggcctcctcccccgaactgccaactgaggatgagcaaggctcttgggggattgacgacctgcacataagtctgcaggccgaacaagaagatacgcagaaaaaagcctttacatgctggatcaattcccaactggcccgacacacttcaccatcagttatatctgacctgttcaccgacatcaagaaaggccacgtgctgctcgatttgctggaagtgctttccgggcagcagctgcctagagataaagggagcaatacttttcagtgtcgtatcaacattgagcacgcactcacgtttctgcgcaaccgctcgattaaactgataaatatccatgtgaccgatattatcgacgggaaccccagtataattttggggttgatctggaccattattttgcatttccatatcgagaagctggcgcagactttgtcctgcaactataatcagccctccctggatgacgtttccgtagtggactctagccctgcgtcctcaccacccgcaaagaaatgttccaaagtccaggccaggtggcaaatgtctgcaaggaaggcattgttactgtgggcgcaggagcagtgtgccacgtacgagtcagtcaacgttaccgactttaagagttcctggcgcaatggaatggcttttctggccatcatccacgccttgcgtcctgatctgatagacatgaagtctgtcaagcacagaagcaataaagacaacttacgtgaggcatttcgcattgccgagcaggaactcaagatccccagactgctcgaacctgaagacgtcgacgttgtcgatccagacgaaaagagcatcatgacctatgtggcccagtttctgcagtacagcaaggacgctccaggaacaggtgaagaggcacagggcaaagtgaaagatgcgatgggatggttgacacttcagaaagagaagctgcagaagctgttgaaggattctgagaacgatacttattttaagaagtataactcgttgctcagcttcatggagagcttcaacgaggaaaagaaatccttcctcgacgtgctgtcaataaaaagagacctggatgagctcgacaaagaccacctccagctgagagaagcatgggacgggctggatcaccagatcaatgcctggaagattaaactgaattacgcccttcccccaccactgcaccagaccgaagcctggctccaagaggtagaggagttaatggacgaagacctttctgcaagccaggatcacagtcaggccgtcacactgatccaggagaagatgacactattcaagtcgttaatggaccgtttcgagcaccattcaaatatactgctgacctttgagaataaagatgagaatcacctgcctctagtccccccaaataagcttgaagagatgaagcggcgcattaataatattttggagaaaaaatttatcctactactggaatttcactattacaagtgtctggtcctgggcctggtcgatgaggtcaagtctaaattagacatatggaacatcaaatatggatcaagagaatcagtcgagctattgttggaagactggcacaagtttattgaagagaaagagttcctggcacgacttgacacctcttttcagaaatgcggcgagatctacaaaaatctggccggtgaatgccagaatataaacaagcagtacatgatggttaagtcagacgtatgcatgtatcggaagaatatctataacgtcaagtctactctacaaaaggttctggcctgctgggccacgtacgtggagaatctgcgtctgctgagggcctgcttcgaggagactaagaaggaggagattaaagaagttcctttcgaaaccctggcacagtggaacttagaacacgcaaccctaaatgaagcagggaattttctcgtcgaggtcagtaacgacgtggtaggttcttcgatctctaaggaattgcgcaggcttaacaagcgctggagaaaacttgtgtccaagacacagctcgagatgaatctgcctctaatgatcaaaaagcaggatcagcctacctttgataacagtggcaatattctgagcaaagaagaaaaggccacagtagagttcagcacagacatgagtgtcgagctccccgagaattataatcaaaatatcaaggcaggggaaaagcacgagaaagagaacgaggaattcacaggacagctgaaagtcgccaaggacgtggaaaaactgataggccaagtggagatttgggaggctgaagcaaaaagtgtgttggaccaggacgatgtagatacctcaatggaggagtcactcaaacacctgattgccaagggctctatgtttgatgaactgatggccaggtcggaggacatgctgcagatggatatccagaacatttcatcccaagagtcattccaacatgttctgacaaccggcctgcaggctaagatccaggaggccaaagaaaaggttcagataaatgtcgtaaagctgatcgctgccttgaaaaacctgactgacgtgagtcctgacctcgacatcaggctcaaaatggaggagagccagaaagagctggaatcatatatgatgcgggcacagcagctgctggggcagagggaatccccaggtgaactgattagcaagcacaaggaggcacttataattagtaacacaaaatccctggcaaagtacctgaaagcagtcgaggagttgaagaataacgtgaccgaggatattaagatgtcgttagaagagaagtcgagagatgtgtgtgcgaaatgggaatcactgcaccatgaactctctctttacgtgcagcagctgaagatagatatagagaagggaaaattgtctgataatatactgaagttggagaaacagattaacaaagagaagaaactgattcgcagagggcgcactaaaggactgatcaaggagcatgaggcatgctttagcgaagaggggtgtctttatcagttaaaccatcatatggaggtgctgcgggaactgtgcgaggagctgccttcccaaaagtctcaacaagaagtcaagcgcctgctcaaggactacgaacagaaaatagaacgactcctgaaatgcgcctccgaaatccacatgactttgcagcctacagctggcggtaccagtaaaaatgagggtacgataactactagcgagaacagaggcggagaccctcatagtgaagctccatttgccaaaagcgacaaccagccctcgaccgagaaagcaatggaaccaaccatgaaattcagcttggcgtccgtactccgtcctctgcaggaagaatctataatggaaaaagactattctgcctcgattaattctctgctcgagcggtatgatacgtatagggacatcctagaacaccatttgcagaataataagtttagaattacttcggattttagctctgaggaggacaggtcctcttcttgcctccaggctaagttaacagacctccaagtgataaagaatgaaaccgacgctcggtggaaagagttcgaaattatttctttgaagctggaaaatcatgttaacgatatcaaaaagccgttcgttatcaaggaacgggacactttaaaggaaagagagagagagctgcagatgaccctaaacacccggatggaaagcctggagactgcattgaggctggtgctgcctgttgaaaaggcctctctcttgctgtgtggctcagatctgcctctgcacaaaatggccatccaaggattccaccttatagatgccgatcggatctaccagcacttacgcaatattcaggattctattgcaaaacaaatcgagatctgtaatcgcctggaagaacccgggaacttcgtgcttaaagagctgcatccattcgatctccacgccatgcagaatatcatactcaagtacaaaacccaatttgaagggatgaatcatagagtacagcgctctgaagatacccttaaagcacttgaagacttcctggcctctctaagaactgctaagctgtccgctgagccagtcaccgacctttcggcttcagacacccaggtggcccaggagaacaccctgaccgtgaaaaataaggagggtgagattcaccttatgaaagacaaggctaagcacttggacaaatgcctcaagatgctagacatgtctttcaaggacgctgagcggggggacgacacctcttgtgagaatctgcttgacgctttcagcattaagctatccgagactcacggctatggagtgcaggaggaattcactgaggagaataagttgcttgaggcgtgcatctttaagaataatgaactgcttaagaacatccaagatgtgcagagccagatttccaaaatcggcctgaaggacccaaccgtgccagccgtgaagcaccgtaaaaaatcactaatacgcctcgacaaggtgctggatgagtatgaggaggagaagaggcacctgcaggagatggctaatagtctgccacatttcaaagacgggcgggagaaaactgtgaatcagcagtgtcagaacactgtggttttgtgggagaataccaaggcattggtcacagaatgcctggaacagtgtggacgcgtgctggaactgctgaaacagtatcagaactttaagtctatactgactacattgatccagaaggaagagtctgtgatcagtctacaggcctcatacatgggaaaagaaaacttgaaaaagcgaatcgccgagattgaaatcgtcaaggaggaatttaatgagcacctggaggtggtcgataagattaaccaggtttgtaaaaacctccaattctatttaaataagatgaagacgttcgaggagcccccatttgaaaaagaagcgaacatcattgtcgacaggtggctcgatatcaacgaaaagaccgaagactactacgagaacctggggagggcgttggcactttgggacaagctgttcaacttaaagaacgttatcgatgaatggaccgagaaggccctccagaaaatggagctccatcaactaactgaggaggatcgggaaaggcttaaagaagagctgcaggtccatgagcagaaaacctctgaattctcccggcgggtcgccgagattcaattcctgttgcagagtagtgaaattccgctggagctgcaggtgatggagtcctccatcttgaacaaaatggaacacgtgcagaaatgcctgactggagagtcgaactgtcatgccctcagcgggtcaaccgccgaactgcgagaagacttggaccaggccaagacccagatcggaatgaccgagagcctccttaaggctctatcccctagtgatagtctggaaattttcactaagctggaagaaatacagcagcagatcctacagcagaagcactctatgatcctcctcgagaaccagatcggctgcctcacacccgaattgtcagaactgaagaagcaatatgagagcgtatcagatctgtttaacacaaagaagtctgttctccaggatcatttttctaagctgctcaatgaccagtgtaagaacttcaacgattggttttcgaatataaaagtgaacctgaaggagtgcttcgagagttcagaaacaaagaaatctgtagaacagaagctgcagaagctgtctgactttctaacccttgaaggtagaaattcaaagatcaagcaagtcgactcggtactgaaacacgtcaagaaacacttaccaaaagcccatgtgaaggagctgatttcctggctggtcggacaggaattcgaactcgagaagatggaatctatttgccaagccagagcaaaggagctggaagactctttgcaacagctgctgagattacaggatgatcacagaaacctgcggaaatggctaacaaaccaggaggaaaagtggaaaggcatggaagagcccggcgaaaagacagagctcttttgtcaagctctggcccgaaagcgagagcagttcgagtccgttgctcagctgaataactcattaaaggaatatggattcaccgaggaggaagagatcatcatggaagccacgtgcctaatggaccggtatcagaccctgttgaggcagctctcagagatcgaagaagaagataagctgctccccactgaggatcagagcttcaacgacctagcacacgacgtgatccattggattaaggagataaaggagagcttgatggtgttgaacagtagtgaaggcaagatgccccttgaagaacgcatccagaaaattaaggagatcattctcctcaaacccgagggtgacgccagaatcgagaccatcatgaagcaggccgagagtagcgaagcaccactggtccaaaagacgcttaccgacatctcaaaccagtgggacaacactctgcatctagctagcacctatttaagtcaccaagagaagctactgctggaaggagagaagtacttacagtctaaggaggacctccgcctcatgttgattgaattgaaaaagaagcaggaggctgggtttgccctacagcacggattgcaggaaaagaaggcccagctgaagatctataagaagttcctgaaaaaagcgcaagatctgactagtttgcttaaagagctgaagtcacaggggaattatcttctggaatgtaccaagaatccgtcattcagtgaagagccctggttggaaatcaagcacctccatgagtccctactgcagcagctgcaggatagcgttcagaacctggacggtcatgtgcgtgagcacgattcttaccaggtgtgcgtgacggatcttaataccactttggacaatttttctaaagagttcgtatctttctctgacaagcctgtagatcagatcgctgtggaggaaaaactgcagaagttgcaggaattggaaaacaggctgtctcttcaggacggcacgctgaagaaaattcttgcgctggccaagtcagtcaagcagaatacaagcagcgtgggccagaagatcataaaagacgatataaagtcactgcaatgcaagcagaaagacctggagaatagactcgcaagcgccaagcaggaaatggaatgttgtttgaatagtatcctcaaaagtaagcggagtacggaaaagaagggaaagttcacgcttccaggcagagagaaacaagccacctctgacgtccaggagagcacccaagaatctgcagctgtcgaaaaactggaggaggactgggaaataaataaagatagtgcagtagaaatggcaatgtcgaagcagttatcactcaacgcgcaggaatcaatgaagaataccgaagatgagagaaaggtcaacgagttgcaaaaccagcccctcgagcttgacacgatgttgagaaacgaacagttggaagaaatcgaaaagctgtacactcagcttgaggccaagaaagcagccatcaaaccattggagcagacagagtgcctcaacaagactgagaccggggctctggtgctgcacaacattggttattccgcacagcacttagataacctattgcaggctctgattacactcaagaaaaataaagagtcacagtactgcgtgctgcgcgacttccaggagtatctggctgccgtcgaatcctctatgaaggccttgctcacggacaaggaaagcctaaaagtaggccctttggactctgtaacttatctggacaaaattaagaagtttatagcgtcaatagaaaaggagaaggactctttggggaatctgaagattaagtgggagaacctgtccaatcacgtgactgatatggacaagaaattacttgagtcccaaattaaacagctggaacacggatgggagcaggttgagcagcagattcagaagaagtattcacagcaagttgttgaatatgatgaatttactaccctcatgaacaaggtgcaagatacggagatttccttgcagcagcagcagcagcatcttcagctgcgactgaagagcccggaagagagagcaggcaatcagtccatgatagccctgacaaccgacctacaggctacaaaacacggattcagcgtcttgaagggacaggcggagctccagatgaagcgcatttggggggagaaggaaaagaagaacctagaagacggaatcaataatctcaaaaagcagtgggagaccctcgagccactccatttggaggccgagaatcagattaagaagtgtgatattagaaacaaaatgaaggaaaccatcctgtgggccaaaaatttgctcggagaattaaacccttccattccattgcttccggatgatatcctctctcaaatcaggaaatgtaaagttactcatgacggcattctggctaggcagcagagcgtggaaagcctggctgaggaggtgaaggacaaggtcccctccctcacaacatatgagggcagcgacctcaacaacaccctggaggatctcagaaaccaataccaaatgctcgtgctcaaatcaactcagcgcagtcagcagttagaattcaaactagaagagcgcagtaatttcttcgctatcattcggaagttccagctgatggtgcaagaatcagaaactctcattattcctcgcgttgagaccgcagctacagaagcggagctgaagcaccaccatgtcaccctggaagcctcccaaaaggagctgcaggagatcgactctggcattagcacgcacctgcaagagctcacaaacatatatgaagaacttaacgtgttcgagagactttttctcgaagaccagcttaaaaacttgaagattcggaccaacagaatccagagatttattcagaacacctgcaacgaggtggaacacaagattaagttctgcagacagtttcatgagaaaacatcagctctacaagaggaggctgatagcatccaaagaaacgaactgttactcaaccaagaggtgaataagggcgtgaaggaggaaatctacaacctgaaagatcgcctcaccgccattaaatgttgcattcttcaggttctgaagctgaagaaggtctttgactatatcgggcttaattgggacttttcacaactggaccagttacagacccaggtgttcgagaaggaaaaggaactcgaagaaaagataaagcagcttgatacttttgaggaggaacacggtaagtatcaggccttactgtcaaagatgcgtgccattgacttgcaaatcaagaagatgactgaggtggtcctgaaggcacctgactcaagccccgagagcagaagactgaacgcccaaattctgagccagcgcatagagaaagctaagtgcctgtgtgacgagatcattaaaaagcttaatgagaacaagactttcgacgactcgtttaaagagaaagaaatcctacagatcaaattgaacgcagaagaaaatgataagctgtacaaggtgctccagaatatggtgctcgagctttcgcccaaagagttagacgaaaagaattgccaagacaaactcgaaacgtctctgcacgtgctgaatcagataaagagccagctgcagcagcctctacttatcaacctggaaattaaacacattcagaatgagaaggacaactgtgaagcatttcaggagcaagtgtgggcagagatgtgctcaattaaagccgtgacagccatagagaagcagcgggaggaaaattcatctgaggccagtgatgtggaaaccaagctccgggagtttgaggatcttcaaatgcagcttaatactagcattgatctccggacaaacgtcctgaacgatgcttatgagaatcttacccgctacaaagaggccgttacccgggccgttgaaagtattacatccctggaggccattatcatcccatatagggtggacgtgggaaatccggaggagagcctggaaatgcctctgaggaaacaagaagaactggagagcactgtggcccacattcaagacctgacggaaaaactgggcatgatttcctctcccgaggctaagctgcagctacagtatacccttcaggaattggtgagtaagaattctgcgatgaaagaagcattcaaagcccaggaaaccgaggcggaacgctatttggagaattacaaatgctatagaaagatggaggaagatatatatactaacctgtccaaaatggaaacagtgctgggtcagagtatgtcgtcactccccttgagttaccgcgaagcgcttgaacgcctggaacaatcaaaagcccttgtgtcaaatctgatttccaccaaggaagaactgatgaagctcagacagattctgcgattactgcggctgaggtgcactgagaatgatggcatttgcctacttaagatcgtctctgccctgtgggagaaatggctgtccctgttagaagccgcgaaagaatgggagatgtggtgtgaggagttgaagcaggaatggaagttcgtgtcagaagaaatagagcgtgaagccattattctcgacaatttacaggaggaactgcccgagatcagcaaaactaaggaagccgcaacaacggaggagctatccgagctgttggattgcctgtgccagtacggggagaatgttgaaaagcagcagctcctgctcaccttgctgcttcagcgcattcgcagcatccaaaacgtgcctgagtcctctggcgccgtggaaacagtgccagccttccaggagattacttctatgaaagaacgttgtaacaagcttttacagaaagtgcagaagaataaggagctggtccagacagagatccaggaacgccattctttcaccaaggagatcattgccctcaaaaacttttttcagcaaacaactacatcatttcagaacatggcttttcaagaccaccctgaaaagtccgagcagttcgaggaactgcagtcaatcctcaagaaagggaagctgacctttgaaaacataatggagaagctcagaattaaatactccgagatgtacacaattgtacctgccgaaattgaaagccaagtcgaggaatgcaggaaggccctcgaggatatcgatgagaaaatcagcaacgaagtgcttaagtccagcccaagttacgctatgcggcggaagattgaggaaattaacaatggacttcacaatgtagagaaaatgctccaacagaagtcgaagaatattgagaaggctcaggaaattcagaaaaaaatgtgggacgaactcgatctgtggcattccaaactgaatgagctggattctgaagtccaagacatcgtggaacaggaccccggacaggcccaagaatggatggataatctcatgatacccttccaacaataccagcaggtgagccagcgtgccgaatgtcggaccagtcaacttaataaggctacagttaagatggaagagtattctgatttactgaagtccactgaggcttggatagagaatacctcccacctcttggcgaatccagcagattacgactctctgcgaacactttcccatcatgcgtcgaccgtccagatggcccttgaagactcggagcagaaacataatctgctgcattccatatttatggatctggaagaccttagtatcatctttgagacggatgagctgacgcaatctattcaggagcttagtaaccaagtcaccgctctccagcagaaaattatggaatccctgcctcagatccaacgcatggcagacgacgtggttgctattgaatcagaggtcaagtcaatggagaagagggtgtctaaaattaagaccatcctactatccaaggagattttcgatttctcacccgaagagcacttaaaacatggggaggtgatccttgaaaatatccggcctatgaagaaaactatagcggagattgtgagctatcaggttgaactgcggcttcctcagacaggcatgaagccattacccgtgttccagcggacaaaccagcttctgcaggacattaagctacttgagaacgtcacccaggaacagaatgagctcctaaaggtggtgatcaagcagacgaacgagtgggacgaagagatagaaaatttgaagcagatcctgaacaactactctgctcaattcagtctagagcacatgtctccagaccaagcggacaagttgcctcagctgcaaggggaaattgaacgcatggagaagcagattctgagccttaatcagcggaaggaggacctgcttgtggacttaaaagctacagtgttaaatttgcaccaacatctcaagcaggaacaggagggagtcgaaagggatcgactgcccgccgtgacctcagaggaaggtggtgtggccgagcgagacgcctccgaacgcaagctgaatcgaaggggcagtatgagttacttggccgctgttgaagaagaagtagaagaatcaagcgttaagtccgacaacggggatgagaaggccgagccttctccccaatcctggtcgagtctctggaagcatgataaggatatggaagaggatcgcgcttcaagctctagcggtaccattgttcaggaagcctatgggaagatctccaccagcgacaattctatggcccagatcctcacgcctgacagcctcaatacagagcaggggcctgaatgtagtctgcggcccaaccagactgaggaagggacgactcctccaatagaggcagacaccttggattcttcagatgctcaggggggccttgagccccgagtggaaaaaactcgcccagaacccaccgaggtactccatgcctgcaagactcaggtggccgagttggaattatggctccagcaggcaaatgtggcagtggaacctgagacgttgaacgcagatatgcagcaagtactagaacaacaactggtcgggtgtcaggctatgctgacggaaatcgaacacaaggttgccttcttgctcgagacctgcaaggaccaagggctgggggacaacggcgccacacagcacgaagcagaggccttaagcctgaaactcaaaaccgtcaagtgcaacttggagaaggtgcagatgatgctccaagaaaaacactccgaggatcagcatcccaccatcctcaaaaaatcttcagaaccggagcaccaggaggcccttcagcccgtcaatctgtccgagctcgagtctatagtgactgagcgcccgcagtttagccgtcaaaaggatttccagcagcagcaagtattagaactcaagccaatggagcaaaaggatttcatcaagtttattgagtttaacgcaaaaaagatgtggccacagtactgtcagcacgacaacgacacaacgcaggaaagctccgcttccaaccaggccagctccccagaaaatgatgtgcctgattcgatcctgagtcctcagggccagaacggggacaagtggcagtacctgcaccatgagctctccagtaaaattaagctgcctctgccgcagctggtggagccacaggtgagcactaatatgggcatacttcccagtgtgaccatgtataactttagatatccgactacagaggaactgaagacttacactacacaactcgaggatctgcgccaggaggcatctaatttacagacacaagagaacatgaccgaggaagcctacatcaatttggacaagaaactcttcgagctcttcctcacattgagtcaatgtctgtcgagcgttgaggagatgctggagatgccaaggttatatcgggaggatgggtccggacaacaagtccactatgagactctcgccttggaattgaaaaaactgtatctggccctcagtgacaagaaaggtgaccttttgaaggccatgacctggcccggcgagaacactaacctcctgctcgaatgttttgacaatctgcaagtctgcctggagcatacacaggcagctgccgtgtgccgttcgaagagcctgaaagctggattggactataataggagctaccagaacgaaatcaagaggctgtatcatcagctcatcaaatctaagaccagtttacagcagagcctgaatgaaataagtggccagagcgtggctgagcagttacagaaagccgatgcctatacagtagagctagagaatgctgagagcagggtcgcaaagctcagagacgaaggcgagagactgcatttgccctacgctctcctgcaggaggtgtacaaattagaagacgtcctggatagtatgtgggggatgcttcgcgccagatacaccgaactgtccagtccattcgtgacggaatcccagcaggatgcactgctgcagggcatggtggaactggtaaagatcgggaaggaaaagctggcccatggccatctcaaacagacaaaatctaaggtcgcactgcaggcgcagatcgaaaatcataaagtcttctttcagaagcttgtggctgatatgttgcttattcaggcgtactctgccaagattctgccttcccttcttcagaatcgggagaccttctgggctgaacaagtgaccgaagtgaaaatcctcgaggaaaaatctaggcagtgcggcatgaagttacagtcgctgttacagaaatgggaggaattcgacgaaaattatgcaagtttggaaaaagacctggagatcttaatatctactctcccctctgtatctttagtggaggagacagaggaaaggctcgtggaaagaatttctttttaccaacagattaagcggaacattggcggaaagcatgcaaggctgtatcagacactgaatgagggcaaacaactcgtggcctccgtttcttgtcctgagcttgagggccagatagcaaaactcgaggagcagtggctgtcccttaataaaaaaatcgatcatgagttgcacaggctccaggcattgctgaagcacctgttaagctataaccgagacagtgaccagctaaccaaatggctggaatctagccaacataccctgaactattggaaagaacaatctttaaacgtgagccaggacctcgacacaatacgctccaatattaataatttttttgagttttctaaggaagtagacgagaagtcttccctgaaaactgccgtgatctctattggcaaccagctgctccacttgaaagaaactgataccgctacactgagagcctcacttgcccagtttgagcagaagtggactatgctgatcactcaactccccgacattcaggagaagctccatcagctgcagatggagaaactgccctcacggaaggcaatcacagagatgatttcgtggatgaataacgtggaacatcagacttccgacgaggattcagtgcatagcccctcttcggcttcccaggtaaaacatttactgcagaagcacaaagagtttcgtatggaaatggactataaacagtggattgtggacttcgtaaaccagagcctgttacaactgtctacttgtgatgtcgaatccaagcggtacgagcgaaccgagtttgctgagcacctcggcgaaatgaacaggcagtggcaccgggtccacggtatgctgaatcggaaaatccaacacttggaacagcttctggagtcgatcaccgaaagcgaaaacaaaatacagatccttaataactggctcgaggcacaagaagaacggctaaaaacgctccagaagcccgagtctgttatctccgtccagaaactgcttcttgactgtcaggatattgaaaaccagctggccatcaagtcaaaagctctggacgaactgaaacagtcttacttgacactggaaagcggggcggtgcctctcctggaggacactgcaagtcggatagatgagcttttccagaagcgttcctccgtgttgacgcaagtgaatcagctcaagaccagtatgcaaagcgtcctgcaggagtggaaaatctatgatcagctgtacgatgaggtaaatatgatgactatccgcttctggtactgcatggagcacagcaagcctgtcgtactgagcctggaaacccttcgctgccaggtggagaacctccagagtttgcaagacgaggctgagtcctcagaaggaagctgggaaaaactccaggaagtgattgggaagctcaaaggtttgtgtccctccgttgccgagataatcgaggagaagtgccagaacactcataagagatggactcaggtgaaccaggcgatcgcagaccagttgcagaaggcccagagcctgttgcagctgtggaaagcatactccaatgcccatggcgaggctgcagcccgcttaaaacagcaagaggccaagtttcagcagttggccaacatctctatgagtgggaataatctggccgagattttgccccctgccttgcaggacattaaagaactacaacacgatgtgcagaagactaaggaagcatttctccagaacagttcggtgctcgataggctccctcagcctgctgaaagctctacgcatatgttactccctgggcccctacactcgctccagagagcagcgtaccttgaaaaaatgctcttggtgaaggcaaatgagttcgaattcgtgctatcccagttcaaggatttcggagttaggcttgaatcattgaagggcttaataatgcacgaagaagagaacctggaccgactccatcagcaggagaaggagaatccagattcttttttaaaccacgtgctggccctgacagcccagagccctgacattgagcacttgaacgaggtgagtctgaaactacctttgtccgatgtggccgtaaagacacttcaaaatatgaatcggcagtggatcagagccaccgccacagccctcgagcgatgctctgaactgcaggggataggcctgaatgagaaatttctatactgctgcgaaaaatggattcagttgttagagaagatcgaggaggcactcaaagtggacgttgctaatagtctccctgagctgttagaacagcagaagacatataaaatgctggaggccgaggtgtctatcaaccagacaattgctgacagctacgtgacccagagtctgcagttgctggacacgacagaaattgagaatcgaccggagtttattactgaattctcgaaattgactgatcgctggcaaaatgctgtgcaaggagtccggcaaagaaagggcgatgtcgacgggctggtcagacagtggcaagactttaccacatcggtggagaatctgttccgctttttaacagacacttcccacctgctgtcagccgtgaaaggtcaagaacggttttctctttatcagacgaggtctctcattcacgagttaaaaaacaaagaaatacactttcagcgccgaaggacaacttgtgccctcaccctcgaagccggggaaaaactgttactcactaccgaccttaaaacaaaggaatccgtgggaaggagaatttcgcaactgcaggattcctggaaggacatggagccccagttggccgagatgatcaagcaatttcaaagcaccgttgaaacatgggatcagtgcgagaaaaagattaaagagcttaagtctagactgcaagttctcaaagcccagagcgaagatccgctgccggagctccatgaagacctgcataatgaaaaggaactcatcaaagaactggaacagtcgttggcatcctggacccagaacctcaaggagctgcaaaccatgaaggcggaccttacgaggcacgttcttgtggaggatgtaatggtgctgaaggagcagatcgagcacctccatcggcagtgggaagatctgtgtttgcgggtggccatacgcaaacaggagattgaggataggctgaatacatgggtggtgtttaacgaaaagaacaaagagctatgcgcatggctggtgcagatggagaacaaagtgcttcagactgctgatatttctatagaggaaatgatcgagaaactgcaaaaagattgcatggaggagatcaacttgttctctgaaaataaactgcagctcaagcaaatgggggaccagctcattaaggcatctaacaaatccagggccgccgagatcgatgataaactcaataaaatcaacgacagatggcagcatctctttgacgtgataggaagtcgcgtcaagaagttgaaagagactttcgccttcattcaacaactggacaaaaatatgtccaacctgagaacctggctagcccggatagagtctgaattgtccaagcctgtggtttatgacgtctgcgatgaccaggagatccagaagagactggctgaacagcaggatctgcagcgtgatatcgaacagcactctgcgggcgtggagtcagtgtttaatatttgcgatgtccttctacacgattctgatgcgtgtgccaacgagacagaatgcgactctattcagcagacaacacgttctctcgatcgaaggtggagaaacatatgtgctatgtccatggaaagacgcatgaagatcgaggagacttggagattgtggcagaaatttttggatgactattccagatttgaggattggctaaagtcagctgaacgtaccgcagcttgtccaaactcctccgaagttttgtacacttcagccaaagaagagctgaagagattcgaggcctttcagaggcagattcacgagcggctgactcagctggaactgatcaacaagcaataccgcaggttagcccgcgagaatcggacagataccgcctcccgcctgaaacagatggtccatgaagggaaccaacgctgggacaatctgcagcgccgagtgacggctgtactaaggaggctgagacatttcaccaatcagagagaggaatttgagggaactagggaaagtatactggtttggctgaccgaaatggatctacagttaactaatgtcgaacacttttctgaatctgatgccgacgacaagatgaggcaattgaacggatttcagcaagagattaccttgaacacgaataaaatcgaccagctgatcgtcttcggcgaacaactgatacagaagtccgagcccctggacgccgtgctgatcgaagacgagctcgaagagctccaccggtattgccaagaggtgttcggccgcgttagtcggttccacagacgactcacctcatgtactccaggcctcgaggatgaaaaggaggcgtccgaaaatgagaccgacatggaagatccacgggagatacaaaccgactcatggagaaaacggggcgagtcggaagaaccatcgtcaccccagtccctatgccatctggttgctccaggccatgagagaagtggttgtgaaacgcccgtaagcgtggactccattcctctcgaatgggatcataccggcgacgtgggtgggagttcaagccatgaagaggacgaggagggaccctattacagcgcactgtcagacgttgaaataccagaaaacccagaggcctacctaaagatgactaccaaaacacttaaagcgtcttccggcaaaagcattagcgatgggcactcgtggcatgtcccggacagcccatcctgcccagaacaccattacaagcagatggagggagacaggaatgtccctccagtgccgcccgcatcttccacaccatacaagcctccatatggaaagctgctgcttccacccggaacagacggagggaaggaagggcctagggtgctcaacggaaacccgcagcaggaagacgggggcctggcagggatcactgaacagcagtccggcgcctttgacagatgggaaatgatccaggcccaggagctgcataacaaactaaagattaagcagaacctacagcagcttaattcagacatatctgctataaccacatggctcaagaagaccgaggcagaactggaaatgctaaagatggcaaagcctcccagtgatatccaggaaatcgaactcagagtcaagcggctgcaggagattttaaaggccttcgatacctacaaagctcttgtggtctccgttaacgtgagcagtaaagagtttctgcagacggagagtcccgaaagcactgaactgcagtccaggttgaggcagctctccctgttgtgggaggccgcccaaggcgcagtagattcgtggagaggcggactgaggcagagcctaatgcagtgccaagactttcatcagctctcacaaaatctgctcctctggctggcttcggccaagaacaggagacaaaaagcacacgtgacagatcctaaagccgatccaagagcccttcttgagtgtagaagagagctcatgcagctggagaaagagctggtagaacgacagcctcaggttgatatgctccaggagatcagtaattccctgctgatcaagggtcacggcgaggattgcatcgaagcagaggagaaggttcacgtgatcgagaagaagttgaaacagctgcgcgagcaggtgagccaggatttgatggcacttcagggcacacagaaccctgcctctcctctgccctccttcgatgaagttgactcaggagaccagccgccagccacatctgtccctgcaccacgggccaaattcagggcagttaggaccacggagggcgaggaagagacagagtctcgggttccaggatctacacgaccccagaggtcgttcctctccagagtggtgagagcggctctgcccttacagctcttgctcctgcttttactgctactggcttgcctgctgccatcttcagaagaggactatagttgcacccaggcaaacaattttgcacgaagcttctacccaatgctacgatacaccaatggccctccgccgacctag

SEQ ID NO: 257204 - DNA, 10626 bp, Artificial Sequence
  derived and/or modified sequence
atggaagaagatatttatactaacctttcaaagatggagacagtgctgggccagtctatgagtagtttgccattgtcataccgggaggcactcgaacgcctcgagcagtctaaagctttagtgagcaacctgatcagcaccaaggaggagctgatgaagctgcgacagattctgaggctgctgcgcctgcgttgtaccgaaaatgatgggatctgtctactgaagatcgtatctgccctctgggagaagtggttgagcctcctagaggccgccaaagaatgggagatgtggtgcgaagagctgaagcaggaatggaaattcgtttccgaggagattgagcgtgaggctatcattctggacaatttgcaggaggagctgcccgagatctctaagacgaaggaggccgccactacagaggagctatcggagctgctggactgcctctgtcaatacggtgagaacgtagaaaagcaacagctgctgctgaccttgctgctgcagcgaatccgctccattcagaacgtgccagaatccagcggagcagtggagacagtcccggcctttcaagaaatcacgagcatgaaggagaggtgcaataaactattgcagaaggtacaaaagaacaaggagcttgtgcagaccgagatccaggaaagacactcctttacaaaagagattatcgccctgaagaatttcttccagcagaccactacatccttccagaacatggcattccaagaccaccccgagaagtctgagcagtttgaggaactccagtctattctgaaaaaaggcaaactaaccttcgaaaatatcatggagaaactccggatcaagtattcagaaatgtacacaatcgtgcctgcagaaattgagtcacaggtcgaagagtgcaggaaagccctggaagacatagatgagaaaatctcaaatgaggtcttaaagagtagcccttcttatgctatgcggagaaaaatcgaggaaataaataacggcttacacaatgtggagaagatgctgcagcagaagtctaaaaacatcgagaaggctcaggaaatccagaagaaaatgtgggatgaattggacctatggcattccaagctgaatgaacttgacagtgaggtgcaggacattgttgagcaggatccagggcaggcccaggaatggatggacaatctaatgattcctttccagcagtaccaacaggtgagccaaagagctgaatgtagaacgtcgcagctgaacaaagccacagtgaagatggaggagtattccgacctgttgaaaagtacggaggcttggattgagaacacatcgcacctgctggccaacccagcggattacgacagcctgcgcactttgagtcaccacgcaagcactgtgcagatggctctggaggactctgagcagaagcacaatctgttgcacagcatctttatggatcttgaagatctctctatcatctttgagaccgacgagttaacacagtccattcaggaactgagcaaccaggtgactgcacttcagcagaagattatggagtctctgccccaaatccagcggatggcggacgacgtggtggctattgaatcagaagtaaagtctatggaaaagcgcgtgagcaaaattaagaccatcctgctgagcaaagaaatatttgatttttccccagaggagcatctgaaacacggggaggtcatcctagagaacatccgccctatgaaaaaaaccatcgcggagattgtgtcctaccaagtggaattacggctgccacagacaggcatgaaacctctaccagtcttccagcggaccaatcagcttctgcaggacatcaaactcctagagaacgttacacaagaacagaatgaactgttgaaggtagtgatcaagcagactaatgaatgggatgaggaaatcgagaatctgaagcagatacttaacaattactctgcccagttcagcctggaacatatgtcgccagaccaggctgataagctgcctcagttgcagggtgaaattgagcggatggagaaacagattctgtccctcaaccagaggaaggaagacctgctggtagacctgaaggccaccgtgctcaatctgcatcagcacctaaagcaggagcaggagggagtcgagagggataggctgcccgcagtgacttccgaggaggggggagtggccgagcgggacgcctctgaacgcaaactgaaccgccgaggaagcatgagctacttagcagcagttgaagaggaggtggaggagtcctcagtgaagtccgacaatggagacgaaaaggcggagccaagcccacagtcttggtcgtctttatggaagcacgacaaggatatggaggaagacagagcctcttcatcctctggaaccatcgtccaggaagcgtatggtaaaatatctacctccgacaacagcatggcacaaatcttgactccagactcactaaatacagagcagggacccgagtgcagtctcagacctaatcagacagaggagggcaccactcctcctatcgaagccgacacactggattcgtctgacgcgcagggagggctcgagccccgagtggagaagacccgaccagagcccaccgaggtcctgcacgcttgtaagacccaagtcgcggaactcgagctgtggttacaacaggccaacgtggctgtggagcccgaaaccctcaatgctgacatgcagcaggtgctcgaacagcagctcgtgggctgccaggccatgctgacggaaatcgaacacaaggtggcattcctcctggagacgtgtaaggaccagggactcggcgacaatggcgccacccagcatgaagccgaggctctctccctgaaactgaagacggtcaagtgtaatctcgaaaaggtgcagatgatgctccaagagaagcatagtgaagaccaacaccctaccattttaaagaagtcaagtgagcctgagcaccaagaagcattgcaaccagtgaatctatctgaactggaatccatagttaccgaaaggccccagtttagcagacaaaaagacttccaacagcagcaagtccttgaacttaaacccatggagcagaaggatttcattaagttcatcgagtttaacgctaagaaaatgtggcctcaatactgtcaacacgacaatgacaccacccaggagtccagcgcctccaaccaggcctcttcccccgaaaacgatgtgcctgactccatcttgagtcctcaagggcaaaacggggacaaatggcagtatctgcaccatgagttgtctagcaaaattaagcttcctctgccccagttggttgagcctcaggtttcgacgaatatggggatcctcccatcagttaccatgtacaacttccgatacccaactacagaggaactgaagacatacactacgcagctcgaggacctgcgacaggaagcatccaaccttcagacccaggagaacatgacagaggaagcatacatcaatctggacaagaagctctttgagcttttcctgaccctgagccagtgtctcagtagcgtcgaagaaatgctggaaatgccgaggctgtaccgtgaggacggaagcgggcaacaagttcactatgaaacattggcacttgagttgaaaaagctctatttggcccttagcgacaagaagggggatctcttgaaagctatgacctggcccggggaaaacaccaatcttttgctcgagtgtttcgataatctgcaggtgtgcttggaacacactcaggccgccgctgtctgccgttccaagagcctaaaagccgggctggactacaatcgatcctatcagaacgaaattaagagactgtaccaccagctcatcaagagtaagacctcgctgcagcaaagcttaaacgagatctccggacagagtgtggcggagcaacttcaaaaagctgatgcgtacacagttgaactcgagaatgcagagagccgtgtggcaaagctccgcgacgagggggaaaggttgcacttgccatatgccctcttacaggaggtctacaaactggaagacgtgctcgactctatgtggggaatgctccgagcacgctataccgaacttagctctccttttgtgacagagtcccaacaggacgctctcctgcagggcatggtcgaactggttaagatcggcaaagaaaagcttgcccacgggcacctgaagcaaacgaagtcaaaggtagccctccaggcacagattgagaaccataaagtattctttcagaaattggtcgccgacatgcttcttatacaggcgtattccgcaaagattttgccatcactgctccagaaccgcgagaccttctgggccgagcaagtgacggaggttaaaatccttgaggagaagtctcggcagtgtggaatgaaactccagtctttgctgcagaagtgggaagaattcgacgaaaactacgccagtctggaaaaagacctggaaattctgatctcaaccctgccctctgtgtctcttgtggaggagaccgaagagaggctggtggagcgcatttcattctatcagcagatcaaacgcaatatcggaggaaaacatgcacgcttgtatcagaccctgaacgaagggaaacaactggtagcctctgtaagctgcccagaacttgaaggccaaattgcaaaactggaggagcagtggcttagccttaataaaaaaattgaccacgagttgcataggttacaagccctactgaaacaccttctcagctacaatagagactctgatcaattgaccaagtggctggaatcttcccagcacaccctcaactattggaaagaacagagcctgaacgtatctcaggacctggatactatcagatcaaatatcaacaatttctttgagtttagcaaagaggtggacgaaaagtcaagccttaaaaccgccgtgatatccatcgggaaccagctgctccacctgaaagagaccgacaccgccaccttaagagcatctttggcacaatttgagcagaagtggaccatgctgatcacacagctgcccgatatccaggaaaaactgcaccagctgcaaatggaaaagctccccagccggaaggcgattaccgagatgatttcttggatgaacaatgtcgaacaccagacttctgacgaggactctgtccactctccttccagcgccagccaggtaaagcatcttcttcaaaagcacaaggagtttcggatggagatggactacaaacaatggatagtagacttcgttaatcagtctctgctccagttatcaacgtgtgatgtcgagtctaagagatatgagaggaccgagttcgccgagcatctcggggagatgaacaggcaatggcatagggtccacggcatgctcaacagaaagatccagcacctggagcagcttctggagtcaattaccgagtccgaaaacaagattcagattctgaacaattggctcgaggcccaagaggagagactgaaaacactgcagaagccggaaagtgtgataagcgtgcaaaaattgctcctggactgccaggatatagagaaccagttagccatcaagtccaaggcgttggatgagctgaaacagagttatctgaccctggagagcggggcagtccctcttcttgaggacactgcctccagaatcgatgagcttttccaaaagcgctccagtgttctcactcaggtgaaccagttaaaaacctccatgcagtcagtcttgcaggagtggaagatctatgatcagctctacgatgaggtaaatatgatgacaattagattttggtattgcatggagcacagcaagccagtggtactgagtttagagactctgcgctgccaggtggagaacttgcagtccctccaggatgaagccgagagttcagaaggtagctgggagaagctccaggaagttatcggaaaactaaaagggctttgcccatctgtggccgaaataattgaggaaaaatgccaaaacacccataagcggtggactcaggtgaaccaagctatcgccgaccagctccagaaggcacagagcttactgcaactgtggaaagcctacagcaacgcacacggcgaggccgctgctagattgaaacaacaggaggcaaaatttcagcagttggcgaatatttcaatgagtgggaacaatctcgctgagatccttcctcctgccttgcaagatatcaaagaattgcaacacgatgtacagaaaacaaaagaggctttcctgcagaattccagcgtactcgaccgtctgccccagccagccgagagttcgacccatatgctgctgccaggcccactgcacagtctccaacgggcagcctatctggaaaagatgcttctggttaaagcaaatgaattcgaattcgtgctgagccagttcaaggacttcggagtcagacttgaatccctaaaaggactgattatgcacgaagaagagaatctcgacagacttcaccagcaagagaaggagaacccggactcatttcttaaccacgtgttagcgctaaccgctcagtctccagatatcgagcatctcaacgaggtgtctcttaaacttcctttatcggacgtggcagtgaagacgctgcagaacatgaataggcagtggattagagccaccgcgaccgccctggagaggtgtagcgaactccagggtataggcctgaacgaaaaattcctgtattgctgtgagaagtggatccaactgctagagaagatagaggaagctctgaaagtggatgtagctaattcactgcccgagttattagaacagcagaagacctataagatgctggaggctgaagtgagcatcaatcagacaatcgccgacagctatgtgactcagtcgctgcagctgctggacaccacagagatagaaaatcgacccgaattcatcaccgagttctctaagttgactgaccggtggcagaatgcggttcaaggggtgaggcagaggaagggagatgtggatggcttggtgagacaatggcaagacttcacgacgtctgtcgagaatctcttccgcttccttaccgacacctctcatctgcttagcgcagtgaagggtcaagagaggtttagcctgtatcagacccgatcactcatccacgaattaaaaaacaaagagatccatttccagagacgaagaactacatgtgccctgacccttgaagccggagagaagttacttttgactacagacttgaagacaaaggaaagcgtaggacggagaatttcccagctccaggatagctggaaagacatggagcctcagctagcagaaatgatcaagcagttccagagtaccgtggaaacttgggatcagtgtgagaagaaaattaaagaacttaaatcacgcctgcaagtgcttaaagcccagtccgaggatcccctgccagaacttcacgaggacctacataacgaaaaggaactgattaaggaactggaacagtccctggccagctggacacagaatttaaaggaacttcagaccatgaaggccgatctgactcgccacgtcttagtcgaggacgtcatggtactgaaagagcaaatagaacatctgcatagacaatgggaggacctgtgtctacgagtggccatacggaagcaagaaattgaagaccggctgaacacttgggtggttttcaatgagaagaataaggaactgtgcgcttggctggtgcagatggagaataaggtccttcagacagcagacatatctatcgaggagatgattgagaaactccagaaggactgtatggaggaaatcaatttattctctgaaaataagctgcagcttaaacagatgggggaccaactcattaaggcttcgaataagtccagggcggcggagatcgatgataaactgaataagatcaatgaccgttggcagcacttgtttgacgtgatcgggtcaagagttaaaaaactcaaagagactttcgcattcatccagcagctggacaagaacatgtcgaacttgagaacctggctcgcacggatcgagagtgagctgtcaaagccagtggtgtacgacgtctgcgacgatcaggaaattcagaagagactggcggagcaacaggatttacaaagagatattgaacagcactccgccggagtagagagcgtgtttaacatctgtgatgtccttctgcacgatagtgatgcttgtgcaaacgaaaccgaatgtgactccatccaacagactacaagaagcctcgaccgacggtggaggaatatatgtgctatgtctatggagcgccgaatgaagatcgaagagacctggcgcctctggcaaaagttcctggacgattactctcggttcgaagattggttaaagtctgccgagcgaaccgctgcttgcccaaactcaagtgaagttctgtacacctccgccaaggaggaattgaagagattcgaggcttttcagcgccaaatccacgaacgactgactcagttggagctgataaacaagcagtacagacgcttagcacgggaaaatcgcactgatactgcgagtcgcctgaaacaaatggttcatgagggcaatcaacgctgggacaacctccaaagaagggtgaccgctgtacttcgtcgcttgaggcactttaccaaccagcgggaagagtttgaaggaactcgagagtcaatcctagtgtggcttaccgaaatggacctgcagttgactaacgtggagcacttcagtgagtccgacgccgatgacaaaatgagacagctcaatggtttccagcaggaaataaccttgaacactaataagattgatcagctgattgttttcggcgagcagcttatccaaaagtccgagccgttggatgccgttcttatcgaagacgaacttgaagagctccacaggtactgtcaagaggttttcggacgcgtctcccgttttcacagacggctaaccagttgtacaccaggcctggaagacgagaaagaggcctctgaaaatgagaccgacatggaggacccgagagagattcagactgacagctggaggaagagaggggagagcgaagagccttcaagtcctcaatcactgtgtcacttagtcgctccaggacacgagaggtccggttgtgagaccccagtgagcgttgattcaattcctctcgaatgggatcacaccggcgatgtagggggcagcagctctcacgaagaggatgaagagggaccatattactcagccttgtccgacgtcgaaataccggagaaccccgaggcctacctgaagatgactacaaagaccctgaaggcttcatccgggaagagcattagcgatggccactcatggcatgtccctgatagtccgtcctgccctgagcaccactacaaacagatggaaggagaccgcaatgtacccccggtcccgccagcatcgtcaacaccttacaagccgccatatggaaaattgcttttacccccaggtacggacggagggaaagagggccctcgggttttaaatggcaaccctcagcaggaagacggtggccttgccggcattaccgaacagcaaagtggggcattcgacagatgggagatgatccaggcgcaggagctacataacaagttgaaaattaaacagaatctgcagcagctaaactccgacatctccgcaatcacaacttggctaaaaaagaccgaagcggagctcgaaatgcttaaaatggcgaaacccccgtccgacatccaggagatcgagctgcgggttaaacgcctccaggaaatactcaaggcatttgatacctacaaggcattagtggtctccgttaatgtgtcctccaaagaatttctacagacggagagcccagaaagcacagagcttcagtcccggttgcgccaacttagtcttctgtgggaagctgcccaaggtgccgtcgatagttggagaggtgggcttagacagtccttgatgcagtgtcaggacttccatcaactgtcgcagaatttgttattatggctggcatcggcgaaaaataggcgccaaaaggcgcatgtaaccgatccaaaagctgatcctagagcactgctggagtgtaggcgcgaactgatgcagctcgagaaggagctcgtcgagcggcagccgcaagtagacatgctacaggagatctctaatagtctgctgatcaagggccacggcgaggactgcatcgaggccgaggagaaggtgcacgtcattgagaagaagctgaagcagttgagggagcaggtatcacaagatttaatggccctgcaggggactcagaaccccgccagtcctctgccctcctttgatgaagtcgatagcggcgatcagcctccagccacaagtgtacctgcccccagggctaagtttcgcgccgtcaggacaactgagggagaagaagaaacagagtcccgcgtcccagggagcacaaggccacagcgtagcttcctgagtagagttgtgcgagccgcactccccttgcagctcctcctattgctcctcctcctgctagcctgcctcttgcctagttcggaagaggattacagctgcacacaagccaacaactttgcccgctcattttatccaatgctgcgctataccaatggacccccaccaacgtag

SEQ ID NO: 257205 - DNA, 20724 bp, Artificial Sequence
  derived and/or modified sequence
atggccagcagccctgagctgcccacagaagatgagcagggctcctggggcattgatgacctgcacatcagcctgcaggccgagcaggaggacacccagaagaaggccttcacctgctggatcaacagccagctggcccggcacaccagccccagcgtcatcagtgacctcttcacagacatcaagaagggccacgtgctgctggacctgctggaggtgctgagcggccagcagctgccccgggacaagggcagcaacaccttccagtgccgcatcaacatcgagcacgccctgaccttcctgaggaacagaagcatcaagctgatcaacatccacgtgacagacatcattgatggcaaccccagcatcatcctgggcctcatctggaccatcatcctgcacttccacatcgagaagctggcccagaccctgagctgcaactacaaccagcccagcctggatgatgtgtctgtggtggacagcagccctgccagcagccccccagccaagaagtgcagcaaggtgcaggcccgctggcagatgtctgccaggaaggccctgctgctgtgggcccaggagcagtgtgccacctatgagagcgtgaatgtgacagacttcaagagctcctggagaaatggcatggccttcctggccatcatccacgccctgcggccagacctgattgacatgaagtctgtgaagcacaggagcaacaaggacaacctgcgggaggccttcagaattgctgagcaggagctgaagatcccccggctgctggagccagaagatgtggatgtggtggaccctgatgagaagagcatcatgacctacgtggcccagttcctgcagtacagcaaggatgcccctggcactggagaggaggcccagggcaaggtgaaggatgccatgggctggctgaccctgcagaaggagaagctgcagaagctgctgaaggacagtgaaaatgacacctacttcaagaagtacaacagcctgctgtccttcatggagagcttcaatgaggagaagaagagcttcctggatgtgctgagcatcaagagggacctggatgagctggacaaggaccacctgcagctgcgggaggcctgggatggcctggaccaccagatcaatgcctggaagatcaagctgaactatgccctgcccccacccctgcaccagacagaggcctggctgcaggaggtggaggagctgatggatgaggacctgagcgccagccaggaccacagccaggccgtgaccctcatccaggagaagatgaccctcttcaagagcctgatggacagatttgagcaccacagcaacatcctgctgacctttgagaacaaggatgagaaccacctgcccctggtgccccccaacaagctggaggagatgaagaggcgcatcaacaacatcctggagaagaagttcatcctgctgctggagttccactactacaagtgcctggtgctgggcctggtggatgaggtgaagagcaagctggacatctggaacatcaagtatggcagccgggagagcgtggagctgctgctggaggactggcacaagttcatcgaggagaaggagttcctggcccggctggacaccagcttccagaagtgtggggagatctacaagaacctggccggggagtgccagaacatcaacaagcagtacatgatggtgaagagtgatgtgtgcatgtacaggaagaacatctacaacgtgaagagcaccctgcagaaggtgctggcctgctgggccacctacgtggagaacctgcggctgctgcgggcctgctttgaggagaccaagaaggaggagatcaaggaggtgccctttgagaccctggcccagtggaacctggagcacgccaccctgaatgaagctggcaacttcctggtggaggtgtccaatgatgtggtgggcagcagcatcagcaaggagctgcggcggctgaacaagcgctggaggaagctggtgtccaagacccagctggagatgaacctgcccctgatgatcaagaagcaggaccagcccacctttgacaacagcggcaacatcctgagcaaggaggagaaggccaccgtggagttcagcacagacatgtctgtggagctgcctgagaactacaaccagaacatcaaggccggggagaagcatgagaaggaaaatgaggagttcaccggccagctgaaggtggccaaggatgtggagaagctgattggccaggtggagatctgggaggccgaggccaagtctgtgctggaccaggatgatgtggacacctccatggaggagagcctgaagcacctgattgccaagggctccatgtttgatgagctgatggcccggtctgaggacatgctgcagatggacatccagaacatcagcagccaggagagcttccagcacgtgctgaccaccggcctgcaggccaagatccaggaggccaaggagaaggtgcagatcaacgtggtgaagctgattgctgccctgaagaacctgacagatgtgtccccagacctggacatccggctgaagatggaggagagccagaaggagctggagagctacatgatgagggcccagcagctgctgggccagcgggagagccctggagagctgatcagcaagcacaaggaggccctgatcatcagcaacaccaagagcctggccaagtacctgaaggctgtggaggagctgaagaacaacgtgacagaggacatcaagatgagcctggaggagaagagcagagatgtgtgtgccaagtgggagagcctgcaccacgagctgagcctgtatgtgcagcagctgaagattgacatcgagaagggcaagctgagtgacaacatcctgaagctggagaagcagatcaacaaggagaagaagctgatccggcggggccgcaccaagggcctcatcaaggagcacgaggcctgcttcagcgaggagggctgcctgtaccagctgaaccaccacatggaggtgctgcgggagctgtgtgaggagctgcccagccagaagagccagcaggaggtgaagaggctgctgaaggactatgagcagaagattgaaaggctgctgaagtgtgccagcgagatccacatgaccctgcagcccacagctgggggcaccagcaagaatgaaggcaccatcaccaccagcgagaacagaggaggagacccccacagcgaggccccctttgccaagagtgacaaccagcccagcacagagaaggccatggagcccaccatgaagttcagcctggcctctgtgctgcggcccctgcaggaggagagcatcatggagaaggactacagcgccagcatcaacagcctgctggagagatatgacacctacagagacatcctggagcaccacctgcagaacaacaagttccgcatcaccagtgacttcagcagtgaagaagatagaagcagcagctgcctgcaggccaagctgacagacctgcaggtgatcaagaatgaaacagatgcccgctggaaggagtttgagatcatcagcctgaagctggagaaccacgtgaatgacatcaagaagccctttgtgatcaaggagcgggacaccctgaaggagcgggagcgggagctgcagatgaccctgaacaccaggatggagagcctggagacagccctgcggctggtgctgcctgtggagaaggccagcctgctgctgtgtggcagtgacctgcccctgcacaagatggccatccagggcttccacctgattgatgctgaccgcatctaccagcacctgaggaacatccaggacagcatcgccaagcagatcgagatctgcaaccggctggaggagcccggcaactttgtgctgaaggagctgcacccctttgacctgcacgccatgcagaacatcatcctgaagtacaagacccagtttgagggcatgaaccaccgggtgcagaggtctgaggacaccctgaaggccctggaggacttcctggccagcctgaggacagccaagctgtctgctgagcctgtgacagacctgagcgccagtgacacccaggtggcccaggagaacaccctgactgtgaagaacaaggagggggagatccacctgatgaaggacaaggccaagcacctggacaagtgcctgaagatgctggacatgtccttcaaggatgctgagagaggagatgacaccagctgtgagaacctgctggatgccttcagcatcaagctgtctgagacccacggctacggcgtgcaggaggagttcacagaggagaacaagctgctggaggcctgcatcttcaagaacaatgagctgctgaagaacatccaggatgtgcagagccagatcagcaagattggcctgaaggaccccaccgtgcctgctgtgaagcacaggaagaagagcctcatccggctggacaaggtgctggatgaatatgaggaggagaagaggcacctgcaggagatggccaacagcctgccccacttcaaggatggccgggagaagacagtgaaccagcagtgccagaacacagtggtgctgtgggagaacaccaaggccctggtgacagaatgtctggagcagtgtggccgggtgctggagctgctgaagcagtaccagaacttcaagagcatcctgaccaccctcatccagaaggaggagagcgtcatcagcctgcaggccagctacatgggcaaggagaacctgaagaagagaattgctgagattgaaattgtgaaggaggagttcaatgagcacctggaggtggtggacaagatcaaccaggtgtgcaagaacctgcagttctacctgaacaagatgaagacctttgaggagcccccatttgagaaggaggccaacatcatcgtggaccgctggctggacatcaatgagaagacagaggactactatgagaacctgggccgggccctggccctgtgggacaagctgttcaacctgaagaatgtgattgatgagtggacagagaaggccctgcagaagatggagctgcaccagctgacagaagaagatcgggagcggctgaaggaggagctgcaggtgcatgagcagaagaccagcgagttcagccggcgggtggccgagatccagttcctgctgcagagcagcgagatccccctggagctgcaggtgatggagagcagcatcctgaacaagatggagcacgtgcagaagtgcctgactggagagagcaactgccacgccctgagcggcagcacagctgagctgcgggaggacctggaccaggccaagacccagatcggcatgacagagagcctgctgaaggccctgagccccagcgacagcctggagatcttcaccaagctggaggagatccagcagcagatcctgcagcagaagcacagcatgatcctgctggagaaccagatcggctgcctgaccccagagctgtctgagctgaagaagcagtatgagagcgtgtctgacctcttcaacaccaagaagtctgtgctgcaggaccacttcagcaagctgctgaatgaccagtgcaagaacttcaatgactggttcagcaacatcaaggtgaacctgaaggagtgctttgagagcagcgagaccaagaagtctgtggagcagaagctgcagaagctgagtgacttcctgaccctggagggcaggaacagcaagatcaagcaggtggacagcgtgctgaagcacgtgaagaagcacctgcccaaggcccacgtgaaggagctgatctcctggctggtgggccaggagtttgagctggagaagatggagagcatctgccaggcccgggccaaggagctggaggacagcctgcagcagctgctgcggctgcaggatgaccacaggaacctgaggaagtggctgaccaaccaggaggagaagtggaagggcatggaggagcccggggagaagacagagctgttctgccaggccctggccaggaagcgggagcagtttgagagcgtggcccagctgaacaacagcctgaaggagtatggcttcacagaggaggaggagatcatcatggaggccacctgcctgatggaccgctaccagaccctgctgcggcagctgtctgaaattgaggaggaggacaagctgctgcccacagaggaccagagcttcaatgacctggcccatgatgtgatccactggatcaaggagatcaaggagagcctgatggtgctgaacagcagcgagggcaagatgcccctggaggagcgcatccagaagatcaaggagatcatcctgctgaagccagaaggagatgccagaattgagaccatcatgaagcaggccgagagcagcgaggcccccctggtgcagaagaccctgacagacatcagcaaccagtgggacaacaccctgcacctggccagcacctacctgagccaccaggagaagctgctgctggagggggagaagtacctgcagagcaaggaggacctgcggctgatgctgattgagctgaagaagaagcaggaggccggctttgccctgcagcacggcctgcaggagaagaaggcccagctgaagatctacaagaagttcctgaagaaggcccaggacctgaccagcctgctgaaggagctgaagagccagggcaactacctgctggagtgcaccaagaaccccagcttcagcgaggagccctggctggagatcaagcacctgcacgagagcctgctgcagcagctgcaggacagcgtgcagaacctggatggccacgtgcgggagcatgacagctaccaggtgtgtgtgacagacctgaacaccaccctggacaacttcagcaaggagtttgtgtccttcagtgacaagcctgtggaccagattgctgtggaggagaagctgcagaagctgcaggagctggagaaccggctgagcctgcaggacggcaccctgaagaagatcctggccctggccaagtctgtgaagcagaacaccagctctgtgggccagaagatcatcaaggatgacatcaagagcctgcagtgcaagcagaaggacctggagaaccggctggccagcgccaagcaggagatggagtgctgcctgaacagcatcctgaagagcaagaggagcacagagaagaagggcaagttcaccctgcccggccgggagaagcaggccaccagtgatgtgcaggagagcacccaggagagcgctgctgtggagaagctggaggaggactgggagatcaacaaggacagcgctgtggagatggccatgagcaagcagctgagcctgaatgcccaggagagcatgaagaacacagaagatgagaggaaggtgaatgagctgcagaaccagcccctggagctggacaccatgctgagaaatgagcagctggaggagattgagaagctgtacacccagctggaggccaagaaggccgccatcaagcccctggagcagacagaatgtctgaacaagacagagaccggggccctggtgctgcacaacatcggctacagcgcccagcacctggacaacctgctgcaggccctgatcaccctgaagaagaacaaggagagccagtactgtgtgctgcgggacttccaggagtacctggccgctgtggagagctccatgaaggccctgctgacagacaaggagagcctgaaggtgggccccctggacagcgtgacctacctggacaagatcaagaagttcatcgccagcattgagaaggagaaggacagcctgggcaacctgaagatcaagtgggagaacctgagcaaccacgtgacagacatggacaagaagctgctggagagccagatcaagcagctggagcacggctgggagcaggtggagcagcagatccagaagaagtacagccagcaggtggtggagtatgatgagttcaccaccctgatgaacaaggtgcaggacacagagatcagcctgcagcagcagcagcagcacctgcagctgcggctgaagagccctgaggagcgggccggcaaccagagcatgattgccctgaccacagacctgcaggccaccaagcacggcttctctgtgctgaagggccaggccgagctgcagatgaagaggatctggggcgagaaggagaagaagaacctggaggatggcatcaacaacctgaagaagcagtgggagaccctggagcccctgcacctggaggccgagaaccagatcaagaagtgtgacatccggaacaagatgaaggagaccatcctgtgggccaagaacctgctgggggagctgaaccccagcatccccctgctgcctgatgacatcctgagccagatcaggaagtgcaaggtgacccatgatggcatcctggcccggcagcagagcgtggagagcctggccgaggaggtgaaggacaaggtgcccagcctgaccacctatgagggcagtgacctgaacaacaccctggaggacctgaggaaccagtaccagatgctggtgctgaagagcacccagaggagccagcagctggagttcaagctggaggagaggagcaacttctttgccatcatcaggaagttccagctgatggtgcaggagagcgagaccctcatcatcccccgggtggagacagctgccacagaggccgagctgaagcaccaccacgtgaccctggaggccagccagaaggagctgcaggagattgattctggcatcagcacccacctgcaggagctgaccaacatctatgaggagctgaatgtgtttgagcggctcttcctggaggaccagctgaagaacctgaagatccgcaccaaccgcatccagcgcttcatccagaacacctgcaatgaggtggagcacaagatcaagttctgccggcagttccacgagaagaccagcgccctgcaggaggaggccgacagcatccagagaaatgagctgctgctgaaccaggaggtgaacaagggcgtgaaggaggagatctacaacctgaaggaccggctgacagccatcaagtgctgcatcctgcaggtgctgaagctgaagaaggtgtttgactacatcggcctgaactgggacttcagccagctggaccagctgcagacccaggtgtttgagaaggagaaggagctggaggagaagatcaagcagctggacacctttgaggaggagcacggcaagtaccaggccctgctgagcaagatgagggccatcgacctgcagatcaagaagatgacagaggtggtgctgaaggccccagacagcagccctgagagccggcggctgaatgcccagatcctgagccagagaattgagaaggccaagtgcctgtgtgatgagatcatcaagaagctgaatgaaaacaagacctttgatgacagcttcaaggagaaggagatcctgcagatcaagctgaatgcagaagaaaatgacaagctgtacaaggtgctgcagaacatggtgctggagctgagccccaaggagctggatgagaagaactgccaggacaagctggagaccagcctgcacgtgctgaaccagatcaagagccagctgcagcagcccctgctgatcaacctggagatcaagcacatccagaatgagaaggacaactgtgaggccttccaggagcaggtgtgggccgagatgtgcagcatcaaggctgtgacagccatcgagaagcagcgggaggagaacagcagcgaggccagtgatgtggagaccaagctgcgggagtttgaggacctgcagatgcagctgaacaccagcattgacctgcggaccaacgtgctgaatgatgcctatgagaacctgacccgctacaaggaggccgtgaccagggctgtggagagcatcaccagcctggaggccatcatcatcccctacagagtggatgtgggcaaccctgaggagagcctggagatgcccctgaggaagcaggaggagctggagagcacagtggcccacatccaggacctgacagagaagctgggcatgatcagcagccctgaggccaagctgcagctgcagtacaccctgcaggagctggtgtccaagaacagcgccatgaaggaggccttcaaggcccaggagacagaggccgagcgctacctggagaactacaagtgctacaggaagatggaggaggacatctacaccaacctgagcaagatggagaccgtgctgggccagagcatgagcagcctgcccctgagctaccgggaggccctggagcggctggagcagagcaaggccctggtgagcaacctgatcagcaccaaggaggagctgatgaagctgcggcagatcctgcggctgctgcggctgcgctgcacagaaaatgatggcatctgcctgctgaagatcgtgtctgccctgtgggagaagtggctgagcctgctggaggccgccaaggagtgggagatgtggtgtgaggagctgaagcaggagtggaagtttgtgtctgaggagattgaaagagaggccatcatcctggacaacctgcaggaggagctgcctgagatcagcaagaccaaggaggccgccaccacagaggagctgtctgagctgctggactgcctgtgccagtatggagaaaatgtggagaagcagcagctgctgctgaccctgctgctgcagaggatccgcagcatccagaatgtgcctgagagcagtggagctgtggagaccgtgcctgccttccaggagatcacctccatgaaggagcgctgcaacaagctgctgcagaaggtgcagaagaacaaggagctggtgcagacagagatccaggagcggcacagcttcaccaaggagatcatcgccctgaagaacttcttccagcagaccaccaccagcttccagaacatggccttccaggaccaccctgagaagtctgagcagtttgaggagctgcagagcatcctgaagaagggcaagctgacctttgagaacatcatggagaagctgcgcatcaagtacagcgagatgtacaccatcgtgcctgctgagattgagagccaggtggaggagtgcaggaaggccctggaggacattgatgagaagatcagcaatgaggtgctgaagagcagccccagctatgccatgaggaggaagattgaggagatcaacaacggcctgcacaacgtggagaagatgctgcagcagaagagcaagaacatcgagaaggcccaggagatccagaagaagatgtgggatgagctggacctgtggcacagcaagctgaatgagctggacagcgaggtgcaggacatcgtggagcaggaccccggccaggcccaggagtggatggacaacctgatgatccccttccagcagtaccagcaggtgtcccagagagctgagtgcaggaccagccagctgaacaaggccaccgtgaagatggaggagtacagcgacctgctgaagagcacagaggcctggattgagaacaccagccacctgctggccaacccagctgactatgacagcctgcggaccctgagccaccacgccagcacagtgcagatggccctggaggacagcgagcagaagcacaacctgctgcacagcatcttcatggacctggaggacctgagcatcatctttgaaacagatgagctgacccagagcatccaggagctgagcaaccaggtgacagccctgcagcagaagatcatggagagcctgccccagatccagaggatggctgatgatgtggtggccattgaaagtgaggtgaagtccatggagaagagggtgtccaagatcaagaccatcctgctgagcaaggagatctttgacttcagccctgaggagcacctgaagcatggagaggtgatcctggagaacatccggcccatgaagaagaccatcgccgagatcgtgtcctaccaggtggagctgcggctgccccagacaggcatgaagcccctgcctgtgttccagaggaccaaccagctgctgcaggacatcaagctgctggagaatgtgacccaggagcagaatgagctgctgaaggtggtgatcaagcagaccaatgagtgggatgaggagattgagaacctgaagcagatcctgaacaactacagcgcccagttcagcctggagcacatgagcccagaccaggccgacaagctgccccagctgcagggcgagattgaaagaatggagaagcagatcctgagcctgaaccagaggaaggaggacctgctggtggacctgaaggccaccgtgctgaacctgcaccagcacctgaagcaggagcaggagggcgtggagcgggaccggctgcctgctgtgaccagcgaggagggcggcgtggccgagagagatgccagcgagaggaagctgaacagaagaggctccatgagctacctggccgctgtggaggaggaggtggaggagagctctgtgaagagtgacaatggagatgagaaggccgagcccagcccccagagctggagcagcctgtggaagcatgacaaggacatggaggaggaccgggccagcagcagcagcggcaccatcgtgcaggaggcctacggcaagatcagcaccagtgacaacagcatggcccagatcctgaccccagacagcctgaacacagagcagggcccagaatgttccctgcggcccaaccagacagaggagggcaccaccccacccattgaagctgacaccctggacagcagtgatgcccagggcggcctggagccccgggtggagaagaccaggcctgagcccacagaggtgctgcacgcctgcaagacccaggtggccgagctggagctgtggctgcagcaggccaacgtggccgtggagcctgagaccctgaatgctgacatgcagcaggtgctggagcagcagctggtgggctgccaggccatgctgacagaaattgagcacaaggtggccttcctgctggagacctgcaaggaccagggcctgggggacaatggagccacccagcacgaggccgaggccctgagcctgaagctgaagacagtgaagtgcaacctggagaaggtgcagatgatgctgcaggagaagcacagcgaggaccagcaccccaccatcctgaagaagagcagcgagcctgagcaccaggaggccctgcagcctgtgaacctgtctgagctggagagcatcgtgacagagcggccccagttcagccggcagaaggacttccagcagcagcaggtgctggagctgaagcccatggagcagaaggacttcatcaagttcatcgagttcaatgccaagaagatgtggccccagtactgccagcacgacaatgacaccacccaggagagcagcgccagcaaccaggccagcagcccagaaaatgatgtgcctgacagcatcctgagcccccagggccagaatggagacaagtggcagtacctgcaccacgagctgagcagcaagatcaagctgcccctgccccagctggtggagccccaggtgtccaccaacatgggcatcctgcccagcgtgaccatgtacaacttccgctaccccaccacagaggagctgaagacctacaccacccagctggaggacctgcggcaggaggccagcaacctgcagacccaggagaacatgacagaggaggcctacatcaacctggacaagaagctgtttgagctgttcctgaccctgagccagtgcctgagctctgtggaggagatgctggagatgccccggctgtacagagaagatggcagcggccagcaggtgcactatgagaccctggccctggagctgaagaagctgtacctggccctgagtgacaagaagggggacctgctgaaggccatgacctggccaggagagaacaccaacctgctgctggagtgctttgacaacctgcaggtgtgcctggagcacacccaggccgctgctgtgtgccgcagcaagagcctgaaggccggcctggactacaacagaagctaccagaatgagatcaagaggctgtaccaccagctgatcaagagcaagaccagcctgcagcagagcctgaatgagatcagcggccagagcgtggccgagcagctgcagaaggcagatgcctacacagtggagctggagaatgctgagagccgggtggccaagctgagagatgaaggagagcggctgcacctgccctatgccctgctgcaggaggtgtacaagctggaggatgtgctggacagcatgtggggcatgctgcgggcccgctacacagagctgagcagcccctttgtgacagagagccagcaggatgccctgctgcagggcatggtggagctggtgaagattggcaaggagaagctggcccacggccacctgaagcagaccaagagcaaggtggccctgcaggcccagatcgagaaccacaaggtgttcttccagaagctggtggccgacatgctgctgatccaggcctacagcgccaagatcctgcccagcctgctgcagaaccgggagaccttctgggccgagcaggtgacagaggtgaagatcctggaggagaagagccggcagtgtggcatgaagctgcagagcctgctgcagaagtgggaggagtttgatgaaaattatgccagcctggagaaggacctggagatcctgatcagcaccctgcccagcgtgtccctggtggaggagacagaggagcggctggtggagcgcatctccttctaccagcagatcaagaggaacatcggcggcaagcacgcccggctgtaccagaccctgaatgaaggcaagcagctggtggcctctgtgtcctgcccagagctggagggccagatcgccaagctggaggagcagtggctgagcctgaacaagaagattgaccacgagctgcaccggctgcaggccctgctgaagcacctgctgagctacaacagagacagcgaccagctgaccaagtggctggagagcagccagcacaccctgaactactggaaggagcagagcctgaatgtgtcccaggacctggacaccatccgcagcaacatcaacaacttctttgagttcagcaaggaggtggatgagaagagcagcctgaagacagctgtgatcagcatcggcaaccagctgctgcacctgaaggagacagacacagccaccctgcgggccagcctggcccagtttgagcagaagtggaccatgctgatcacccagctgcctgacatccaggagaagctgcaccagctgcagatggagaagctgcccagcaggaaggccatcacagagatgatctcctggatgaacaacgtggagcaccagaccagtgatgaggacagcgtgcacagccccagcagcgccagccaggtgaagcacctgctgcagaagcacaaggagttcaggatggagatggactacaagcagtggatcgtggactttgtgaaccagagcctgctgcagctgagcacctgtgatgtggagagcaagagatatgaaagaacagaatttgctgagcacctgggggagatgaaccggcagtggcaccgggtgcacggcatgctgaacaggaagatccagcacctggagcagctgctggagagcatcacagaaagtgagaacaagatccagatcctgaacaactggctggaggcccaggaggagcggctgaagaccctgcagaagccagagagcgtcatctctgtgcagaagctgctgctggactgccaggacatcgagaaccagctggccatcaagagcaaggccctggatgagctgaagcagagctacctgaccctggagagcggggctgtgcccctgctggaggacacagccagcagaattgatgagctgttccagaagaggagctctgtgctgacccaggtgaaccagctgaagacctccatgcagagcgtgctgcaggagtggaagatctatgaccagctgtatgatgaggtgaacatgatgaccatccgcttctggtactgcatggagcacagcaagcctgtggtgctgagcctggagaccctgcgctgccaggtggagaacctgcagagcctgcaggatgaagctgagagcagcgagggctcctgggagaagctgcaggaggtgattggcaagctgaagggcctgtgccccagcgtggccgagatcatcgaggagaagtgccagaacacccacaagcgctggacccaggtgaaccaggccatcgctgaccagctgcagaaggcccagagcctgctgcagctgtggaaggcctacagcaatgcccacggggaggccgccgcccggctgaagcagcaggaggccaagttccagcagctggccaacatctccatgagcggcaacaacctggccgagatcctgcccccagccctgcaggacatcaaggagctgcagcatgatgtgcagaagaccaaggaggccttcctgcagaacagctctgtgctggaccggctgccccagcctgctgagagcagcacccacatgctgctgcccggccccctgcacagcctgcagagagctgcctacctggagaagatgctgctggtgaaggccaatgaatttgaatttgtgctgagccagttcaaggactttggagtgcggctggagagcctgaagggcctcatcatgcatgaggaggagaacctggaccggctgcaccagcaggagaaggaaaatccagacagcttcctgaaccacgtgctggccctgacagcccagagcccagacatcgagcacctgaatgaggtgtccctgaagctgcccctgagtgatgtggccgtgaagaccctgcagaacatgaaccggcagtggatccgggccacagccacagccctggagcgctgcagcgagctgcagggcatcggcctgaatgagaagttcctgtactgctgtgagaagtggatccagctgctggagaagattgaggaggccctgaaggtggatgtggccaacagcctgcctgagctgctggagcagcagaagacctacaagatgctggaggccgaggtgtccatcaaccagaccatcgctgacagctatgtgacccagagcctgcagctgctggacaccacagaaattgaaaatagacctgagttcatcacagagttcagcaagctgacagaccgctggcagaatgctgtgcagggcgtgcggcagaggaaaggagatgtggatggcctggtgcggcagtggcaggacttcaccacctctgtggagaacctcttccgcttcctgacagacaccagccacctgctgtctgctgtgaagggccaggagcgcttcagcctgtaccagaccaggagcctcatccacgagctgaagaacaaggagatccacttccagaggaggaggaccacctgtgccctgaccctggaggccggggagaagctgctgctgaccacagacctgaagaccaaggagagcgtgggccgccgcatcagccagctgcaggacagctggaaggacatggagccccagctggccgagatgatcaagcagttccagagcacagtggagacctgggaccagtgtgagaagaagatcaaggagctgaagagccggctgcaggtgctgaaggcccagagcgaggaccccctgcctgagctgcacgaggacctgcacaatgagaaggagctgatcaaggagctggagcagagcctggcctcctggacccagaacctgaaggagctgcagaccatgaaggctgacctgaccaggcatgtgctggtggaggatgtgatggtgctgaaggagcagatcgagcacctgcaccggcagtgggaggacctgtgcctgcgggtggccatcaggaagcaggagattgaagatcggctgaacacctgggtggtgttcaatgagaagaacaaggagctgtgtgcctggctggtgcagatggagaacaaggtgctgcagacagctgacatcagcattgaggagatgattgagaagctgcagaaggactgcatggaggagatcaacctcttcagcgagaacaagctgcagctgaagcagatgggagaccagctgatcaaggccagcaacaagagcagagctgctgagattgatgacaagctgaacaagatcaatgaccgctggcagcacctgtttgatgtgattggcagccgggtgaagaagctgaaggagacctttgccttcatccagcagctggacaagaacatgagcaacctgcggacctggctggccagaattgaaagtgagctgagcaagcctgtggtgtatgatgtgtgtgatgaccaggagatccagaagaggctggccgagcagcaggacctgcagagggacatcgagcagcacagcgctggggtggagagcgtcttcaacatctgtgatgtgctgctgcatgacagtgatgcctgtgccaatgaaacagaatgtgacagcatccagcagaccaccaggagcctggaccggcgctggaggaacatctgtgccatgtccatggagaggaggatgaagattgaggagacctggaggctgtggcagaagttcctggatgactacagcagatttgaggactggctgaagtctgctgagaggacagctgcctgccccaacagcagcgaggtgctgtacaccagcgccaaggaggagctgaagagatttgaggccttccagaggcagatccacgagcggctgacccagctggagctgatcaacaagcagtacagaaggctggcccgggagaacagaacagacacagccagccggctgaagcagatggtgcatgagggcaaccagcgctgggacaacctgcagaggagagtgacagctgtgctgcggcggctgcggcacttcaccaaccagcgggaggagtttgagggcacccgggagagcatcctggtgtggctgacagagatggacctgcagctgaccaacgtggagcacttcagcgagagtgatgctgatgacaagatgaggcagctgaatggcttccagcaggagatcaccctgaacaccaacaagattgaccagctgattgtgtttggagagcagctgatccagaagtctgagcccctggatgctgtgctgattgaagatgagctggaggagctgcaccgctactgccaggaggtgtttggccgggtgagccgcttccaccggcggctgaccagctgcaccccaggcctggaggatgagaaggaggcctctgaaaatgaaacagacatggaggacccccgggagatccagacagacagctggaggaagagaggagagagcgaggagcccagcagcccccagagcctgtgccacctggtggcccctggccacgagaggagcggctgtgagacccctgtgtctgtggacagcatccccctggagtgggaccacactggagatgtgggcggcagcagcagccatgaagaagatgaggagggcccctactacagcgccctgagtgatgtggagatccctgagaaccctgaggcctacctgaagatgaccaccaagaccctgaaggccagcagcggcaagagcatcagtgatggccacagctggcacgtgcctgacagccccagctgcccagagcaccactacaagcagatggagggggacagaaatgtgccccctgtgcccccagccagcagcaccccctacaagccaccctacggcaagctgctgctgcccccaggcacagatggcggcaaggagggcccccgggtgctgaatggaaacccccagcaggaggatggcggcctggccggcatcacagagcagcagagcggggcctttgaccgctgggagatgatccaggcccaggagctgcacaacaagctgaagatcaagcagaacctgcagcagctgaacagcgacatcagcgccatcaccacctggctgaagaagacagaagctgagctggagatgctgaagatggccaagcccccaagtgacatccaggagattgagctgcgggtgaagaggctgcaggagatcctgaaggcctttgacacctacaaggccctggtggtgtctgtgaatgtgagcagcaaggagttcctgcagacagagagccctgagagcacagagctgcagagccggctgcggcagctgagcctgctgtgggaggccgcccagggcgctgtggacagctggaggggcggcctgcggcagagcctgatgcagtgccaggacttccaccagctgagccagaacctgctgctgtggctggccagcgccaagaacagacggcagaaggcccacgtgacagaccccaaggctgacccccgggccctgctggagtgccggcgggagctgatgcagctggagaaggagctggtggagcggcagccccaggtggacatgctgcaggagatcagcaacagcctgctgatcaagggccacggggaggactgcattgaagctgaggagaaggtgcacgtgattgagaagaagctgaagcagctgcgggagcaggtgtcccaggacctgatggccctgcagggcacccagaacccagccagccccctgcccagctttgatgaggtggacagcggggaccagcccccagccacctctgtgcctgccccccgggccaagttccgggctgtgaggaccacagaaggagaggaggagacagagagccgggtgcccggcagcacccggccccagaggagcttcctgagccgggtggtgcgggccgccctgcccctgcagctgctgctgctgctgctgctgctgctggcctgcctgctgcccagcagcgaggaggactacagctgcacccaggccaacaactttgcccgctccttctaccccatgctgcgctacaccaacggccccccacccacctag

SEQ ID NO: 257206 - DNA, 10626 bp, Artificial Sequence
  derived and/or modified sequence
atggaggaggacatctacaccaacctgagcaagatggagaccgtgctgggccagagcatgagcagcctgcccctgagctaccgggaggccctggagcggctggagcagagcaaggccctggtgagcaacctgatcagcaccaaggaggagctgatgaagctgcggcagatcctgcggctgctgcggctgcgctgcacagaaaatgatggcatctgcctgctgaagatcgtgtctgccctgtgggagaagtggctgagcctgctggaggccgccaaggagtgggagatgtggtgtgaggagctgaagcaggagtggaagtttgtgtctgaggagattgaaagagaggccatcatcctggacaacctgcaggaggagctgcctgagatcagcaagaccaaggaggccgccaccacagaggagctgtctgagctgctggactgcctgtgccagtatggagaaaatgtggagaagcagcagctgctgctgaccctgctgctgcagaggatccgcagcatccagaatgtgcctgagagcagtggagctgtggagaccgtgcctgccttccaggagatcacctccatgaaggagcgctgcaacaagctgctgcagaaggtgcagaagaacaaggagctggtgcagacagagatccaggagcggcacagcttcaccaaggagatcatcgccctgaagaacttcttccagcagaccaccaccagcttccagaacatggccttccaggaccaccctgagaagtctgagcagtttgaggagctgcagagcatcctgaagaagggcaagctgacctttgagaacatcatggagaagctgcgcatcaagtacagcgagatgtacaccatcgtgcctgctgagattgagagccaggtggaggagtgcaggaaggccctggaggacattgatgagaagatcagcaatgaggtgctgaagagcagccccagctatgccatgaggaggaagattgaggagatcaacaacggcctgcacaacgtggagaagatgctgcagcagaagagcaagaacatcgagaaggcccaggagatccagaagaagatgtgggatgagctggacctgtggcacagcaagctgaatgagctggacagcgaggtgcaggacatcgtggagcaggaccccggccaggcccaggagtggatggacaacctgatgatccccttccagcagtaccagcaggtgtcccagagagctgagtgcaggaccagccagctgaacaaggccaccgtgaagatggaggagtacagcgacctgctgaagagcacagaggcctggattgagaacaccagccacctgctggccaacccagctgactatgacagcctgcggaccctgagccaccacgccagcacagtgcagatggccctggaggacagcgagcagaagcacaacctgctgcacagcatcttcatggacctggaggacctgagcatcatctttgaaacagatgagctgacccagagcatccaggagctgagcaaccaggtgacagccctgcagcagaagatcatggagagcctgccccagatccagaggatggctgatgatgtggtggccattgaaagtgaggtgaagtccatggagaagagggtgtccaagatcaagaccatcctgctgagcaaggagatctttgacttcagccctgaggagcacctgaagcatggagaggtgatcctggagaacatccggcccatgaagaagaccatcgccgagatcgtgtcctaccaggtggagctgcggctgccccagacaggcatgaagcccctgcctgtgttccagaggaccaaccagctgctgcaggacatcaagctgctggagaatgtgacccaggagcagaatgagctgctgaaggtggtgatcaagcagaccaatgagtgggatgaggagattgagaacctgaagcagatcctgaacaactacagcgcccagttcagcctggagcacatgagcccagaccaggccgacaagctgccccagctgcagggcgagattgaaagaatggagaagcagatcctgagcctgaaccagaggaaggaggacctgctggtggacctgaaggccaccgtgctgaacctgcaccagcacctgaagcaggagcaggagggcgtggagcgggaccggctgcctgctgtgaccagcgaggagggcggcgtggccgagagagatgccagcgagaggaagctgaacagaagaggctccatgagctacctggccgctgtggaggaggaggtggaggagagctctgtgaagagtgacaatggagatgagaaggccgagcccagcccccagagctggagcagcctgtggaagcatgacaaggacatggaggaggaccgggccagcagcagcagcggcaccatcgtgcaggaggcctacggcaagatcagcaccagtgacaacagcatggcccagatcctgaccccagacagcctgaacacagagcagggcccagaatgttccctgcggcccaaccagacagaggagggcaccaccccacccattgaagctgacaccctggacagcagtgatgcccagggcggcctggagccccgggtggagaagaccaggcctgagcccacagaggtgctgcacgcctgcaagacccaggtggccgagctggagctgtggctgcagcaggccaacgtggccgtggagcctgagaccctgaatgctgacatgcagcaggtgctggagcagcagctggtgggctgccaggccatgctgacagaaattgagcacaaggtggccttcctgctggagacctgcaaggaccagggcctgggggacaatggagccacccagcacgaggccgaggccctgagcctgaagctgaagacagtgaagtgcaacctggagaaggtgcagatgatgctgcaggagaagcacagcgaggaccagcaccccaccatcctgaagaagagcagcgagcctgagcaccaggaggccctgcagcctgtgaacctgtctgagctggagagcatcgtgacagagcggccccagttcagccggcagaaggacttccagcagcagcaggtgctggagctgaagcccatggagcagaaggacttcatcaagttcatcgagttcaatgccaagaagatgtggccccagtactgccagcacgacaatgacaccacccaggagagcagcgccagcaaccaggccagcagcccagaaaatgatgtgcctgacagcatcctgagcccccagggccagaatggagacaagtggcagtacctgcaccacgagctgagcagcaagatcaagctgcccctgccccagctggtggagccccaggtgtccaccaacatgggcatcctgcccagcgtgaccatgtacaacttccgctaccccaccacagaggagctgaagacctacaccacccagctggaggacctgcggcaggaggccagcaacctgcagacccaggagaacatgacagaggaggcctacatcaacctggacaagaagctgtttgagctgttcctgaccctgagccagtgcctgagctctgtggaggagatgctggagatgccccggctgtacagagaagatggcagcggccagcaggtgcactatgagaccctggccctggagctgaagaagctgtacctggccctgagtgacaagaagggggacctgctgaaggccatgacctggccaggagagaacaccaacctgctgctggagtgctttgacaacctgcaggtgtgcctggagcacacccaggccgctgctgtgtgccgcagcaagagcctgaaggccggcctggactacaacagaagctaccagaatgagatcaagaggctgtaccaccagctgatcaagagcaagaccagcctgcagcagagcctgaatgagatcagcggccagagcgtggccgagcagctgcagaaggcagatgcctacacagtggagctggagaatgctgagagccgggtggccaagctgagagatgaaggagagcggctgcacctgccctatgccctgctgcaggaggtgtacaagctggaggatgtgctggacagcatgtggggcatgctgcgggcccgctacacagagctgagcagcccctttgtgacagagagccagcaggatgccctgctgcagggcatggtggagctggtgaagattggcaaggagaagctggcccacggccacctgaagcagaccaagagcaaggtggccctgcaggcccagatcgagaaccacaaggtgttcttccagaagctggtggccgacatgctgctgatccaggcctacagcgccaagatcctgcccagcctgctgcagaaccgggagaccttctgggccgagcaggtgacagaggtgaagatcctggaggagaagagccggcagtgtggcatgaagctgcagagcctgctgcagaagtgggaggagtttgatgaaaattatgccagcctggagaaggacctggagatcctgatcagcaccctgcccagcgtgtccctggtggaggagacagaggagcggctggtggagcgcatctccttctaccagcagatcaagaggaacatcggcggcaagcacgcccggctgtaccagaccctgaatgaaggcaagcagctggtggcctctgtgtcctgcccagagctggagggccagatcgccaagctggaggagcagtggctgagcctgaacaagaagattgaccacgagctgcaccggctgcaggccctgctgaagcacctgctgagctacaacagagacagcgaccagctgaccaagtggctggagagcagccagcacaccctgaactactggaaggagcagagcctgaatgtgtcccaggacctggacaccatccgcagcaacatcaacaacttctttgagttcagcaaggaggtggatgagaagagcagcctgaagacagctgtgatcagcatcggcaaccagctgctgcacctgaaggagacagacacagccaccctgcgggccagcctggcccagtttgagcagaagtggaccatgctgatcacccagctgcctgacatccaggagaagctgcaccagctgcagatggagaagctgcccagcaggaaggccatcacagagatgatctcctggatgaacaacgtggagcaccagaccagtgatgaggacagcgtgcacagccccagcagcgccagccaggtgaagcacctgctgcagaagcacaaggagttcaggatggagatggactacaagcagtggatcgtggactttgtgaaccagagcctgctgcagctgagcacctgtgatgtggagagcaagagatatgaaagaacagaatttgctgagcacctgggggagatgaaccggcagtggcaccgggtgcacggcatgctgaacaggaagatccagcacctggagcagctgctggagagcatcacagaaagtgagaacaagatccagatcctgaacaactggctggaggcccaggaggagcggctgaagaccctgcagaagccagagagcgtcatctctgtgcagaagctgctgctggactgccaggacatcgagaaccagctggccatcaagagcaaggccctggatgagctgaagcagagctacctgaccctggagagcggggctgtgcccctgctggaggacacagccagcagaattgatgagctgttccagaagaggagctctgtgctgacccaggtgaaccagctgaagacctccatgcagagcgtgctgcaggagtggaagatctatgaccagctgtatgatgaggtgaacatgatgaccatccgcttctggtactgcatggagcacagcaagcctgtggtgctgagcctggagaccctgcgctgccaggtggagaacctgcagagcctgcaggatgaagctgagagcagcgagggctcctgggagaagctgcaggaggtgattggcaagctgaagggcctgtgccccagcgtggccgagatcatcgaggagaagtgccagaacacccacaagcgctggacccaggtgaaccaggccatcgctgaccagctgcagaaggcccagagcctgctgcagctgtggaaggcctacagcaatgcccacggggaggccgccgcccggctgaagcagcaggaggccaagttccagcagctggccaacatctccatgagcggcaacaacctggccgagatcctgcccccagccctgcaggacatcaaggagctgcagcatgatgtgcagaagaccaaggaggccttcctgcagaacagctctgtgctggaccggctgccccagcctgctgagagcagcacccacatgctgctgcccggccccctgcacagcctgcagagagctgcctacctggagaagatgctgctggtgaaggccaatgaatttgaatttgtgctgagccagttcaaggactttggagtgcggctggagagcctgaagggcctcatcatgcatgaggaggagaacctggaccggctgcaccagcaggagaaggaaaatccagacagcttcctgaaccacgtgctggccctgacagcccagagcccagacatcgagcacctgaatgaggtgtccctgaagctgcccctgagtgatgtggccgtgaagaccctgcagaacatgaaccggcagtggatccgggccacagccacagccctggagcgctgcagcgagctgcagggcatcggcctgaatgagaagttcctgtactgctgtgagaagtggatccagctgctggagaagattgaggaggccctgaaggtggatgtggccaacagcctgcctgagctgctggagcagcagaagacctacaagatgctggaggccgaggtgtccatcaaccagaccatcgctgacagctatgtgacccagagcctgcagctgctggacaccacagaaattgaaaatagacctgagttcatcacagagttcagcaagctgacagaccgctggcagaatgctgtgcagggcgtgcggcagaggaaaggagatgtggatggcctggtgcggcagtggcaggacttcaccacctctgtggagaacctcttccgcttcctgacagacaccagccacctgctgtctgctgtgaagggccaggagcgcttcagcctgtaccagaccaggagcctcatccacgagctgaagaacaaggagatccacttccagaggaggaggaccacctgtgccctgaccctggaggccggggagaagctgctgctgaccacagacctgaagaccaaggagagcgtgggccgccgcatcagccagctgcaggacagctggaaggacatggagccccagctggccgagatgatcaagcagttccagagcacagtggagacctgggaccagtgtgagaagaagatcaaggagctgaagagccggctgcaggtgctgaaggcccagagcgaggaccccctgcctgagctgcacgaggacctgcacaatgagaaggagctgatcaaggagctggagcagagcctggcctcctggacccagaacctgaaggagctgcagaccatgaaggctgacctgaccaggcatgtgctggtggaggatgtgatggtgctgaaggagcagatcgagcacctgcaccggcagtgggaggacctgtgcctgcgggtggccatcaggaagcaggagattgaagatcggctgaacacctgggtggtgttcaatgagaagaacaaggagctgtgtgcctggctggtgcagatggagaacaaggtgctgcagacagctgacatcagcattgaggagatgattgagaagctgcagaaggactgcatggaggagatcaacctcttcagcgagaacaagctgcagctgaagcagatgggagaccagctgatcaaggccagcaacaagagcagagctgctgagattgatgacaagctgaacaagatcaatgaccgctggcagcacctgtttgatgtgattggcagccgggtgaagaagctgaaggagacctttgccttcatccagcagctggacaagaacatgagcaacctgcggacctggctggccagaattgaaagtgagctgagcaagcctgtggtgtatgatgtgtgtgatgaccaggagatccagaagaggctggccgagcagcaggacctgcagagggacatcgagcagcacagcgctggggtggagagcgtcttcaacatctgtgatgtgctgctgcatgacagtgatgcctgtgccaatgaaacagaatgtgacagcatccagcagaccaccaggagcctggaccggcgctggaggaacatctgtgccatgtccatggagaggaggatgaagattgaggagacctggaggctgtggcagaagttcctggatgactacagcagatttgaggactggctgaagtctgctgagaggacagctgcctgccccaacagcagcgaggtgctgtacaccagcgccaaggaggagctgaagagatttgaggccttccagaggcagatccacgagcggctgacccagctggagctgatcaacaagcagtacagaaggctggcccgggagaacagaacagacacagccagccggctgaagcagatggtgcatgagggcaaccagcgctgggacaacctgcagaggagagtgacagctgtgctgcggcggctgcggcacttcaccaaccagcgggaggagtttgagggcacccgggagagcatcctggtgtggctgacagagatggacctgcagctgaccaacgtggagcacttcagcgagagtgatgctgatgacaagatgaggcagctgaatggcttccagcaggagatcaccctgaacaccaacaagattgaccagctgattgtgtttggagagcagctgatccagaagtctgagcccctggatgctgtgctgattgaagatgagctggaggagctgcaccgctactgccaggaggtgtttggccgggtgagccgcttccaccggcggctgaccagctgcaccccaggcctggaggatgagaaggaggcctctgaaaatgaaacagacatggaggacccccgggagatccagacagacagctggaggaagagaggagagagcgaggagcccagcagcccccagagcctgtgccacctggtggcccctggccacgagaggagcggctgtgagacccctgtgtctgtggacagcatccccctggagtgggaccacactggagatgtgggcggcagcagcagccatgaagaagatgaggagggcccctactacagcgccctgagtgatgtggagatccctgagaaccctgaggcctacctgaagatgaccaccaagaccctgaaggccagcagcggcaagagcatcagtgatggccacagctggcacgtgcctgacagccccagctgcccagagcaccactacaagcagatggagggggacagaaatgtgccccctgtgcccccagccagcagcaccccctacaagccaccctacggcaagctgctgctgcccccaggcacagatggcggcaaggagggcccccgggtgctgaatggaaacccccagcaggaggatggcggcctggccggcatcacagagcagcagagcggggcctttgaccgctgggagatgatccaggcccaggagctgcacaacaagctgaagatcaagcagaacctgcagcagctgaacagcgacatcagcgccatcaccacctggctgaagaagacagaagctgagctggagatgctgaagatggccaagcccccaagtgacatccaggagattgagctgcgggtgaagaggctgcaggagatcctgaaggcctttgacacctacaaggccctggtggtgtctgtgaatgtgagcagcaaggagttcctgcagacagagagccctgagagcacagagctgcagagccggctgcggcagctgagcctgctgtgggaggccgcccagggcgctgtggacagctggaggggcggcctgcggcagagcctgatgcagtgccaggacttccaccagctgagccagaacctgctgctgtggctggccagcgccaagaacagacggcagaaggcccacgtgacagaccccaaggctgacccccgggccctgctggagtgccggcgggagctgatgcagctggagaaggagctggtggagcggcagccccaggtggacatgctgcaggagatcagcaacagcctgctgatcaagggccacggggaggactgcattgaagctgaggagaaggtgcacgtgattgagaagaagctgaagcagctgcgggagcaggtgtcccaggacctgatggccctgcagggcacccagaacccagccagccccctgcccagctttgatgaggtggacagcggggaccagcccccagccacctctgtgcctgccccccgggccaagttccgggctgtgaggaccacagaaggagaggaggagacagagagccgggtgcccggcagcacccggccccagaggagcttcctgagccgggtggtgcgggccgccctgcccctgcagctgctgctgctgctgctgctgctgctggcctgcctgctgcccagcagcgaggaggactacagctgcacccaggccaacaactttgcccgctccttctaccccatgctgcgctacaccaacggccccccacccacctag

SEQ ID NO: 257207 - DNA, 20724 bp, Artificial Sequence
  derived and/or modified sequence
atggccagcagccccgagctgcccaccgaggacgagcagggcagctgggggatcgatgacctgcacatctcactgcaggctgaacaagaggacacacaaaagaaggcatttacctgctggatcaacagccagctcgcccggcacacaagcccctccgtgattagtgacctgttcaccgatataaaaaagggccacgttctgctcgatcttctcgaggtactctcaggccagcagctgcctcgagacaagggatcgaacacctttcagtgccggataaacatcgaacacgccttgacatttctgcggaataggtcaatcaagctgattaacatccatgtcactgacattattgacgggaatccttccataattctcggactcatctggacaatcatcctccatttccatattgagaaactcgctcagaccctctcttgcaactataaccagccaagcctcgacgatgtatcggtggttgattcatctccggcctcgtctccccctgctaagaagtgcagcaaggtacaggcacggtggcagatgtcagccaggaaggcattattgctgtgggcccaagaacagtgtgccacttacgaaagtgtgaacgtaaccgattttaaaagttcttggcgtaacggcatggcgttcctagcgatcattcatgcattgaggccagatttgattgatatgaagtcagtaaagcacagaagcaacaaagataatctgcgtgaggcatttcgcatagctgaacaggagctgaaaattccaagacttctggaaccggaggacgttgacgtcgtggaccccgatgagaagagtatcatgacatatgtcgcacagttcctacaatatagcaaggatgccccgggcaccggcgaagaagcacagggcaaggtgaaagacgcgatgggatggcttactctgcagaaagagaaactccagaagctcctcaaggactctgagaacgatacatatttcaaaaagtataactctttgctcagcttcatggagtcattcaacgaggagaagaagagttttctggacgtccttagcatcaaaagggatttggatgagctagataaagaccacctgcaactcagggaggcatgggacgggctagaccatcagataaatgcatggaagattaaactaaattatgcccttccccctccgttgcaccagaccgaggcatggctgcaagaagtggaagagcttatggacgaggatctgtccgccagccaggaccatagtcaggcggtgacgcttattcaggaaaagatgaccctgttcaagtctctcatggaccgcttcgaacatcactcgaatatcctgctgacttttgaaaacaaagacgaaaaccatctgccactggtgccacccaacaagctcgaggaaatgaagcgccggataaacaatatactggaaaagaagtttatcctacttctggaattccactactacaaatgtcttgtcctgggtttggttgacgaagtgaaatcaaaacttgacatatggaacattaagtacggatctcgagaaagtgttgaactcctgcttgaggactggcacaaattcatcgaggaaaaagaatttctggcccggctggacacctcttttcagaagtgcggtgagatctataagaatcttgccggggaatgccagaacatcaacaaacagtacatgatggtgaagtcagacgtgtgcatgtacagaaaaaacatatacaacgtgaagagtacattgcagaaagtcctcgcctgttgggcgacatatgtcgagaacctgaggctgcttagagcctgctttgaagagacaaagaaagaggagattaaagaagttccttttgaaaccttggctcagtggaatctcgagcacgcaactcttaatgaggccgggaatttcctcgtggaagtttccaatgatgtggtgggctcgagcatttcaaaggaacttaggcgcctgaataaacggtggagaaagctcgtgtctaagactcagttggagatgaacttaccactgatgatcaaaaagcaggatcaacctacctttgataattctggaaacatactgtccaaggaagaaaaagctacagtcgaattctctactgatatgagtgtcgagcttccagagaattacaatcagaacatcaaagccggcgaaaaacacgagaaggagaatgaggaattcaccggccagttgaaagtggccaaggacgtcgaaaaattgatcggccaggttgaaatctgggaagctgaagcaaagtccgtccttgatcaggatgacgtagacaccagcatggaggaatccctcaagcacctcatcgcgaagggctccatgtttgatgaactgatggcacggtccgaggacatgcttcagatggatattcagaatatctcatcccaggagtccttccaacacgtcctgaccaccggcctgcaggctaagattcaagaggccaaagagaaggtacagatcaatgtcgtgaagctcatcgccgcgttgaagaacctgactgacgtgtcccctgacctggacattagactgaagatggaagagtcccagaaggaactcgagtcctacatgatgcgagcacagcagctcctggggcaaagggagtcccctggcgagttaatcagtaagcacaaggaggccctcattattagcaacacaaagtctcttgcaaagtacctgaaagctgtagaagagctgaagaacaatgttaccgaggatatcaagatgtcccttgaggagaaatcccgcgatgtttgtgctaaatgggagtccctgcatcacgagctgtctctttatgtgcagcagctgaaaatcgacatcgagaaaggtaagctgtccgacaacatactgaagctcgaaaagcagataaacaaagagaagaaactcatacgtagaggcagaacaaaggggttaatcaaagaacacgaagcatgcttttctgaggagggctgtctgtatcagctgaaccaccacatggaggtcctgcgcgaactgtgtgaggagcttccaagccaaaagagccagcaggaggtcaagcgcctcttgaaagactacgagcagaagatcgagcggctgcttaaatgcgcttcagagatccacatgactttacaacctaccgccggcggtaccagtaagaatgaagggaccatcacaacgagtgagaataggggaggcgatccacattcagaagccccattcgccaagtccgacaaccagccgtcaacggaaaaagctatggaaccgacaatgaaattcagtctcgccagcgtactcagacctctccaagaggaatcgataatggaaaaagattactcagcaagcatcaattcactactcgaacggtacgatacttaccgagatatccttgagcaccacctgcagaataacaagtttcgaatcacctccgacttttcttccgaagaggatagaagcagttcatgcctgcaggcgaagcttactgaccttcaggtaattaagaacgagacggatgccaggtggaaagaattcgaaataatcagcctgaagcttgaaaaccacgttaacgatattaagaaacccttcgtgatcaaggagcgggacacactgaaggagcgtgagcgagagcttcagatgacactgaacacccgcatggagagtcttgagacagctttgaggctcgtgctgccagtggagaaagcatctttactgctctgcggaagtgatctgcctctacataagatggcgatacagggctttcacttgatcgatgctgaccgtatttatcagcacctccggaacatacaggatagtattgcaaagcagatcgagatatgtaatagactcgaagagccaggaaacttcgtgcttaaggagctgcacccattcgatctgcatgcaatgcaaaatattatcctgaagtacaagacgcagtttgaaggcatgaatcatcgggtccagcggagcgaggatactctgaaagctctggaggattttctggcctcattgcggaccgccaagttatcggctgagcccgtcaccgacttgtccgcttcggatacccaagttgcgcaggagaacacgttgaccgtgaagaacaaggagggtgaaatccatctaatgaaggataaggccaaacacctggacaagtgtctgaagatgctcgatatgtcctttaaagatgctgaacgaggagatgatacatcatgcgaaaacttgctggatgctttctccattaagttgagcgaaacccatggttacggagtgcaggaggagttcacggaagaaaataaactgctggaggcctgtattttcaaaaacaacgaacttctgaagaatattcaggacgtccagtcacagatatctaagataggcctgaaggacccaacggttcctgccgtcaaacataggaagaaaagtctcataagactggacaaggtcttggacgagtacgaggaagagaaaaggcatctgcaggagatggctaatagcctaccgcacttcaaagacgggcgcgagaaaactgtcaaccagcagtgccagaatacagtagttctgtgggagaacacaaaggcccttgtgaccgaatgccttgaacagtgcggccgtgttctggagctgcttaaacagtaccaaaacttcaaatcaatcctgaccacactgatccaaaaggaggagagcgtcatctctctgcaggcctcctacatgggcaaagagaacctgaagaagaggattgcagaaatagagatcgtcaaagaggaatttaatgaacacctagaggttgtcgacaaaatcaatcaagtttgcaaaaacctccagttctacctgaacaaaatgaaaactttcgaggagcctccgtttgaaaaggaagctaatatcattgtggaccgatggctggacattaatgaaaaaactgaggactactacgagaacctgggtagagctttggctctatgggataaactgttcaatctcaaaaacgtgattgatgagtggacagaaaaggcattgcaaaagatggaattacaccagctgactgaggaggaccgtgaaaggctgaaggaggaattgcaggtgcacgagcagaagactagtgagttcagtcgaagagtagctgagatccagtttttactgcagagctccgagattcccctagagctgcaggtcatggaatcctcgatcctgaataagatggaacacgtgcaaaaatgtttaaccggcgagtccaactgtcatgccctgtctggatctacagccgaactgcgggaagatttggatcaagctaagactcagattggtatgacagaaagcctgcttaaggctctgtctccgtctgatagcctggagatcttcactaagctggaagagatccagcagcagatactgcagcagaaacattccatgattttgctggagaaccagatcggctgtcttacacccgaattgtctgagcttaagaagcaatacgaaagcgtttcggacctttttaacaccaaaaagagcgtgcttcaggatcacttctctaagctgctgaatgaccagtgtaagaattttaatgattggttcagtaatatcaaggtaaaccttaaggagtgcttcgagagctcagagacgaagaagtcagtggaacaaaaacttcagaaactgagtgattttttaaccttggaaggacgtaacagtaagatcaagcaggtggactctgttctcaagcatgtgaaaaaacacttaccaaaggcacacgtgaaggaattaatctcctggctggtcggtcaggagttcgagctggaaaaaatggaaagcatatgtcaagcccgagccaaggaattggaggactcattacaacagctcctgagactgcaggacgaccaccgaaacctgaggaaatggctgactaatcaggaggagaagtggaagggtatggaggaacccggcgagaagaccgagctcttctgtcaggctctcgctcggaagcgggagcagtttgagagcgtggcgcagctgaacaacagcctgaaggaatatggctttaccgaggaggaagagattatcatggaggccacttgcctgatggatcgctaccagacacttctcaggcagctgagcgagatcgaggaagaggataagctgctcccaactgaggatcagtcctttaacgatttggctcatgacgttatccactggatcaaggagattaaggagagcctaatggtcctcaatagcagcgaaggaaagatgccactcgaggaaaggattcagaagataaaagagatcattttgttaaaaccagaaggtgacgctaggatcgaaacaatcatgaaacaggccgaatctagcgaagcgccgcttgttcagaaaacgctcacggacatttcgaatcaatgggacaacaccctgcatcttgccagtacgtacctttcacatcaggagaagctgctgctggaaggagaaaaatacttgcaatcaaaggaggatctgcgacttatgcttatagagctgaagaagaaacaggaagccggctttgcactgcagcatggcctgcaggagaagaaggcccagctgaagatttataagaagttcctcaagaaggcccaggatctgacttcacttctgaaagaactgaagtctcagggtaactatctgctggagtgtacgaagaaccctagcttctcagaggagccttggctagagatcaagcacctccatgaaagcctgctccagcagctccaagactcagtgcagaatttggacggccatgtgcgtgagcacgactcttaccaagtgtgtgtcacagatctgaacaccacattagacaacttttcgaaggaattcgtcagtttctcagataagcccgtcgaccagattgctgtggaagaaaagctccagaagctgcaggaactagagaatcgcttgagcctccaagatggaacactgaaaaaaattctggccctggcgaagagcgtaaagcagaatacttcctccgtcggtcagaagattattaaagatgacataaagagcctccagtgcaaacagaaggacctggaaaatcgattagcgagtgccaagcaagaaatggagtgttgcttgaacagcatacttaagagcaagagatccaccgagaagaagggtaaattcactctccccggtcgcgaaaagcaagccaccagtgacgtgcaggaaagcacacaggagagcgctgcggtggaaaagctggaagaggattgggagattaataaggactctgcagtcgagatggcaatgagtaagcagttgagtctcaacgcccaggagagcatgaagaacacggaggacgagcggaaagtaaatgagctacaaaaccagcctctcgagctggatacaatgttgcgaaatgaacagttggaagaaatcgaaaagctctatactcagctagaagcgaaaaaggccgccatcaaaccactggaacagactgaatgcctgaataagaccgagaccggtgctttggtcctgcacaatatcggctactcggcacagcacctcgataatcttctgcaggcacttataaccctgaagaagaataaggaaagccaatactgcgttctgagggactttcaggaatatttggccgcagttgaaagtagcatgaaggccctgcttacagacaaggagagcctcaaggttggtcccttagactccgtgacgtacctcgacaagatcaaaaaattcatagcaagcatcgagaaggaaaaagatagcctcggcaacctcaagatcaagtgggaaaacttatcaaaccatgtgaccgacatggataagaagttactggagagccagatcaaacagctcgaacacgggtgggagcaggtggagcagcagattcagaaaaagtattcacagcaggtggtggagtatgacgagttcacgacacttatgaataaggtacaggacacagagattagtctgcagcaacagcagcaacatctgcagcttcgcctcaaatcaccagaggagagggcaggaaaccagagcatgattgctctaactacagatttacaagctacaaaacacggtttcagcgtgctcaaggggcaggcggagctgcaaatgaagcggatctggggtgagaaggaaaagaagaatctagaggatgggattaacaacctgaagaaacagtgggagacactggaacctctccacctggaggccgagaaccagattaagaaatgcgacatcagaaataagatgaaggaaacaatcctatgggctaagaacctgctcggagagttaaatccatccatccctctcttgcctgacgacatcctttcccagattagaaaatgtaaagttactcacgacggaatcctggccagacagcagagcgtagagagtctagctgaagaggtcaaggataaggtaccaagcctgactacgtatgaaggatccgatttaaacaacacgctggaggatctcaggaatcagtaccagatgctcgtgctcaagagtactcagcgatcacagcagttggagttcaaactggaagaacggtcaaacttctttgccatcatacgcaaattccagcttatggtccaggaaagcgagactcttattattccaagggtggagaccgccgcaaccgaggcagaactcaaacaccaccatgtgaccctggaagcttcccagaaagagttgcaggagattgacagtggcatcagcacacacctgcaggagcttacgaatatctatgaagagttgaatgtcttcgaacgtctatttttggaagaccaactgaaaaatctgaagatacgcaccaacagaatacagcgctttatccagaacacgtgcaatgaagtggagcataaaatcaagttctgccggcaattccatgaaaagaccagcgctttacaagaggaggctgactctattcaacgcaatgagctgctgctgaaccaagaagtcaacaagggcgtgaaagaggagatctataatctcaaggataggctgacggcgataaaatgctgcatcttgcaggtactgaaacttaagaaggttttcgactacattggactgaattgggattttagccagctggaccagctgcagacacaagtgtttgagaaggagaaggaactggaggaaaagattaaacagctggacactttcgaagaggaacacggcaagtatcaggctctgctctccaagatgcgagcaattgaccttcagatcaagaagatgaccgaagtggtacttaaggcgccagacagtagtcccgaaagccgtcgtctcaacgctcaaatcctgtcacagcggatcgaaaaggctaaatgtctctgcgacgagattatcaagaagctgaacgaaaataagacatttgacgacagctttaaagagaaggaaatcctgcaaatcaaattaaacgctgaggaaaacgacaagctgtataaggttctgcagaacatggtattggaactctcacctaaggagctagatgagaagaactgtcaagacaaattggaaacgtctctgcatgttctgaaccagattaagtctcaacttcagcagccactgctcatcaacctcgaaattaaacatattcagaacgaaaaggataattgcgaggcttttcaggaacaggtgtgggcagagatgtgtagtatcaaagccgtcaccgcaatagagaagcaacgagaagagaattcctcggaagcttccgatgtggagaccaaactgagggagtttgaggatctgcagatgcaactaaatacgtcaattgacctcagaactaacgtgctgaacgacgcttatgaaaatctgactcgatataaagaagcagtcacgagagctgtcgaatccataacctccttagaagcgataataatcccttaccgcgtagacgttggaaacccagaggaaagtctggagatgcccctcagaaagcaggaagagctggagtccactgtggcccatattcaggacttgactgagaaactcggcatgatctcctctcccgaagcgaagctccagctacagtacactctgcaggaattggtgagtaagaatagtgctatgaaggaggcctttaaagcacaggagactgaggcggaacgctacctagagaattacaagtgttacagaaagatggaagaggatatttacacaaacctctctaaaatggaaactgtgctcggacagtccatgagttccctccctctgagttatcgcgaagccctggaaaggctcgagcagtcaaaagccctggtgagcaacctgatctctaccaaggaggagctaatgaaattgagacagatcctccggcttctgcggctcagatgtactgagaatgacgggatttgtcttcttaaaattgtttcagccttgtgggagaaatggttaagtttgcttgaggctgcaaaagagtgggaaatgtggtgcgaagaactgaagcaagagtggaagtttgtgagcgaagagatcgaacgggaagcaattattcttgacaatcttcaggaagagctacccgaaatctctaagactaaggaagcagcgacaaccgaggaactcagtgagcttctggattgcctgtgccagtacggtgagaatgttgaaaaacagcagctcctgctgaccttgttgctgcagcgtatcaggagcatacagaatgtccccgagtcatcaggcgctgtggagaccgtccccgccttccaggaaataacctccatgaaagagcgctgtaacaagctgctgcaaaaagtacagaaaaataaagagctggtgcagaccgaaatccaagagagacattcattcactaaagagattatcgctctcaagaatttctttcagcagaccactacctcatttcaaaatatggccttccaggaccatcctgagaagtcagaacagttcgaggagttgcaaagtatattaaaaaaaggcaagctgacatttgagaacattatggagaagctaagaattaaatactctgagatgtacacaattgttccagccgagatcgagagccaagtggaggagtgtcggaaggctctcgaggatattgacgaaaaaatctccaatgaagtgctgaagagctccccctcctatgccatgcgaagaaagatcgaggagattaacaacggcctgcacaacgtggaaaagatgttacagcagaagtccaagaacatcgaaaaggcccaggaaattcagaagaaaatgtgggacgaattggacctgtggcatagcaaactgaacgaattggatagcgaagtgcaggacattgtcgaacaagatccaggacaagcgcaggagtggatggacaacctcatgattcctttccagcagtatcaacaagtgtcgcagagagccgagtgtaggacgtcacagctgaacaaagctaccgtgaaaatggaagagtactccgacctgctcaagtccacggaagcctggatcgagaacacatcccacctacttgctaatcctgcagattacgattctctccgaaccctgagccaccacgcttccaccgtccagatggctttagaagacagtgagcagaaacacaacctgctacacagcatattcatggaccttgaggatctctctattatatttgagactgatgagctgacccagtccattcaggagttgtctaaccaggtcaccgccctgcagcagaagatcatggagagcctgccacagatccagcgaatggctgatgacgtagtggcaattgagtccgaggtaaaaagcatggagaaacgcgtgtcgaaaattaagaccattttgctgtccaaggagatctttgacttcagccctgaagaacacctgaaacacggagaggtgattctcgaaaatattcgccccatgaaaaagacaatcgcagagatcgtgtcgtatcaggtggaactgcgcctgccacagactggtatgaaaccattaccagtgtttcagcgcaccaatcagctgctgcaggacatcaagctacttgaaaacgtgactcaggaacagaacgaattattgaaggtagtcattaagcagactaacgagtgggatgaagaaatcgaaaatctgaaacagatcctaaataactatagcgcccagttctccctcgagcatatgtctcctgatcaggctgacaaattgccccagctccagggagagatcgagagaatggagaagcagatcctgagcttgaatcagcgcaaggaggatcttctcgtcgacctgaaagctacagtattaaatctgcaccagcacctcaaacaggagcaggagggggtggaaagagatagactgccagctgttacctctgaagaggggggagtagctgaaagggacgcgtcggagcggaagctcaataggcggggctctatgagctatctggctgcagttgaggaggaagtagaagagtcaagcgttaaatctgataatggtgatgagaaagcagagccatcaccccaatcttggtcttctctttggaaacacgataaggatatggaagaggaccgcgctagtagttccagtggaacaattgtccaggaagcctacggaaagatctctacgtcggataactcaatggcacagattctgacccctgactcccttaatactgagcaggggcctgagtgctcactgaggccaaatcaaaccgaagaagggaccactcctccaatcgaggccgatactctggactcatctgacgcacaagggggactcgagccgagggtagaaaaaacaagacctgagccgaccgaagtgctacatgcctgcaagactcaggtagcagagcttgagctttggcttcagcaggcgaatgtggccgtagagccagagacccttaacgccgacatgcagcaggtgcttgaacagcagcttgttggttgccaggccatgctcactgagattgaacacaaggtcgcttttctactagaaacatgcaaggatcaggggctgggcgataacggagccacacagcacgaggccgaggccctgtccctgaaattgaagaccgttaagtgtaatctggagaaggtgcagatgatgcttcaggaaaaacactcggaggatcagcaccctaccattctcaagaaaagctctgaaccagaacaccaggaggccctgcaacccgtgaacctctcagaactcgagtccatcgtaactgagcgccctcagttttctcgccagaaagattttcaacagcaacaagtgctggagctgaaaccaatggagcagaaagatttcattaaattcattgaattcaacgccaaaaaaatgtggccacagtattgtcaacacgacaatgacacgacccaggagtcgtcggccagcaatcaggcttcctcccctgagaacgacgttcccgactcaattctgagccctcaagggcagaacggtgataaatggcagtacctccaccatgagctatcttccaagattaagctcccgctaccgcagctcgtagaaccccaggtttctaccaacatgggaattctcccttctgtaaccatgtacaactttaggtatccaacaaccgaggaactaaaaacatatacaacacagctcgaagatctcagacaagaggcttctaatttacagacgcaagaaaacatgacagaagaggcatacattaacctcgataagaagctgttcgaactctttctgaccctgtctcagtgtctctccagtgtcgaggaaatgctggagatgcctcggttgtaccgtgaagatggcagcgggcagcaggtgcattatgaaacactcgctctggagctgaaaaaactgtacctggctttgtctgataaaaagggcgatctcctgaaggcaatgacctggccaggcgaaaacaccaacttgctcctagagtgtttcgataatcttcaggtttgtctcgaacacacacaggcagccgcagtttgtcggagtaaatctctgaaagcgggcctggactacaatcgtagttatcagaacgaaatcaagcgtttgtatcatcagctgattaagtctaagacaagtttgcagcagtctttgaacgaaatctcgggtcagtcagtggctgaacagctccagaaagccgacgcttacactgtggaactggaaaacgcagaatctcgagtggctaaacttagagacgaaggcgagaggctacacttgccctacgcgttactgcaagaggtctataagttggaggacgttctggattctatgtggggaatgctgcgggctcgctacactgagttatctagcccatttgttaccgaatctcagcaagatgcactgctccagggaatggtggagctcgttaagattggcaaagagaagctggcacatggtcacctaaaacagaccaaatcaaaagtcgcactgcaggctcaaatcgagaaccataaagtgttctttcagaagctcgtcgcagacatgctgttgattcaggcctactctgccaagattcttccatccctactgcagaatcgggagactttttgggctgagcaggtcacggaggtgaagatcctagaagaaaagtcgaggcagtgcggcatgaagctgcagtctttactacaaaagtgggaggagttcgatgaaaattacgcatccctggaaaaagacctcgaaattttaatttcgaccctacctagtgtgtctctggttgaagagactgaggagaggcttgtggagagaatatccttttaccagcagatcaaaagaaacataggcggaaaacatgctcgcctttatcaaacgcttaacgaggggaaacaactcgtcgcaagcgtgagctgtcccgaacttgagggccagattgctaaactggaggagcagtggctctctctaaataagaaaatagaccacgagctacacaggctccaggccttgttgaagcacctgctctcctataatcgggactccgaccagctcaccaagtggctggaatcttctcaacacacacttaactactggaaggaacagagcctcaacgtatctcaggatttggataccatcagatccaatattaataatttctttgagttttcgaaggaggtcgatgagaaaagcagcctgaagacagccgtcatctctataggtaatcaattgcttcatcttaaggagaccgataccgcgaccttgcgggcatctctggctcaattcgagcaaaagtggacaatgctgattactcagctccctgacatccaggagaaactgcatcagctgcagatggaaaaactcccctcacgtaaagcaatcaccgagatgatctcatggatgaacaacgtcgagcatcagaccagcgacgaagactccgtacactcaccaagcagtgctagtcaggtgaaacaccttctgcaaaaacacaaggagttcaggatggagatggattacaagcagtggattgtcgactttgtcaaccagtccctacttcaactgtccacctgcgatgtggagagtaagaggtatgagcggaccgagttcgctgaacacctgggcgaaatgaatcgccagtggcacagagttcatggcatgctaaatcgcaagatccagcatctagagcagcttttggagagcattaccgaatctgagaataaaatccaaatcctgaacaattggcttgaggcgcaggaagagcggctcaagaccttgcagaaaccagaatccgtgattagcgtccagaagctactgctggactgccaggacatcgagaaccagctggccatcaagtccaaagctctggacgagctgaaacaatcctaccttactctagagtcgggggctgtaccattgctagaggacaccgcgagcagaatagatgagcttttccagaagaggtcctccgttctgacccaggtgaatcagctcaagacttccatgcagagtgtccttcaagagtggaagatatacgaccaactgtatgatgaagtgaacatgatgactatcaggttctggtattgtatggagcattcaaagccagtggtgctctcattggaaaccctgcggtgtcaggtggagaatttacaatctctgcaggatgaggccgaaagctctgaaggcagctgggagaaactgcaggaagtgatcggcaagcttaaagggttgtgcccctcagtagcagagattattgaagaaaaatgtcagaatactcataagcggtggacacaggtcaatcaagccatcgcagaccaactccagaaagcacagtcgttgctgcagctttggaaggcttactcaaacgcccacggagaggcagccgcgagactgaagcagcaagaggccaagttccagcaactagctaatatctccatgtcaggaaacaatttagccgaaatccttccccctgctcttcaggatattaaggagctgcagcacgacgtccagaagaccaaggaggctttcctgcagaatagctcagtcctcgatcggttacctcagcctgcagagtcaagcacacacatgttactgcctggccccctgcactcccttcagagagctgcatacctggaaaaaatgctgttagtgaaggccaatgaattcgagttcgtcctttcccagtttaaggattttggggtacggcttgagtcactcaagggcctgattatgcacgaagaagagaacttagataggctccaccagcaagagaaggagaacccggacagctttctgaatcatgtgctggccctaaccgctcaatcccctgatatcgagcatctgaatgaggtcagcctaaaactccctctaagcgacgtggccgtaaagactctgcagaacatgaaccgccagtggatacgcgccacagccacagcactggagagatgttctgaacttcagggcatcggccttaacgagaaatttttatactgctgcgagaagtggatccagctactagagaaaatcgaagaagcgctgaaggtggatgtggcgaacagcctccccgagttactggagcagcaaaagacctataaaatgctggaggccgaggtgtccatcaatcagactatagctgactcctacgtaactcagtccctacagctcctggacaccactgaaatagaaaatcgcccagaatttatcaccgagttcagtaaacttacagataggtggcagaacgctgtccagggagttagacagcgaaaaggcgatgtggacggcctggttcgtcagtggcaggactttaccacgagcgtggagaacctattccgctttcttaccgacacatctcacttactctcagctgttaagggccaggaacgtttttccttataccagaccaggagcctgatccacgagcttaagaacaaagaaatccactttcagcgcagaagaaccacctgcgccctcactctggaggcaggagagaaactgttgcttacaacggacctgaagactaaagaatctgtcggacgcaggatctctcagctgcaggactcatggaaggacatggagccgcagctggctgagatgatcaagcagttccagtcaactgtagagacctgggatcagtgtgagaaaaaaatcaaggagctgaagagccgactgcaggtgctcaaagcacaatccgaagaccctctgccagagctgcacgaggatctgcataacgaaaaggagctcatcaaggagctggaacagagcttggctagttggacccagaatctcaaggaactccagaccatgaaggccgacctgacccgccacgtactagtggaagacgtgatggtattgaaggagcagattgagcatttgcatagacaatgggaagatctgtgcctgcgggtagccattaggaaacaggaaattgaggacagactcaatacgtgggtagtgttcaatgaaaagaacaaagagctgtgtgcatggttggtgcagatggaaaacaaagtgctccaaaccgcagacattagcattgaggaaatgatagaaaagttgcagaaagattgtatggaggaaatcaatcttttcagtgagaacaaactgcagttaaagcagatgggtgaccagctgatcaaggcttcaaataagtctagggccgctgagatcgatgataaactgaacaagataaatgacagatggcagcacttattcgatgtaataggttccagggtgaagaagctgaaagagaccttcgcctttatccaacagttagacaaaaatatgtcaaatttgagaacatggttagcccggatagaaagtgagctgagcaaacctgtggtttatgacgtctgtgacgaccaagaaatccagaagcgcctcgctgaacaacaggatctccagcgagacatagagcagcactccgcaggagtggagtctgtttttaatatctgtgacgtcctcttgcacgactcagatgcctgtgcaaatgaaaccgagtgcgactccatccagcagaccacaaggtcacttgaccgtcgatggcggaatatctgtgcaatgagcatggagcgccgcatgaagattgaggaaacttggagactatggcagaagtttctggacgactactctcgatttgaagactggttgaagagtgccgaaagaacagctgcgtgcccaaatagctccgaagttctctacaccagcgctaaggaagagctcaagagattcgaggcttttcagagacagatccatgagcggcttacacagttagaattgataaacaaacagtatcggcgactcgctagggagaatagaaccgataccgcaagccggctgaagcagatggtgcatgagggtaatcagcgttgggataacttgcagcgtagagtgacagcagttttgaggcggttgagacacttcactaaccagcgggaggaattcgagggcaccagagaaagcatccttgtgtggctgacagagatggatctacaattgacaaatgtggagcacttttctgaaagcgatgctgacgacaagatgcgccagctgaacggattccagcaggagatcactctgaatacaaacaaaatcgaccagcttattgttttcggcgagcaattgatccagaagagcgagcccctggacgcagtacttattgaagacgagttggaagaactccatagatattgccaggaggtgtttgggcgcgtgtctaggtttcacagacgcttgacatcctgcacgccaggtcttgaggatgagaaggaagcttcagaaaacgaaaccgacatggaggacccccgagaaatccagacagattcatggaggaagcggggtgaatcagaggagccaagctctcctcagtcactctgtcacctcgttgcccctggacatgagcggagcggctgcgaaacacccgtcagcgttgactccatccctctggagtgggaccacactggggacgtcggcggctcaagttcccacgaggaggacgaggagggtccatactattccgcactgagcgatgtggagattcccgaaaatcccgaagcgtacctgaagatgactactaaaactctaaaggccagctctgggaagtcgatttctgacggccacagctggcatgtgcctgattcaccatcctgccctgagcatcactataagcagatggaaggggatcgaaatgtgccgcctgtcccccccgcctctagtacaccttacaagcctccttacggcaagctgcttttgccgccaggcacagacggcggaaaggaggggcctagagtgctgaacggcaatccacagcaggaagacggagggttggccggcatcaccgagcaacaatccggcgcatttgaccgttgggaaatgattcaggcccaggaactgcacaataagttaaaaattaagcagaatttgcagcagctcaattccgacatctccgccattactacctggctcaagaagaccgaagcagaattggagatgctgaagatggctaagccaccatccgatatccaggagatagagctcagggtgaaacggttacaggaaattctgaaggcattcgacacctataaggctctcgtcgttagcgtgaatgtttcgagcaaagaattcctccagactgaatctccagagtctacagagctacagtccagacttagacagttgtcccttctgtgggaggctgctcaaggagctgttgacagttggcgtgggggtcttagacagtccctgatgcagtgccaggactttcaccagctcagccagaacctgttgctatggctcgcctccgccaagaaccggaggcagaaagcccacgtgaccgatcctaaggctgaccctcgggcactattggaatgtaggcgtgaactgatgcaactggaaaaagagcttgttgagcggcaacctcaggtcgatatgctgcaagaaatcagtaattctctcctgatcaagggacatggcgaggattgcatcgaggctgaggagaaagtgcacgtgatcgagaaaaaactgaagcagctgcgtgagcaggtttctcaggatcttatggctctacagggcacgcaaaatcctgccagccccctgcctagctttgacgaagtggacagtggcgaccagcccccagctacatctgttccagcccctagggccaaatttcgagcggtgcgcacaaccgagggcgaagaagaaactgaaagccgtgtgcctgggagtacaagaccacagcgaagctttttgtcaagagtggtccgagccgctctgccactgcagctcctcctgctcctcctgctattactagcatgcctattaccctcttctgaagaggattattcttgcacacaggccaacaattttgccagatccttctaccccatgttaagatataccaacggcccaccacctacatag

SEQ ID NO: 257208 - DNA, 10626 bp, Artificial Sequence
  derived and/or modified sequence
atggaggaggacatctacaccaacctgagcaagatggagaccgtgctcgggcagtcaatgagctcactccctctgagttatcgagaagctttagagcgattggaacagtccaaagcactggtgagcaaccttattagcaccaaagaagaactgatgaagctgagacaaatactccgactgctgcggctccgatgcaccgagaacgacgggatttgcctgctgaagattgtgtccgcactgtgggaaaagtggctctccctgctggaggccgctaaagagtgggagatgtggtgtgaggagctgaagcaggaatggaagtttgttagcgaggagatcgagagagaagctataatccttgacaatctacaggaggagctgcccgaaattagtaaaacaaaggaagcggcgacaacggaggagctgtctgaactgttggattgcctttgtcaatatggggaaaatgtggaaaagcagcaactgctcctgaccctgctgcttcagcggatccgcagcatccaaaatgttcccgaatcctcaggggccgtcgagactgtccccgcattccaggagatcacctcaatgaaggagcggtgcaataaattgctgcagaaagtacagaaaaacaaagaactggtgcaaactgagatccaggaaagacactcttttaccaaagaaatcatcgctctgaaaaacttctttcagcagacaaccacctccttccaaaacatggctttccaggatcacccagagaaaagcgagcagttcgaggaactgcagtcaatccttaaaaagggtaaactgacgttcgaaaacattatggaaaaactacgcatcaagtactccgagatgtatactattgtacctgcggaaatcgagagccaagtcgaagaatgcaggaaggccctagaggacattgacgaaaaaattagcaacgaggtgcttaaatcaagtccctcttatgccatgcggcgtaagattgaagagattaataatggactgcataatgtggaaaagatgctccaacaaaagagcaaaaacattgagaaagcacaggaaatccagaaaaagatgtgggatgaactggatctgtggcatagcaaactgaacgaattggattctgaggtccaggacattgtggaacaggaccccggccaagctcaggagtggatggataatctgatgattccctttcaacagtatcagcaggtctcccagcgtgctgaatgccgaacttcacagctcaataaagctactgtcaaaatggaagaatatagcgacttgctgaaaagcaccgaagcatggatcgagaatacatcccaccttctcgcaaatcccgcagattatgatagcttgaggacgctgtctcatcacgcaagcaccgtgcagatggctctcgaggactcagagcagaaacacaatctcctgcactcgatctttatggacctggaggacttatctattatcttcgagaccgatgagctcacccagagcatccaggagttgagcaaccaagtgaccgctctgcagcagaaaatcatggagagcctcccccagattcagcgtatggccgacgacgtcgtggctattgagtctgaggtgaagtctatggaaaagcgcgtttcaaaaataaaaaccattcttctgagcaaagagattttcgacttcagccctgaagaacacttaaagcatggggaagtgatcctggagaacattaggccaatgaaaaagactattgccgagatcgtctcttatcaggtggagctgaggctgccgcagaccggcatgaagccacttccagtctttcagaggacaaatcagctcctgcaggatattaagctgctcgagaacgtaacacaggagcaaaacgagttgctgaaagtggtcatcaaacaaactaacgagtgggacgaagaaattgaaaacctaaaacaaatactcaacaattactcggcccagtttagtctggagcatatgagtccagaccaggccgacaaactaccacagttacagggcgagatagagcgcatggagaagcaaatcttgagtctcaaccagcggaaggaggacctgctggtggacctaaaagcaacagtcctgaacctgcaccagcatctcaaacaagagcaggaaggtgtagaaagggatcgcctgccagccgtaacttcggaggaaggcggggtcgcagagcgggatgcctcagaaagaaaattgaacagacgtggctctatgtcctatcttgctgccgtcgaggaggaagtagaagagtctagtgtgaaatccgacaacggcgacgaaaaagctgaaccttccccacagagttggtcaagtctgtggaagcacgacaaggatatggaggaggaccgggcctcatcgagcagcggaactatagttcaggaggcttacggcaaaatttccactagtgataattctatggcacagatcctgactcctgactcactcaacaccgaacaaggacctgaatgttccttgcgaccaaaccagacagaggaggggactacccctccaatcgaggctgacaccttagattcctccgatgcccaggggggacttgagccacgggttgaaaagaccagaccggaacctaccgaagtcttgcacgcgtgcaagacccaagtggcagagctggaactttggctgcaacaggctaatgtggccgtggagcccgagacactgaatgccgacatgcagcaagtgctggaacaacaactggttggctgccaggctatgctgaccgagatcgaacataaggtggccttccttcttgaaacttgcaaagaccagggactgggtgataatggcgccacccaacacgaggcagaggcactttcactcaagctcaaaacagtgaaatgtaacctggagaaggtccaaatgatgctgcaggagaagcattcagaagaccagcacccaacaatccttaaaaagtcttctgagccagagcatcaagaggcgctccagccggtgaatttaagtgaactcgagtccattgtaactgaacgtccacagttcagccgccagaaagacttccaacagcaacaggtgcttgagctcaagcccatggaacaaaaagactttattaaatttatcgagttcaacgctaagaagatgtggccacagtactgccagcacgacaatgacaccacccaggagtctagtgcctctaatcaagcaagttcgcccgagaacgatgttcccgattccattttatccccccagggccaaaacggggataagtggcagtatttacatcatgaactgtctagtaagataaaattacccctgcctcagttggttgagccccaggtcagcaccaatatgggcatactgccatctgtgacgatgtacaacttccgatatccaaccacagaggaactgaaaacctatacaacgcaactcgaagacctgcgccaggaggctagcaacctgcagactcaagaaaacatgacagaggaggcctacatcaacctagacaagaaactgtttgaactgttcttaaccctctcacagtgcttatcatccgttgaagaaatgcttgagatgccgcgcctttaccgggaggacggatcaggccagcaggtacattacgagacgctggctttagaactgaaaaaactctacctggctctgagcgataagaagggcgacctcttgaaggcgatgacgtggccaggagagaacacgaaccttctgctggaatgtttcgataaccttcaggtttgcctcgaacatactcaggctgctgctgtgtgtagatccaaaagtttgaaggctggcctcgactataatcgcagctaccaaaatgagatcaaacggttgtatcaccagcttattaagagtaagacctcactccaacagtccctaaatgaaattagtggacagtccgtagcagaacaattgcaaaaggcagacgcctatacagttgaacttgagaacgcagaatccagagtagctaagctgcgcgacgaaggcgaaaggctgcacttaccctatgcactgctgcaggaggtgtataagctggaggatgtcctagactccatgtggggcatgctccgcgctagatatactgaactgagttccccattcgttactgagtctcaacaggacgcactcctacaagggatggtggaactggtcaagatcgggaaagaaaagttagcccacggccacctaaagcagacaaagagtaaagtggccctccaggcccagatcgagaatcataaggtgttctttcaaaagctcgtggccgacatgctgcttattcaggcctatagtgcaaagatcctgccctctttgctgcagaatcgggagaccttctgggctgagcaggtgaccgaggttaagattctggaggaaaagtctcgtcagtgtggtatgaagctgcagtcattattgcagaagtgggaggagttcgacgagaattatgcctcccttgagaaggacctcgagattctgatttccaccctgccctctgtctctttggtggaggaaaccgaggaacggctcgtggaaaggatatcgttctaccagcagatcaagaggaacataggtggtaaacatgcaaggctgtaccaaaccttaaacgaaggaaaacagctcgtggcaagcgtcagttgtcccgaactcgagggacagatcgccaagctggaagagcaatggttgtctctgaacaaaaaaattgatcacgaactccacagacttcaggccctactgaagcacttactgtcatataatagagatagtgatcaactcacaaaatggttggagagcagccagcataccctcaattactggaaggaacagtctctgaatgtgtcccaagatttggacacaattcgctctaacataaacaacttcttcgagttctccaaggaagtagacgagaaaagcagccttaaaactgcagtgatctctatagggaaccagctgctgcacctcaaagaaaccgatactgccaccctccgagccagtctggctcagtttgagcaaaagtggacaatgctgattacacagctacccgacattcaagaaaagcttcatcagctgcagatggagaagttgccatcccgcaaggcgatcaccgaaatgatttcctggatgaataatgttgaacatcagacatcggacgaagactcagtccactctccatcttcagcctcccaggtgaagcacctgctgcagaagcacaaagaattcagaatggaaatggattataagcagtggatcgtggactttgttaatcagagtctgcttcagctgagcacttgcgacgtggaaagtaaaaggtatgagagaacagaatttgcggaacatctcggcgaaatgaacagacagtggcacagagtccacggcatgctgaatcggaagatacaacacctggaacagttgctggagtccatcacagagagcgaaaacaaaattcagattctgaataattggctggaggcacaggaagaacgcctgaaaacattgcagaaacccgagtctgtgataagcgtgcagaaattactcctcgattgtcaagacatagagaatcagctggctattaagtcaaaggccctggacgagctgaagcagagctatcttactttagagtccggagccgtccctctgctcgaagataccgcgtctcggatcgatgagctgtttcaaaagagatcaagcgttctgacacaggtaaatcagctcaaaacttctatgcagagcgtgctccaggagtggaagatctacgatcaactctatgacgaggtgaacatgatgactatcaggttctggtattgtatggaacactcaaagccggtggtccttagccttgagaccctgcggtgccaagtggagaatctgcagagtcttcaggatgaggcagaatccagcgaaggcagttgggaaaaactccaggaggtgatcggaaagctgaaaggactgtgccccagtgttgcggaaattattgaggaaaaatgccagaacacccacaagcggtggacacaggtgaaccaggcgatcgccgatcaattgcaaaaggctcagtctctcttgcaactatggaaagcctactctaatgcccacggcgaagccgccgcccggctcaagcagcaagaagccaagtttcagcagttagcaaatatttctatgtccggaaataatctggccgaaatattgccaccggccttgcaggacataaaggagctccagcatgatgtgcagaagaccaaagaggccttcctccaaaattcgtcagtattagaccgcctcccacaacctgccgaatcctcaacgcacatgctgttaccaggacccctgcatagtctgcagcgtgcggcctatctggagaagatgctcttggtaaaagcaaatgaatttgaatttgtactaagccaattcaaggacttcggagtacgactggaaagtttgaaaggcttaatcatgcatgaggaggaaaatttggacaggctgcatcagcaggaaaaggagaaccccgactcattcctgaatcatgtacttgccctgaccgctcagtctcctgatatcgagcaccttaacgaagtcagcctgaagctacccctcagtgacgtcgccgttaagactctacagaatatgaacaggcagtggatacgggccactgctactgcactcgagcggtgttccgagctccagggcattggcttgaatgaaaaatttctgtattgctgtgaaaagtggatccagctgctggagaagattgaggaagctctgaaagttgacgtcgctaactcactgccagaactactggaacagcaaaaaacatataagatgctggaggccgaagtctccatcaatcagacgattgccgactcgtacgtaacacagtccctccagttgctggatacaactgaaattgagaatcgcccagagttcataactgaattcagtaaactcaccgatcgctggcagaacgcggtgcaaggtgttcggcaacggaagggcgatgttgacggtctggtgcgccagtggcaggactttaccacctcggtggagaacctcttcagattcctcacagacacgtcgcatttgctgtccgcggtaaaaggccaggagaggttctcattgtaccagacgcggagcctcattcatgaacttaagaataaggagattcacttccagagacggagaacgacttgcgccctgaccctagaagcaggagaaaagctgctcctgaccactgatcttaaaacaaaagagtccgtaggccggcggatttcacaactgcaagactcatggaaagatatggagcctcaactggcggaaatgatcaaacaatttcaatctaccgtggaaacctgggaccaatgtgaaaagaaaattaaggaactgaagagtcgtctgcaggtgctgaaggcgcagtcagaggatcctctacctgagcttcacgaggacctacataacgaaaaggagctgattaaagagctggagcaatcattagcctcttggactcagaacctaaaggagctgcaaacaatgaaggcagacctgactagacatgtgctggttgaggatgtgatggtgcttaaagaacagattgagcacctgcatagacagtgggaggacctgtgtcttagggttgcgatccggaaacaggaaatagaagacagattgaacacatgggtggtattcaatgaaaagaacaaagaattgtgcgcgtggctggtgcagatggagaacaaggtgctccagacagccgatatctccattgaagagatgattgaaaagctgcagaaagattgtatggaagagatcaatctcttttcggaaaacaaactacaactgaagcaaatgggggaccaactcatcaaagctagtaataagagccgggccgccgaaatcgatgataaactcaacaagattaacgaccggtggcagcatttattcgatgttattgggtctagagttaagaagctcaaggagaccttcgctttcatccagcagctcgacaaaaacatgtcaaatcttaggacatggctagctcgcattgagtcagagttgtccaagcccgttgtgtacgacgtgtgtgatgatcaggagatacaaaagcgactcgctgagcagcaggatctgcaacgcgatatcgaacaacactcagccggcgttgagagtgtatttaacatctgcgacgtcctgctccacgacagcgacgcatgtgcgaacgagactgagtgcgatagcattcagcagacaacacgaagtctggatcggaggtggcgcaatatctgtgctatgtccatggagaggaggatgaagatcgaggagacctggcgcctctggcagaagttccttgacgactactcgaggttcgaggattggctcaagagcgcagagcgaactgctgcctgccctaattcctccgaggtactctacacctctgctaaggaagaactgaaaaggttcgaggcgttccaacgccaaatccatgaaaggctgacccagcttgaactgattaataaacagtaccgtcgcttggcccgcgaaaacagaacagatactgcctcgaggctgaaacagatggtccacgaaggaaaccaacgctgggacaacttacaacgccgcgtaactgcagtgctgcggcgactacgtcattttacgaaccagcgcgaggagtttgagggcacccgagaaagcatactagtttggttgacagagatggacctgcagctgaccaacgtggaacacttttctgaatccgacgccgacgacaagatgcggcagctgaacggattccaacaggagatcaccttaaatactaacaaaatagaccagcttattgtcttcggggagcagctgatccagaagagcgaaccgttagacgcagtcctaatagaagacgagctcgaggaactgcacaggtactgccaggaggtcttcggtcgggtctcccgattccataggcgcctgacatcctgcacgccaggcttagaagatgaaaaagaggcctcagagaacgaaactgatatggaggaccctcgggaaatacagaccgatagctggaggaagcgtggcgagagtgaggaaccatcatccccccaaagcctgtgccacctcgttgcacccggccatgaacgatctggctgcgaaactcccgtgtccgttgacagcattccgctggagtgggaccataccggagatgtaggcgggtccagctcgcacgaggaggacgaagaggggccctactactctgctctttccgatgtggagatccccgaaaaccccgaagcctacttgaaaatgactacaaaaacacttaaggcctcttcgggcaagagcatctcagacggacatagttggcatgtgcctgactcgccctcttgcccagagcatcactataagcagatggagggcgacaggaacgtacctcccgtcccccctgcatctagcactccttacaagcccccttatggcaagcttctgctgccacccggcactgatggagggaaggaggggccacgcgtgctgaatggcaacccacagcaggaggacggaggcttagccggcatcactgagcagcagtccggagcctttgataggtgggaaatgattcaggcacaagaactacataacaagctgaagatcaaacagaatctgcagcagcttaatagtgatatctccgcaatcacaacttggctgaaaaagactgaagctgagctggaaatgctgaagatggccaaacctccaagcgatattcaggaaatagaactgagggtgaagaggctgcaagaaatcctgaaggcctttgacacgtataaagcgcttgtcgtctcggtcaatgtgagctccaaagaatttctgcagaccgagagtccagagtcaaccgaactccaatcacgtctgaggcaactgtcactgttgtgggaagcagcccaaggagcagtagacagctggcggggcggcctcaggcagtccctgatgcagtgtcaagactttcatcaattatctcaaaatctcctgctttggctcgccagcgctaagaataggcggcaaaaagctcatgtgacggacccgaaagccgatccaagggcactgctggagtgcaggagagagctgatgcagctggagaaggaactggtggaacgccagccccaagtagatatgcttcaggagatttcgaacagtcttctgatcaagggccacggggaggactgcatagaagctgaggaaaaagtacatgtaatagaaaagaaacttaagcaattgcgggaacaggtgtcccaagacctgatggcccttcaggggacccagaatcccgctagtccactccctagcttcgatgaggtggactccggcgaccagccacccgccacaagtgttccagcccctagagccaagtttagagcagttaggaccaccgagggggaagaggagacagaatcaagagtgccgggttccacgcgaccacagcgctcctttctcagccgcgttgtcagagcggcactgcccttgcagctactcctgttattattgctactcctcgcctgcctgctgccaagctctgaggaggactacagttgcacccaggcaaacaactttgcccgctcattttaccccatgctgaggtacacaaatgggcccccccctacttag

SEQ ID NO: 257209 - DNA, 20724 bp, Artificial Sequence
  derived and/or modified sequence
atggctagctctcctgaactcccgaccgaagatgagcagggctcctggggaatcgacgatctgcatattagcctccaggcggagcaggaggacacccagaagaaggcctttacatgttggattaattcccagctggcacggcatacaagtccttccgttatctcagatctgtttacagacattaaaaaagggcacgtcctgctggatctcctcgaggtcctgtccggacaacagctaccaagggacaagggatccaatacattccagtgtaggatcaatatagaacatgctctgacattcctgcgtaataggtccattaaactgatcaatatccacgtgacagatattattgacggaaatccaagtatcatcctaggcctcatctggactataatactgcactttcatattgaaaagctggcccagaccctttcctgcaactataatcagcctagcctagacgacgtgagtgtagtggattcctcccccgcttcatcccctcctgcgaagaaatgttctaaagtacaggcccgttggcagatgagcgccaggaaagctttgctgctgtgggcacaggagcaatgcgcgacatacgaatcggtcaatgtgacagacttcaagtcttcgtggcggaacgggatggcattcctggcaatcatccacgcgctcagaccagacttgatcgatatgaagtctgtcaagcaccgatccaacaaggacaacctgcgagaggccttccgcatcgccgagcaggagctcaaaattccccgactcctggagcctgaagacgtcgatgtcgtggatcctgacgagaaatctattatgacctacgtggcccaatttttgcagtatagtaaggacgcccctggcacgggggaagaggcacaagggaaagttaaagacgccatgggttggctcacgctccagaaagagaagctccagaaactgctgaaggattccgagaacgacacatattttaaaaagtacaactctctgctgagctttatggagtcatttaatgaagagaaaaaatcttttctggacgtgctgagcataaagagagacctggacgagttagacaaagatcatttgcaactaagagaagcatgggacgggttggaccaccaaattaatgcttggaagatcaagctgaattacgctttgcccccacctctgcatcagaccgaggcgtggctgcaggaggtcgaggagttaatggatgaagatttgagcgccagccaggaccattcacaggctgtcaccctcattcaggagaagatgactctgttcaagtcccttatggaccgcttcgagcaccatagcaatattctattgactttcgagaataaggatgagaaccacctccctcttgttcctcccaacaagttggaagagatgaagcggcgaatcaacaatattctggagaaaaaattcattctgcttctcgagttccattattataaatgcctggtcctggggttggtggacgaagtcaagagcaagctggacatttggaatattaaatatggctcccgcgaaagcgtggaactgctcttggaggactggcacaagtttattgaagagaaggaattcctggcaagacttgacacatctttccagaaatgcggcgagatctacaaaaatttggccggagagtgtcagaatatcaacaaacagtacatgatggtgaagagcgacgtttgcatgtaccgcaagaacatatacaatgtcaagagcactttgcagaaggtgcttgcctgttgggctacctacgtcgaaaatctccgcctcctccgcgcttgttttgaggagacaaagaaagaggaaatcaaggaggtgcctttcgagacattggctcaatggaatcttgagcacgccacactcaatgaggccggtaacttcctggttgaggtaagcaacgatgtcgtaggaagctctatctcaaaggagcttcgcaggctaaataaacggtggcgcaaattggtaagtaaaacccagctggaaatgaacctgcctcttatgatcaaaaaacaggaccagcctactttcgataacagcggtaacattctgtccaaggaggaaaaagccaccgtagaattctctactgacatgagcgttgagttaccagagaactataaccagaacattaaggccggtgagaaacacgaaaaggagaatgaagagttcacaggacagctgaaagttgcgaaagacgtggaaaaactaattggacaagtagaaatatgggaagccgaagccaagagtgttctcgatcaggatgatgtcgatacgagcatggaggaatcgttgaagcaccttatcgctaagggttctatgttcgacgagttgatggccaggagtgaagacatgcttcagatggacattcaaaacatcagctctcaggagtcctttcaacatgtgctcaccacaggactgcaagcaaagattcaagaggccaaagaaaaggttcagatcaatgtggtcaagcttatcgcagcacttaagaacctgaccgatgtttcacctgatctggatatcaggctgaagatggaagaatctcagaaagagctggagtcatatatgatgcgtgctcagcaactgctaggccagcgggaatccccaggtgaactgatttctaaacataaagaggccctgatcatatcaaacacgaaaagcctggccaagtacctgaaggcagtggaagaactgaaaaacaacgttaccgaggatattaaaatgagcttggaggagaaaagtcgtgacgtttgtgccaagtgggaaagcctgcaccatgagctgtcactatatgtccaacaactaaaaattgatattgaaaaaggcaagctttctgacaatatcctgaaacttgagaagcagatcaataaagagaagaaacttataagacgcggacggacaaaagggttgatcaaagagcatgaggcatgtttctccgaggaaggttgcttataccagctgaatcaccacatggaggtgttgagagaattatgtgaggaactgcccagtcaaaagtcccagcaggaggtaaaaagactgctgaaggattacgagcaaaagatcgagaggctcctcaagtgcgcttcagaaatccatatgaccctacagccaactgccggaggaacttccaaaaacgaggggactatcacaacgtctgaaaatcgtggtggggacccacacagtgaagcaccattcgctaagtcagataaccaaccatctaccgagaaggctatggaacccacgatgaaattctcgctggccagtgtactccggcctctgcaggaagaaagcatcatggaaaaagactatagcgcatcaataaactcactgctggagaggtacgacacttaccgggacatcctggagcaccacttgcaaaataacaagtttcgtatcaccagtgatttctcctccgaggaggaccgatcttcttcttgtctgcaggcgaaactaacagatctccaggtgatcaagaatgaaactgacgcccgatggaaggaattcgaaatcattagcttaaaactggagaatcatgtgaatgatattaagaaaccctttgtcattaaggagagggatacacttaaggagagagaaagagagctgcagatgactctgaacactcgcatggagtcccttgagactgccttacggctggttctaccagtggagaaggcaagcttgctcttatgcggcagcgacctgcccctgcataagatggccattcaggggtttcacctgattgacgctgaccgcatctatcagcacctgcgaaacatccaggacagcatagccaaacaaatcgagatatgtaacaggctggaagaacccggaaacttcgtactgaaggaactccaccccttcgacctccatgctatgcaaaacatcatcctcaagtacaagactcagttcgagggcatgaatcatcgcgtccaaaggtcagaggacactctcaaagccttggaggatttcctggcctcccttcggacagcaaaactttccgcggaacccgttacggacctgagcgctagcgacacccaagtggctcaggagaatacactgacagtgaaaaacaaggaaggagagatccacttaatgaaagacaaagctaaacatctcgacaaatgcttgaagatgttagacatgagctttaaagacgccgaacggggtgacgataccagctgtgagaacttgctggacgcctttagcattaagttaagtgagacacacgggtatggagtccaggaggagtttacggaagaaaataagctgctggaagcctgtatattcaaaaataacgaacttctgaaaaacatccaggacgttcagagtcagatctctaagattggcttaaaggatccgaccgttcccgctgtcaaacatcgcaagaaaagcttgatccgcttggacaaggtgctagacgagtacgaggaggagaaaagacatctacaagagatggctaactccctgccacattttaaggatggccgagaaaaaaccgtgaatcagcaatgccaaaatacggtggtcttgtgggagaatacaaaggccctcgttacggagtgcctggaacagtgtgggagagtactggaactgctcaagcagtatcagaattttaaatcgatactaacaaccttaattcagaaagaagagtccgtaatctctttgcaggcctcctacatgggtaaagagaacctgaaaaaaagaattgccgagattgaaattgttaaggaggagttcaacgagcatttggaagttgtggacaagatcaatcaggtgtgcaagaatcttcaattctatctcaataagatgaagacattcgaagagccgccttttgagaaggaagcaaacataatcgtcgaccgctggctcgatatcaatgagaaaaccgaggactattacgagaacctggggagagccctagcactttgggacaagttatttaatctcaaaaatgtgattgacgaatggactgagaaggccctccagaagatggaacttcaccagctgaccgaagaggaccgagagcggctgaaggaagagttgcaggtgcacgagcaaaagacatccgaattctcacgaagagttgcggaaatccaatttctactccaaagcagcgagatccctctcgagctacaggttatggaatcctcgattctgaacaaaatggaacacgttcagaaatgccttaccggcgaatcaaactgtcatgccttatcaggttcgaccgccgagctgcgggaagacctggaccaggccaagactcagataggaatgactgagtcattattgaaggccctttcaccttctgacagtttagagatttttacaaaactggaggagatccagcagcagatcttgcagcaaaaacacagtatgattcttctcgaaaaccaaataggttgcctgacgccagaactgtcagaattaaaaaaacagtacgagagcgtgagcgatctgtttaacactaagaagtccgtcctgcaagatcacttctccaaactgctgaacgatcagtgtaagaattttaacgattggttttccaatatcaaggtaaacttgaaggaatgcttcgagtctagcgaaactaagaagagtgtcgagcagaagttgcagaaactatcagatttccttacactcgagggacgcaatagcaaaataaaacaggttgacagtgtgctcaaacacgtgaagaagcatctccccaaggcccacgtaaaggaacttatctcatggcttgttggacaggagtttgagctcgagaagatggaatccatctgccaggccagagccaaagagctggaggattctctgcagcagttgctgagactgcaagatgaccatagaaatcttaggaagtggctgaccaatcaggaagagaaatggaaaggaatggaagaacccggtgagaaaaccgagctgttctgccaggccctcgcgcgaaagcgcgagcagtttgagtccgtcgcccaattgaataattcactcaaggaatacggctttactgaggaagaagagatcatcatggaagccacatgccttatggacaggtaccagacactactccgtcagctttccgaaattgaggaggaagacaaactccttcccactgaagatcaaagctttaacgatttggctcatgacgtgattcactggatcaaagagatcaaagagtctttaatggtgctaaattcaagcgaggggaaaatgccactagaggaaagaatccagaagatcaaggaaatcatcctgttaaaaccggaaggtgacgcaaggattgaaaccatcatgaagcaggccgagtcctcagaggcaccattagtccagaaaactctgactgatatcagtaatcaatgggacaatacactccatttagcctccacatacctttctcaccaggagaagttactgctggagggggagaagtacctgcagagtaaggaggacctaagactgatgctgattgagctgaaaaagaagcaggaagcaggtttcgccctacagcacggcctccaggagaagaaagcacagctcaaaatctacaaaaaattcctgaaaaaagctcaagacctaactagtttgcttaaagaactgaagtctcagggtaactacctgcttgagtgcacaaagaatccgagtttctccgaagaaccatggctagaaattaaacacctgcatgagtctttattgcaacaacttcaagactcagttcagaacctggatggccacgttcgtgaacacgactcctatcaggtatgtgttaccgaccttaataccacactggataatttttctaaggagttcgtttctttttctgacaaacctgtcgaccagattgcagtagaagaaaaactccagaagttacaagagttggaaaacagactttccctgcaggatggcaccttgaagaagatcctggcgctcgctaaatcggtgaagcaaaatacaagctctgtgggtcagaagattattaaggacgatatcaagtctttgcagtgcaagcagaaagatttggagaaccgactggctagtgccaagcaagaaatggagtgttgcttgaacagcattctgaaatccaagcgctctacggagaagaagggaaagttcacactgcctggcagggaaaagcaagctaccagtgatgtgcaggagtcaacccaagagagcgccgctgtcgaaaaattagaggaagattgggagatcaacaaggactccgctgtcgagatggccatgtctaaacagctcagcttaaacgcgcaagagtccatgaagaatacagaggatgaaagaaaggtgaatgaactgcaaaaccagcctttagagcttgatacaatgctgcggaatgaacagctagaggaaattgaaaaactgtacacccagctggaggccaagaaggccgctatcaaaccattagaacagactgagtgtctcaataagactgagacaggcgcactggtgctgcataatatcggatactccgcacagcacctggataacttgctacaagcgctaattacattgaagaaaaataaagaaagtcaatactgcgtactccgtgactttcaggaatacttagcagcagtggagtcgtccatgaaagcacttctgacagacaaggaaagtctgaaagtgggcccacttgattccgtgacctatctggacaagatcaagaagtttattgccagcattgaaaaggagaaggactcgctgggcaacctcaagataaaatgggagaacctatccaatcacgtgacagacatggataagaagctcttagagtcgcagatcaaacagctcgaacacggttgggagcaggtggaacagcagattcagaaaaagtactcccaacaggtcgtggaatatgacgaatttacaaccctgatgaacaaagtgcaggacacggaaatcagcttacagcagcagcagcagcatctgcagctgcggctcaagagccctgaggagcgggctggaaatcagagcatgatagcactgaccacggatctgcaggctactaagcacggtttttccgtgctgaagggacaggccgagctgcagatgaaaagaatctggggcgaaaaagagaaaaagaacctggaggatggcattaacaacctgaagaagcaatgggagaccttagaacccttgcatttggaggcagaaaatcaaatcaaaaagtgcgatattcggaataagatgaaggagaccatattatgggctaagaacctgctgggggagttgaatccctcaatccccctccttcctgatgatatactcagtcagatcaggaaatgcaaagtgactcatgatggaatcttagctaggcagcagtccgtggagtccctggctgaggaagtgaaagataaagtgccatctctgactacctatgaggggagcgatctgaataacaccctggaagacctgaggaaccagtaccagatgctggtactgaagagtactcagcgaagccagcagttggaattcaagctggaggagaggtcgaactttttcgccattattaggaagttccagttaatggttcaggagtctgaaactcttataattcccagagtcgagaccgctgccaccgaagctgagctcaagcaccaccatgtgaccctggaggccagccagaaggagctccaggagatagactccgggatcagtacacacttgcaggagctcactaacatatacgaggagctcaatgtgtttgagaggctctttctcgaagatcagctgaagaatctcaaaatcagaacaaacaggatacaacggttcattcagaatacctgtaacgaagtggaacacaagataaaattttgcaggcaatttcacgagaagactagcgccctacaggaagaagctgactcaatccagagaaacgagttgctgttaaaccaagaagtgaacaagggcgtgaaagaagagatttacaatctgaaagatcgccttactgcaattaagtgttgcatcctccaagttttgaagctgaaaaaagtgtttgattacattggattgaactgggactttagtcagctcgaccagctgcagacacaggttttcgaaaaggaaaaggaattagaggaaaagatcaagcaactggatacttttgaggaagagcacgggaaatatcaagcccttctgtctaagatgcgtgctatagatctccagataaagaaaatgaccgaagttgtgctaaaggcccctgactctagccctgaaagccggaggctcaatgctcaaatactcagccagcgcattgagaaagccaaatgcctatgcgatgaaatcatcaaaaaacttaacgaaaacaagaccttcgatgattctttcaaggaaaaggagattttgcagattaagcttaacgctgaagagaacgacaaactgtacaaagtgctgcagaatatggtactagaacttagccccaaggagctcgatgaaaagaattgtcaggataaactcgagacttctcttcatgtgttgaatcagatcaagagtcagttgcagcagccactgctaatcaacttggagatcaagcatatccagaatgaaaaggacaactgcgaggctttccaggaacaggtttgggctgaaatgtgttctattaaggccgttaccgctatcgaaaaacagagggaagaaaatagttccgaggctagcgacgtagagactaaactccgagagttcgaggatctccagatgcaattaaatacttcaatcgatcttagaaccaacgtgctgaacgatgcctacgaaaatttgacacggtacaaggaggccgtgacacgagccgtggagtccatcactagtcttgaagctatcatcatcccataccgggttgacgtgggtaaccccgaggaatccctggagatgcccttgaggaagcaggaggagctggagagcacagttgcccatatacaggacttgaccgagaagcttggaatgatttccagtcccgaagccaagctgcagctgcaatacaccctgcaggagcttgtttccaagaacagtgccatgaaagaagcatttaaagcgcaggagactgaggccgaacgctacctagagaactacaagtgttatcgtaagatggaggaggacatctacaccaacctgagcaagatggaaaccgttttgggacagtccatgtcttcactgcctctctcctatcgggaagccttagagcgcctggagcagtctaaagcccttgtcagcaacttgatcagcaccaaggaggaactgatgaagctcagacagatcctcagactgctgagactccgttgtacggagaacgacggcatatgtttgctgaaaattgttagcgccctgtgggaaaagtggctgagtctgcttgaagctgccaaagaatgggaaatgtggtgcgaggagcttaaacaggaatggaagtttgtgtccgaggagattgagagggaggctattatcctcgacaatctccaagaggaactcccggagatctctaagaccaaagaagcagctactactgaagagctgagcgagcttctggactgtctgtgccaatatggcgaaaacgtcgaaaagcagcagctcttgcttacactcctgctgcaacgcataaggtctattcagaatgtgccagaatcatccggcgcagtagagactgtccccgctttccaagaaataactagcatgaaagagagatgcaacaaactgctgcagaaggtgcagaaaaacaaagaactagtccagaccgagatccaagaaagacactcttttacaaaggagatcatcgccttgaaaaacttttttcagcagactacgacctcatttcaaaacatggcttttcaggaccacccagagaagtcggagcaatttgaggagctccaaagcatcctgaaaaaagggaagcttacttttgaaaacatcatggaaaagctgcggattaagtactccgaaatgtacacaatcgtgcctgctgagatcgaatcccaggtggaggaatgtagaaaagccctcgaagacatcgacgagaaaatcagcaatgaagttttgaagagctctccttcctatgcaatgagaagaaaaattgaagagattaataacggactacataacgtcgagaaaatgctgcagcagaagtcaaaaaatattgagaaagctcaggagatacagaagaaaatgtgggatgaactagatctgtggcattcgaaattgaatgaactggactccgaggtgcaagacattgtggagcaggatccaggacaagctcaggaatggatggacaatctcatgatcccttttcagcagtaccaacaggtcagtcagagggcagagtgtaggacctcgcagttgaataaggccacggtaaagatggaagaatatagcgaccttctaaaatcaaccgaagcctggatcgagaacacttcccacctgctcgcaaatcccgctgactacgattccctgcggacattatcccaccatgcctccacagttcagatggctttggaggatagcgagcagaagcacaacctcctgcactctatctttatggatcttgaggacctttctatcatctttgagacggatgagctgacacagagcatccaggaactttcaaatcaggtaactgccctgcaacagaaaattatggagtctttgccacagattcagaggatggctgacgatgtggttgccattgagtctgaggtgaagagcatggagaaacgagtcagcaaaatcaagaccatccttctgagcaaggaaatattcgattttagtcccgaagaacacctcaaacacggggaagtgattctggagaatattcggcctatgaagaaaactatagccgagattgtttcctaccaggtagaactgagactgccccagacaggtatgaagccgctgcctgtgtttcagcgaacaaatcagctgctgcaggatattaaactgttggaaaacgtaacgcaggagcagaatgagttgctgaaggtggtgataaaacagacaaatgagtgggatgaagaaattgagaatcttaagcagatcctgaacaattatagtgcacagttttcccttgagcacatgagtcccgaccaggcagataaattgccgcaactccagggcgagatagagcggatggagaaacagatcctgtccctgaaccagcggaaagaggatctcttagtggatctgaaagccacggttcttaatttgcatcagcacctgaagcaggagcaagaaggcgtggagagggacagattaccggctgtcacaagcgaggaaggcggagtcgccgaacgcgacgcctccgaacgaaaactgaaccgcaggggttcaatgagctacttagctgccgtagaagaggaagtggaagaatcctccgtcaaatctgacaacggtgatgagaaagccgagccttccccacaaagctggtccagcctgtggaagcatgacaaagacatggaggaggaccgcgctagttcctcctcaggaacaattgttcaggaagcatacgggaagatttccacctctgataacagtatggcccagatattgacacctgacagccttaacacagaacagggacccgaatgctctttacgtcctaaccagacagaggaggggaccacgcctcctatcgaggccgatactctcgactcttcagatgcacagggcggacttgagcctcgtgtggagaagacccgcccagaacccactgaagtacttcatgcatgcaaaactcaggttgcagaactggagttgtggcttcagcaggcgaatgttgcagtcgaacccgaaactctcaacgccgacatgcagcaggtgctagaacaacaactggtgggatgtcaggcaatgttaaccgagatagaacataaggttgcgttcctgctggaaacatgcaaagaccagggactgggagataacggcgcaacacaacacgaagccgaagctctttctcttaagctgaagactgtcaagtgtaatttagagaaagtgcagatgatgctgcaggagaagcactcagaggatcagcatcccacaattctgaagaaaagtagcgaacccgaacaccaggaggctctgcagcccgtaaatttgagcgagctggaaagtatagtgactgagcgtccccagttcagtaggcagaaagacttccagcaacagcaggtattggaactgaagcccatggaacagaaggatttcataaagttcatcgagtttaacgccaaaaagatgtggccccagtactgtcagcacgacaacgataccacccaggagagcagcgcatccaatcaagcttcgagtcctgagaacgacgtaccggactctatcttaagcccgcagggtcagaatggggacaagtggcaatatctccaccacgagctgtccagcaagatcaagctgcctcttccccagctcgtcgagcctcaggttagcaccaacatgggcattctgccttcagtgactatgtacaatttccgatatcctaccaccgaggagctgaagacttacactactcagctcgaggacctcagacaggaggccagtaacctgcaaactcaggaaaacatgactgaggaagcttatatcaatttagacaaaaagctcttcgaactttttttaacactgtcccagtgtctttcgtccgttgaggagatgttggagatgccacgcctgtacagggaggatggttcaggccagcaagtgcattatgagaccctggccctagaactaaagaaactctacctcgccttgagcgataaaaagggcgacctgttgaaggccatgacttggcccggtgagaacacaaacttgctcctggagtgctttgacaatctgcaggtctgtttggagcacacacaggccgctgccgtttgccgcagcaagtcactgaaggcaggcctggactacaatagaagctaccaaaatgaaataaagcggctgtaccaccagttgatcaaatccaaaaccagcctccaacagtccctgaacgaaataagcggtcagagtgtggccgaacaactgcagaaagcagatgcgtacaccgtagaattggaaaacgcagaatctagggttgccaagcttagggacgaaggtgaacgcctacacctgccttacgctttgctccaagaagtctataagctcgaggacgtcctcgattcaatgtgggggatgctcagggcccgatatacagagttgtcatctccattcgtcacagagtcccagcaagacgcactgctgcaggggatggtcgaactggtaaaaatcggaaaggaaaagctggcacacggccatttaaaacagaccaagtctaaggtcgctctacaagcacagatcgaaaaccacaaagtcttctttcagaagcttgtggcagatatgttactgatccaggcgtacagtgctaagatcctcccatctttgctccaaaaccgggagacgttttgggccgagcaggtgacagaggtgaaaatccttgaagagaagagccgacagtgcgggatgaaattgcaatcccttctgcagaaatgggaggaattcgacgaaaactatgccagcttagaaaaagacttggagattctgatctcgactttgccgtctgtttctttggtggaagaaaccgaggagcgtttagtggagaggatctcattctatcaacagattaagcgcaacataggcggaaagcacgccagactgtatcagaccctcaatgagggcaagcagctggtcgcttcggtgagctgtcctgagctggaaggccagattgctaaactagaggagcagtggctgtccctcaataaaaaaatcgatcacgaactgcaccggctacaggccttgctcaaacatctgcttagctacaatcgggactctgatcagctcacaaagtggctcgagtcttcgcaacacacactgaactactggaaggagcagtcactgaacgtctctcaggacctggacacaattcggagcaatatcaataacttttttgagttttcaaaagaggtagatgaaaagagctccctaaagaccgcagtgatctcgattggaaaccagctgctgcatttgaaggagactgatacggctactttacgtgcttccttggcccagtttgaacagaaatggaccatgctaattacccagctgccagatatccaggagaaactccaccagctccagatggaaaagcttccaagtcggaaggccataacagagatgattagctggatgaacaatgtagagcaccagaccagtgatgaggactccgtgcactcacccagctccgcatcccaggtcaaacatttgctgcagaaacataaagaattcaggatggaaatggactacaagcaatggatcgtggactttgttaaccagtccctgctgcagctctctacttgcgatgtggagtcaaagcgttacgaacgaactgaattcgcggagcatttgggcgaaatgaataggcagtggcacagggtccatgggatgctcaaccggaagatacagcacctcgagcaacttctggagagtattaccgagagcgagaacaagattcagattctgaacaactggcttgaggctcaggaggagaggctcaaaacactgcagaagcccgaatccgtgatttccgtgcaaaaactcctgctggattgtcaggacattgagaaccagctggcaatcaagtctaaggcactggacgagttgaagcagagctatctcacccttgagtccggcgctgtaccactccttgaagatacagcctcaaggattgacgaattgttccagaagagatcgtccgttctgacccaggttaaccagctaaagaccagcatgcagagtgtattacaagagtggaagatatacgaccagctctacgatgaggtgaacatgatgactatacgcttctggtactgcatggagcacagcaagccagttgtgttatcgctcgaaacgttgcgctgtcaagtcgagaatctgcagtctcttcaggacgaggccgagtctagcgaaggctcatgggagaagctgcaggaagtgattggaaagctgaaaggactgtgccccagcgttgcagaaatcatcgaagagaagtgccagaacacacataaacggtggacacaggtcaaccaggccatagccgatcagcttcagaaggcacagtcgctcctacaactgtggaaggcgtatagtaacgctcatggtgaagcagcagccaggctgaagcagcaagaagccaaattccaacagttggcgaacattagtatgtccggaaacaacttggcagagattctccccccagcgctgcaggacatcaaagagctgcagcacgacgttcagaaaacgaaagaggccttcctgcagaattctagtgtactcgaccgactcccccagcccgcagagagttcaacgcacatgctgttaccaggacctctccattcccttcagcgcgctgcgtatctggagaagatgctgctcgtgaaagcaaatgaattcgaatttgtgctgagccagttcaaggactttggcgtgagattggagtcacttaagggactgatcatgcacgaagaagaaaacctcgatcgccttcatcaacaggaaaaggagaatcccgactctttcctcaatcatgtgttagccctgacggcgcagagtcctgacatcgagcacctgaacgaggtctccctcaagctgcctctgtccgacgtcgcggtgaagactctccagaacatgaataggcaatggatccgggcaacggccaccgcactggagcgctgctcagagttgcagggcatcggattgaacgagaaattcctgtactgctgcgagaagtggatacagctactcgagaaaattgaggaggcactcaaagtggatgtggccaattcgctgcccgagctgctggagcagcaaaagacgtataagatgctggaggctgaagtaagtattaatcagacaatcgccgattcctacgtgactcagagcttgcagctgttagataccaccgagattgagaatcgcccagagtttatcaccgaatttagcaagctgacagatcgttggcagaacgcagtgcagggggtacgtcagcggaaaggggatgtggacggactcgtgcgtcagtggcaagacttcacaacctccgtggagaatttgtttaggttccttaccgatactagccacttgctgagtgccgtgaagggccaagaacggttctctctataccaaactaggagcctgattcacgaacttaagaacaaggaaatccactttcaacgaaggcggacaacctgcgcccttactctggaagccggagagaagctgttgctgaccacagacctgaagaccaaagagtcagtaggaagaagaatcagtcagctacaggattcttggaaggacatggaacctcagttggctgagatgatcaaacaatttcagtccaccgtggagacatgggaccaatgcgagaagaaaatcaaggagctgaagtctcgcctgcaggtcttaaaggcccagtcagaagatcccctacctgaactgcacgaggatctccacaatgagaaggaactgatcaaagagctggagcagtctctggcgtcttggacgcagaacttaaaggagctgcaaactatgaaagcagaccttacaaggcacgtgttagtggaagatgtaatggtgctgaaagagcagattgagcacctgcacagacaatgggaagatctttgcctaagggtcgccattaggaagcaggagattgaggacaggctgaacacgtgggtggtttttaacgagaagaataaggaactgtgtgcatggctggtacagatggagaataaggttctccagaccgccgacatttccatcgaagagatgatcgaaaagttacagaaggactgcatggaggagatcaatttattttcagagaataagctgcagctgaagcagatgggtgatcagctgatcaaggccagcaataaatcccgtgcagccgaaattgacgacaaactgaacaagataaatgatagatggcagcatctgttcgacgtgatcgggtcaagggtgaagaaactgaaggaaacattcgcctttattcaacaacttgataagaatatgtccaatttgagaacctggctcgcacggatcgagtccgagctgtcaaaaccggtggtctacgacgtttgcgatgaccaggagatccagaagcggcttgccgagcagcaggatttacagagagatatcgaacagcacagcgcgggtgtggagtctgtattcaatatctgcgacgttctcctgcacgactcggacgcctgcgccaacgagacagagtgtgactctattcagcagactacccggtccttagatagacgctggcgaaacatttgtgccatgagcatggagcgcagaatgaagatcgaggagacttggcgtttatggcagaagtttctggacgattattctcgctttgaagattggctgaaaagtgccgaaagaaccgccgcatgcccaaactcctctgaagttctgtacacctctgcaaaggaagagctgaaacgttttgaggcctttcagcgccagattcacgagcgcctgacccaattggagctgattaacaagcagtatcggagactcgctcgcgaaaacagaactgacactgcatcacggctgaagcaaatggtgcacgaggggaaccaaagatgggacaacctgcagaggagggtcacagccgtcttgcgcaggttgcggcatttcacaaatcagcgcgaggaatttgaaggcacgcgcgaaagtatactagtgtggcttaccgaaatggatttacagctcacaaacgttgagcacttctcagagtctgacgctgacgataaaatgagacaacttaatggcttccagcaggaaatcacactgaataccaacaaaattgatcagcttatcgtgtttggggaacaattgattcagaagagcgagccacttgatgctgtgctgattgaggatgagcttgaggagctgcatcggtactgccaagaggtgttcggtagagtctcccggttccatagacgcttgacaagttgtactcccggactggaagacgagaaggaggccagtgaaaacgaaacagatatggaggatccaagagagattcagacagatagctggcggaagcgaggggaaagcgaggagcccagcagcccacagtctttgtgtcatttagtcgcccctgggcacgagaggagcggctgcgaaacaccagtttctgtggactctatcccactggagtgggaccacacaggggatgtgggaggaagctcaagccatgaagaggatgaggagggaccttattattcagcgctctccgacgtggagatcccagaaaaccccgaagcctatctgaaaatgaccaccaaaactctcaaagcttctagtggaaagagcatctctgacggtcattcttggcacgttccggacagtcccagctgtcctgagcaccactacaagcagatggagggagaccgcaatgtaccacctgtcccacctgcttcctccacaccttacaagccaccttacgggaagctgctgcttcctcccggaaccgatggcggaaaggaggggcctcgggtactcaacgggaaccctcaacaagaggacggcggattagcaggaatcacggagcaacagtccggtgccttcgaccgctgggaaatgatccaggctcaggaactacataataagctcaagatcaagcaaaatctccagcagctcaattctgatatctctgctatcaccacatggctcaagaaaactgaggccgagctagagatgctgaaaatggcaaaaccacctagcgacattcaggaaatcgagttgcgtgttaagcgactgcaggaaatcctcaaggcttttgacacctacaaggccctggttgtctctgtgaacgtgagttctaaggaatttttgcaaactgagtctccagaaagtaccgagttgcagagcaggctgcgacaattaagtttactttgggaggcagctcagggggctgttgattcgtggcggggaggcctgaggcagagcctgatgcagtgtcaggatttccaccaactttcacagaatctgctcctctggctcgcatccgctaaaaacagaagacagaaagcccacgtgaccgacccaaaggctgaccctagagccctgctggagtgtcgcagggaactgatgcagctggagaaggagctggtagagcggcaaccgcaagtggatatgcttcaggagatctcaaatagcttactgattaagggacacggcgaggattgcattgaggcagaagagaaggtgcacgtcattgaaaagaagctgaagcagctccgcgaacaggtcagtcaagacttgatggcattacagggcactcagaatccagccagtcctcttccttcgttcgacgaggttgatagtggggaccagccccctgccacgtctgtcccagccccaagggccaagttcagggccgtccgcacgacggagggggaggaagaaacagaatctagggtgccagggtctacccgtccacaacggagttttctgagcagggtggtgcgagcagctctgccacttcagctgctcctgttgctcctgctgcttcttgcatgcttgcttcccagttctgaggaggattacagctgtacccaggccaataattttgcccgaagcttttaccctatgctacgatataccaatggaccccctccaacctaa

SEQ ID NO: 257210 - DNA, 10626 bp, Artificial Sequence
  derived and/or modified sequence
atggaagaagacatttacactaacctttccaagatggagactgtcttaggccagagcatgtcctccctaccactttcctatcgcgaggcgttagaacggctggagcagagtaaagcgcttgtaagcaatctgatcagtactaaagaagaactgatgaagttgaggcagattctgcggcttctgcgattgagatgtactgagaatgatggcatctgccttttgaaaattgtgagcgcactctgggagaagtggctatccctcctcgaagcagcaaaggagtgggaaatgtggtgcgaggagctcaaacaagagtggaagtttgtgagcgaagaaattgagagagaggcaatcatcttggataatctgcaggaagagctgcctgaaatatcaaagactaaggaggctgcgaccaccgaggagcttagtgagcttctcgactgcttgtgccagtacggcgaaaacgtggaaaagcaacagctgctactgacgctccttctgcagcggataaggtccattcagaatgtgcctgagtcctccggagccgtcgaaactgtaccagccttccaagagattacatctatgaaggagagatgcaataaactgctacaaaaggtccagaagaataaggagctggtccagaccgaaatccaggagaggcattctttcactaaagaaattatagctctgaagaacttctttcagcaaaccacaacctcgttccagaatatggccttccaggaccaccccgaaaagagcgagcaatttgaagaactgcaatcgatcctgaagaagggaaaactgacgttcgagaacatcatggagaagctacgaatcaagtacagcgaaatgtacacaatagtgcctgccgagatagaaagccaggtcgaagagtgccggaaagctctggaggatatcgatgagaagatttccaacgaggttctgaaatcgagtccatcttatgcgatgcgccgtaagattgaagaaataaataatggcttgcacaatgtcgagaagatgctccaacagaagtctaagaacatcgaaaaagcacaggagatccagaagaagatgtgggatgagcttgatctgtggcactctaagctcaacgagctcgatagtgaggtgcaggacattgtggagcaagatccgggacaggctcaggagtggatggataaccttatgatcccattccagcagtaccaacaagttagtcaacgagctgagtgtcggaccagtcagctgaacaaggcaacagtgaagatggaggagtattcagatttgcttaaaagtacagaggcgtggatcgaaaataccagtcatctgctcgctaacccagctgactacgactccctccggaccttgtcccatcacgctagtactgttcagatggccctggaggacagcgagcagaagcacaacctgctgcactccatattcatggatctcgaggacctctccatcatcttcgaaaccgacgagcttacccagtccattcaggagctgtctaaccaagtcacggcactgcagcagaaaataatggaatcactgccacagatccagcggatggcagacgatgtcgtcgctatcgagtccgaggtgaagtccatggaaaaacgcgtgtctaagattaagacgatcctactgagcaaggaaatttttgactttagcccggaggaacacctgaagcatggtgaggtgatattagaaaatatcaggcccatgaagaaaaccatcgccgaaatagtctcttatcaagttgagcttagactgccacaaacaggcatgaagccactcccagtttttcagcggaccaaccagctgttgcaggacatcaagctcctcgaaaatgtgacccaagagcagaatgagcttctaaaggtagtgatcaaacagactaacgaatgggatgaggaaatcgagaatcttaagcagatactgaacaattatagcgctcagttcagcctggaacacatgtcccctgaccaagcagacaaattgccacaactgcagggagagatcgaacgcatggaaaagcaaattctttctctcaatcaacggaaggaggacctgctggtagacctgaaggcaacagtgcttaatcttcaccaacatctgaagcaggaacaagaaggcgtcgagagagatcgtcttccagcagttaccagtgaagagggaggcgtggcagaaagagatgcatcagagcgaaagttaaatcgtcgcggttcgatgagctaccttgccgctgtggaagaagaagtggaagaatcaagtgtgaagagcgataatggcgacgaaaaggctgagccatccccacagtcttggtctagcctatggaagcatgataaggatatggaggaagaccgcgcttcaagcagttccggtaccatcgtgcaggaggcttatggcaagatcagcacctctgacaactccatggcccagattctgacaccggacagtttgaacactgagcaaggacctgagtgtagcttgcgaccaaatcaaactgaggagggcactactcccccaatcgaggctgatactttggatagtagcgatgctcagggcggactggagcctagggtggagaagacacgcccagagcccaccgaggtactgcatgcctgtaaaactcaagtcgctgagctcgagttgtggctacagcaggccaatgttgccgtggagccagaaacgctgaacgccgacatgcagcaggtcctcgagcagcagctagttggctgccaggctatgcttacagagatcgagcataaagtcgcctttctgctagagacctgcaaggaccagggcctgggcgataatggagcgacacagcacgaagctgaagcactgtccttgaagctgaagacagtgaagtgcaatctcgagaaagtacaaatgatgctccaagaaaaacactcagaagaccagcatccgacaatattaaagaagagtagcgaacccgagcaccaggaagccctgcagcctgtgaaccttagtgagctggagtctatcgttactgagcgacctcagttttcccgacaaaaggacttccagcagcagcaggtcctcgagctgaaacccatggagcagaaggatttcatcaaatttatagaattcaacgcaaaaaaaatgtggccacagtactgccagcacgacaacgacacgacacaggagtccagcgccagcaatcaggcatcatcacccgagaatgacgtgcccgactccattttatcgccccagggtcagaatggtgataaatggcagtaccttcatcatgagttaagtagcaagataaagctgccactgccacagctggtggagccccaggtgtcaacaaatatgggtatcctccccagtgttacgatgtacaattttcggtaccctacaactgaggagctgaaaacgtataccactcagctggaagacctccggcaagaggcttctaatctccaaacccaggaaaacatgacggaagaggcatacatcaacctggataaaaagctgttcgagctgttcctcacattgtctcagtgtctgtctagcgtcgaagaaatgctagaaatgccccgactataccgcgaggatgggtcagggcagcaggttcattacgagacgttggcacttgagttaaaaaaattgtatctggccctctcagataaaaagggggacttgctcaaagcaatgacctggccaggggagaataccaacttgctcttggaatgcttcgataatcttcaggtctgtctggaacatacacaggccgcagcagtgtgccggagcaaatcactcaaagccggactggattataacagatcctatcaaaacgaaatcaagaggctttaccatcagcttatcaaatccaagacctcgctccagcagtccttaaatgagataagcggccagtctgtcgcagaacagctgcagaaggctgatgcctacactgtagagttggagaatgccgagagtagggtggccaagctacgggacgagggtgaaaggcttcatcttccatacgccctgctgcaggaggtatataaactggaagacgtcctcgactccatgtggggaatgctcagagccaggtacaccgagctatctagtccttttgtgacagagagccagcaggatgcgttgcttcagggaatggtggaattggtcaaaatcggaaaagagaagctggctcacgggcacttgaagcagacaaaaagtaaggtcgctcttcaggcccagattgaaaatcataaagtgttcttccagaaactggtggcagacatgctattaatccaagcctactcagccaaaatcctgcctagcttactccagaatagagagacattttgggcggagcaggtcacagaggttaaaattctggaggaaaagagccggcaatgtgggatgaagctccaatctctgttgcagaagtgggaagaattcgacgaaaactacgcctccctcgaaaaagacctcgagattctcatctccactctcccgtctgtcagcctggtagaggagacagaggaacgattggtagagcgcattagtttctatcagcaaataaagcgtaatattggcggaaagcatgcacgcctgtaccagacactgaatgaaggaaaacagttagtagccagcgtcagctgccctgagcttgaagggcaaatagccaagctggaagaacagtggctttctcttaataaaaagattgaccacgagttgcaccgcctccaggctctcttgaaacacttactttcttataatagggattctgatcagttaaccaaatggctagagagcagccagcacaccctaaattattggaaagaacagagcctcaatgtttcccaggatcttgataccatccgctccaatattaacaacttcttcgaatttagcaaagaggtggatgaaaagagtagccttaaaaccgcggtgatcagcatcgggaaccagctgctccatctcaaggagaccgacactgccactctgcgtgcgagcctggcacagttcgagcagaaatggaccatgttaatcacgcagctgccagacatccaagaaaaattgcaccagcttcagatggagaagctgccatcacgaaaagccatcaccgagatgatcagctggatgaacaacgtcgaacatcagacatccgacgaagattcagtgcattctccatccagcgcctctcaagtcaagcacttgctgcaaaagcataaggaattccgcatggagatggactacaagcagtggatagtcgattttgttaatcagagtctcctccagttgtctacttgtgatgtggaaagtaagcggtacgagcgaaccgagttcgccgagcatctgggcgagatgaaccgacagtggcaccgggtgcacggaatgctaaatagaaagattcaacaccttgaacagttgcttgaatctatcactgagagcgagaacaaaatccagattttgaacaactggcttgaggcacaggaagaaaggctaaagacacttcagaaaccagagtctgttataagcgtccagaaattgctgctcgactgtcaagacattgaaaatcagctcgccatcaaatcgaaggccctggacgaactgaagcagtcttatctgaccctggaatccggggctgtgcctctgctggaggatacagcaagcaggatcgatgaactgtttcagaagcggtctagtgtgctgacccaggtgaaccagcttaaaacctcaatgcaaagtgtgctacaagagtggaagatctacgaccaactgtatgacgaggtcaacatgatgacgatacgcttctggtactgtatggagcactccaaaccagttgtgctctcacttgagacgctccggtgtcaggtggagaacctccaaagcctgcaggacgaggccgaaagtagcgaggggtcatgggagaaactccaggaagtgatcgggaaattgaaaggcttgtgtccctctgtcgctgaaatcatcgaggagaagtgtcagaatacccacaagcggtggacgcaagtgaatcaggccattgccgaccaacttcagaaggcacagtcactgcttcagctttggaaagcgtattccaacgcccacggggaggcggcagccagactaaagcagcaggaagctaaattccagcagctggcaaatatcagcatgtcagggaacaacctggccgagattctgcctccggctctgcaagatattaaagaacttcagcatgatgtgcaaaaaaccaaggaggctttcctgcagaactcctccgtgctggaccgcctcccgcagcctgccgagagctctactcacatgttactgccaggacctctgcactccctgcaaagagcagcatatcttgagaagatgctcttggtaaaagccaatgagtttgaatttgtgctatcccagttcaaagactttggggtgcggctcgagtctttgaaagggctgattatgcacgaggaggaaaacctcgacagactccaccagcaggagaaagagaaccctgactcttttttgaatcacgttctggccctcaccgcacagtcccctgacatcgagcatcttaatgaggtgagcctcaaactgcctctgagcgatgtagcggtaaaaaccctgcagaatatgaatcgacagtggataagagccacagccaccgccctggaaaggtgcagcgagctccagggtatcggtctgaatgagaaattcttgtactgctgtgaaaagtggatccagttgttagagaagattgaagaagccctaaaagttgatgtggctaactctcttccagaactgctggagcagcagaagacgtataagatgctcgaggctgaagtgtccataaaccagaccattgcagactcctatgtcacccagtcattacagctcctggacacaacggagatcgaaaaccgccctgaatttataacggagttttctaaactgactgaccggtggcaaaatgccgtccagggcgtcagacagcgaaaaggtgacgttgacgggctcgtgaggcaatggcaggacttcaccacaagcgtcgagaacctgttcagattcttgacagacacatcacatctgctctctgctgtcaaaggccaggagagattttccctgtaccagactcgctctctcatccacgagttgaagaacaaggaaattcattttcaaaggaggcgaacaacttgcgcattaacactggaggctggggagaaactgctcctgaccacggacttaaagacaaaggaatccgtgggacgcaggatttcgcaacttcaagacagctggaaggatatggaaccacagctggccgaaatgataaagcaattccagtctaccgtggagacgtgggaccagtgcgagaaaaagattaaggaactcaaaagcagactccaagtgctcaaggctcagtcggaggatccgcttccagagttacacgaagacctgcataatgagaaagagttaattaaggagttggagcagtctctcgcaagttggacacagaacttgaaagagctgcaaactatgaaggccgatttgacccgacacgtcctggtcgaagacgtgatggtgctgaaggaacaaatcgagcatctccaccgccagtgggaggatctctgcttacgggtggctataaggaagcaagagatcgaggaccgtctgaacacttgggtcgtgttcaacgagaagaacaaggagctctgcgcctggctcgtgcaaatggagaacaaagtcctgcagacagccgatattagtatcgaagagatgattgaaaagttgcagaaggattgcatggaggagatcaatctgtttagcgaaaacaagctgcaactaaagcagatgggggaccagttaatcaaagcgagcaacaaaagccgagccgctgaaatcgatgacaagctgaataagatcaacgaccgatggcaacatcttttcgacgtgatcggcagtcgtgtcaagaagctgaaagagacttttgcattcattcagcagctggacaagaacatgtcaaatttgaggacatggctcgctcggattgaatcggaactgtccaaacccgtggtgtatgacgtttgtgatgaccaggagatacagaagagactcgctgaacaacaggacctgcagagggacatcgagcaacatagtgcaggtgtagaatccgttttcaatatctgcgacgtgctgttacacgattccgacgcatgtgccaacgaaacggagtgcgattccattcaacaaaccaccagaagcctggaccgcagatggaggaacatttgtgccatgtccatggagagacggatgaagattgaggagacatggcgcctttggcaaaaattcctggatgattatagccgtttcgaggactggcttaaatccgccgagcggacagccgcatgtccgaactcatcagaggtattatacacgtcagccaaggaagagctgaagcggttcgaggcttttcaacggcagatacacgaacgcctgacgcagttggagctcatcaacaagcaatatcgcaggctggctagagaaaacaggacagacacggcctcgcgcctcaaacagatggtccatgagggaaatcagagatgggacaatctccaaagaagagtgacggcggtgctgcggcgacttcggcactttaccaatcaacgcgaagaatttgaagggactagagagtcaatcctcgtatggcttaccgagatggatttgcagctgacaaacgtcgagcacttcagcgagtcagacgctgatgacaaaatgagacagctgaacggcttccagcaagagatcacactgaacaccaacaagatcgatcagctcatcgtgtttggagagcagctgatacagaagtccgagccgctggatgccgtgctgatagaggatgagctggaggagctacaccgctactgtcaggaggtatttgggagagtaagcaggttccataggcgcctgacttcctgtacacccggactggaagatgagaaagaggcctcagagaatgaaaccgatatggaggatccgagagaaatccagacagactcctggagaaagcggggagagagtgaggaaccctcttctcctcaatccctttgccacctcgtggcccctggtcacgaacggtccggatgtgaaacgcctgttagtgtggatagcattccccttgagtgggatcacacgggggacgtgggtggatcaagctctcacgaggaggacgaagaaggtccctattactccgcactctcggacgtggagattccagagaacccggaagcttacctgaagatgacaaccaaaacgttaaaggcaagtagtggcaagtcaatcagcgatgggcattcatggcatgtgccggactccccaagctgtcctgaacatcattacaaacagatggaaggcgataggaatgtcccacctgtcccgcctgcttcctcgacaccctacaagcccccttatggaaagctcctcctgccccctggaaccgacggaggaaaggaagggcctcgtgtgttgaacgggaacccccagcaggaggacggaggacttgccggtattacagagcagcaatctggcgcattcgaccgctgggagatgattcaggctcaggaactgcataacaagctgaagataaagcagaatttacaacagctgaactcagatatcagcgcgattacaacatggctgaaaaaaactgaagcggaactggagatgctgaagatggctaaacccccatctgacatacaggagatagaattgcgcgtaaaacgcctgcaggagattttaaaggcatttgatacttataaagctctggtggtctccgtcaacgtttcatcaaaagagtttctgcagaccgagagccctgaatcaacagaactccagagtagattaaggcaactctcactgctatgggaggccgcacaaggtgccgtggatagttggaggggtggactgcgacagagcctgatgcagtgccaggactttcatcaactgtcccagaacttactgctgtggctggcatccgctaagaataggagacagaaggcacatgtgaccgacccaaaggccgatccaagagccctgctcgagtgtcggagggagctgatgcagctcgagaaggagctggtggaaagacaaccccaggttgacatgcttcaagagattagtaactctctactgataaagggccacggagaagactgcatcgaggcggaagagaaggtgcacgtgatcgagaaaaaattgaaacagctgagagagcaggttagccaggatttgatggcattacaggggacacaaaaccctgcaagcccattgccctcctttgacgaggtcgactccggcgaccaacctcccgctacatctgttcccgcaccgagggccaagttcagggccgttcggacgaccgagggcgaggaggagacagagtccagagtgcccggatccacccgtcctcagcgttcctttcttagccgcgtggtgcgcgcagcgctgccgctgcagctcctgctgctgctgctcctgttacttgcatgcctgctaccgtcctctgaggaagattattcgtgtacccaggcaaacaacttcgccaggagtttttatccaatgttaaggtacaccaacggtccaccccctacataa

SEQ ID NO: 257211 - DNA, 21875 bp, Artificial Sequence
  derived and/or modified sequence
gtttgccgctttccgagcgccaaggagcggagcgcgctcagctgcgcccagagccttcggccggacctgaaaaagcgagagggagagcgagcaaaaggcgcgatccagagagccaggcaagcggggcgccgacctcgggcggccccggcccgcgcccttgcccctcggccgggcggacgttcacttcttcaactgagatggacatgatataatctccattgagtcaaagaatggcatctagtcctgagcttcccaccgaagatgaacagggttcctggggcatcgacgatctccatatttcattgcaagctgaacaggaagacacccagaagaaagccttcacgtgctggataaactcacagttggccaggcacacttctccctcagttatatccgacctattcacagacattaaaaaggggcatgtcctcctggatctgctagaagtactttctgggcaacagttgcctcgggataaaggatctaataccttccagtgtagaatcaatatagaacatgccttgacattcctaagaaaccgatcaattaagctaataaatattcatgttactgatatcattgatggaaacccatccattatccttggcctaatttggacaattatcctgcactttcatattgagaagcttgcccagactctttcttgcaattacaatcagccttccctggatgatgtgagtgtggttgactcatctcctgcctcaagtcctccagctaagaaatgctctaaagtgcaagcaagatggcaaatgtctgcaagaaaggcccttcttttgtgggctcaggaacaatgcgccacctatgagtctgtcaatgtgaccgattttaagtcaagttggagaaatgggatggcttttttggccatcattcatgccttgcgaccagacctaattgacatgaagagtgtgaagcatagatccaacaaagacaatctgagagaggccttcagaattgcagaacaagaattaaaaatccccagattgctggaaccagaagatgtggatgttgttgatcctgatgaaaagtccatcatgacctatgtggcacagtttctgcagtattccaaagatgcccctgggactggagaggaggctcagggaaaggtgaaagatgctatgggctggttaactctgcaaaaggaaaaactacagaagttgctaaaggattcagagaatgatacctactttaaaaagtataatagcctgctgtcctttatggagtcattcaatgaagaaaaaaagtcctttttggatgtcctgtcaataaaacgggatctggatgagctggacaaggatcatttacagttgagagaagcctgggatggcctcgatcaccagattaatgcatggaaaataaagctaaattatgccttgcccccacccctccatcaaactgaagcttggctccaggaggtagaagagcttatggatgaagatttgtcagcctcccaggatcactctcaagccgtgactctgatacaagagaaaatgactttattcaagagcctgatggatagatttgagcatcattcgaacattctccttacctttgaaaataaggatgaaaatcacttgccattggtaccacctaacaaattggaggaaatgaaaagacgaatcaacaacattttggagaaaaaatttattctacttctagaatttcattactacaagtgcttagttcttggtttggtagatgaagtgaaatcaaaattggatatttggaacattaaatatgggagcagagaatctgtggaattattgctggaagactggcataaatttattgaagaaaaagaattcctagctcgacttgatacttcttttcaaaaatgtggagaaatttataagaatttggctggagaatgtcagaatattaataaacagtatatgatggtgaaatctgatgtttgtatgtatagaaaaaatatatataatgtgaagtccactctacaaaaagtgctggcatgttgggctacttatgtggaaaaccttcgcttactaagggcttgctttgaggagacaaagaaggaagaaattaaagaggtaccctttgagacactagcccagtggaatctagaacacgctactttaaatgaagcaggaaatttcttagtcgaagtcagcaatgatgtggttggatcatctatttctaaagaactgagaaggctgaataaaagatggagaaagttggtttcaaaaactcaacttgaaatgaacctgccactgatgataaaaaaacaggatcagcccacttttgacaattctggaaatattctatctaaagaagagaaagcaactgttgagttttcaacagatatgtcagtagaacttcctgaaaattataatcaaaatataaaggctggagagaaacatgaaaaagaaaatgaagaattcacagggcaactaaaagtggctaaagatgttgaaaaactcattggacaagtggaaatctgggaggcagaagccaaatctgttttggatcaagatgatgtggacacctcaatggaagaatctttgaagcatcttattgccaaaggctctatgtttgatgagcttatggcaagaagtgaagatatgttacaaatggatatacaaaatatttcaagccaggagtcctttcaacatgttctcacaactgggcttcaggcaaagattcaagaagctaaagagaaagtccagatcaatgtggtaaaactcattgcagcgttgaagaacttaactgacgtttcaccagatttggacatcaggctgaagatggaagaatcccagaaggaacttgaatcatatatgatgagggctcagcagttactggggcaaagagagagccccggtgaactcatttcaaaacacaaggaagcactaataatttctaatacaaaaagtctggccaagtatttgaaagctgttgaagaactaaaaaataatgtaactgaggacataaagatgtctttagaagaaaagagtagagatgtctgtgccaaatgggagtctcttcatcatgaactgtctttatatgttcaacaactaaaaatagatattgaaaaaggaaagcttagtgacaatattttaaaacttgaaaagcaaataaataaagaaaagaaacttatccgtagaggaaggaccaagggtctcatcaaagaacatgaggcctgcttttctgaggaaggctgcctgtaccagcttaatcaccacatggaagtcctgagggagctgtgtgaagagctgccttcacagaagagtcaacaagaagtgaagagactactcaaagattatgaacaaaagatagaaagacttctgaaatgtgcttccgagattcatatgacactgcagcccacagcgggaggcacgtcgaaaaacgaggggaccatcaccacatctgagaatagaggaggggatccccacagtgaggcaccatttgcaaaatcagataatcagccatcaactgaaaaggcaatggaacccactatgaagtttagcctggcatcagtgttaaggcctctgcaagaagaaagcattatggaaaaggattacagtgcatctataaatagtttactagagaggtatgatacatacagagatattcttgaacaccacctgcaaaacaacaaattcaggattacttctgatttctctagtgaagaggacaggagtagttcttgtctgcaggctaaactgacagatctacaggtcataaaaaatgaaactgatgctcgctggaaagagtttgaaattatttcattgaagttagaaaatcatgtgaatgacataaaaaagccttttgtaattaaggaaagagacacactaaaggaaagagaaagagagcttcagatgactcttaataccagaatggaatctttagagacagcactgcggcttgtgttacctgtagagaaggcatcacttcttctctgtggctcggacctgcctctccataaaatggccatccagggatttcatctcattgatgctgatcgcatctatcaacacctaaggaatatccaagattccatagcaaaacagattgaaatatgtaaccgcttagaagagccaggcaactttgtattaaaggagttacacccatttgatctacacgcaatgcagaatattatactgaaatacaaaacacaatttgaaggaatgaaccacagggtgcagaggagtgaagatactctcaaagctctggaagactttttggcgtctctcagaacagctaaactctctgctgagcccgttacagacctttcagcctcagatacacaggtggcacaagaaaatacgttgacagtaaaaaataaagagggagaaattcatctgatgaaagacaaggccaaacatttggataaatgtttgaagatgctcgatatgagctttaaagatgctgaacggggtgatgacacctcctgtgaaaacctgcttgatgctttttcaataaagttatctgagacacatggctatggggtacaggaggaattcactgaggaaaacaaattactagaggcttgtattttcaaaaataatgaactccttaaaaatattcaagatgtgcagagtcaaatcagtaaaattggtcttaaggatcctactgttccagctgtgaaacatcggaaaaaatcattaatcagactggataaggttctagatgaatatgaagaagagaagagacatttacaagaaatggctaattctcttccacacttcaaagatggcagagaaaaaaccgtgaatcaacagtgccaaaatacagtagtcttgtgggagaataccaaagccttggtcaccgaatgtcttgaacaatgtgggagagttttggagctcttaaaacaatatcagaattttaaaagcatcttgacaactttgattcaaaaagaagagagtgtcatctccctgcaggcttcgtacatgggaaaggagaacctgaagaaaaggatagcagagattgaaattgtcaaagaagaatttaatgagcatttagaagttgtagacaagataaaccaggtctgcaaaaatctacaattttatctaaataaaatgaaaacttttgaagagcccccttttgaaaaagaggctaatattattgtggatagatggcttgatataaatgagaagacagaagattactatgaaaatcttggtcgagctctagctttgtgggacaaactttttaacttaaaaaatgtcattgatgagtggacagaaaaggcccttcaaaaaatggaattacatcaattgactgaagaggacagagaaaggctgaaggaagaattacaagtccatgaacaaaaaacttcagaattttctagaagagtggctgaaatacagtttttgctccaaagcagtgaaatacctcttgaattgcaggtcatggagtcctctattttgaacaagatggaacatgtacagaagtgcttaacaggagaatccaactgccatgcactcagtggcagcactgctgagctaagggaggatctcgaccaagccaagacccagatcgggatgactgaatccctcttaaaagccctgtctccttctgacagcttggagatcttcactaaactagaggagatacaacagcagattctacagcaaaaacacagtatgatattacttgagaatcaaataggttgtctgactcctgaactctctgaattgaaaaagcaatatgaaagtgtcagtgatttatttaataccaaaaaaagtgttttgcaagatcacttttctaagttattgaatgatcaatgcaagaactttaatgactggttcagcaacattaaagtgaaccttaaggagtgttttgaatcatcagaaacaaaaaagagtgtggaacaaaagctacaaaaactttctgatttcttgactcttgaaggaagaaacagtaaaataaagcaggtggacagcgtactgaagcatgtgaagaagcatctgcccaaagcacatgtgaaggagcttatcagttggctcgtgggtcaggaattcgaattagaaaaaatggagtccatatgccaggctcgagcaaaggagcttgaagactccttgcagcagctactgagactccaggatgaccatagaaacctgaggaagtggttgactaatcaagaagagaaatggaaaggaatggaagaaccaggggagaaaactgagctgttctgccaagctttagctagaaagagggaacagtttgaatctgtggcccaattgaacaactctttgaaggaatatgggtttactgaagaagaagaaataataatggaagcaacatgtttgatggatagataccagacattactgagacaactaagtgaaatcgaggaagaggataagttactacccacagaggaccagagctttaatgatcttgcacatgatgtaattcattggataaaagagattaaagagtcccttatggttttgaattcatccgaaggcaaaatgccacttgaggaaagaatccaaaaaatcaaggaaatcattttgctgaagcctgaaggggatgccagaatagagaccatcatgaagcaggctgagagcagcgaggccccgctggttcagaagaccctcactgacatcagcaaccagtgggacaacacactccatttagctagcacctacctaagccatcaagaaaagcttctactagaaggagagaaatatttacaaagtaaggaggatctgagattaatgctcatagaactaaagaagaaacaggaagcaggctttgctctacaacatggtctgcaggagaagaaagctcagttaaagatttataagaaattcctcaagaaagcccaagatttgacatccttgctaaaggagttaaaatctcagggaaactacctcttggagtgcactaaaaatcccagcttcagtgaagagccttggctggaaataaagcatctacacgaaagtcttcttcaacaactgcaggattctgtgcaaaacttggacggtcacgttcgagaacatgattcataccaggtttgcgtcacagacctgaatactacattggacaatttctccaaggaatttgtcagtttttctgataagcctgtggatcaaatagcggttgaggaaaaattgcagaaactgcaggaactagagaatagactcagtttacaagatggcacattaaagaagattttagctttagcaaaatccgtcaagcaaaatacatcttcagtggggcagaagattattaaagatgatataaaatcacttcagtgtaaacaaaaagatttggaaaacaggcttgcatctgctaagcaggagatggaatgttgtctcaacagcattctcaaatcaaaacgctcaacagaaaagaaaggaaagtttactctgccaggcagagagaagcaggccacttctgatgtgcaggagtctactcaggaatcagctgcagtggaaaagttggaggaagactgggaaataaacaaggattcagctgtggaaatggctatgtcaaaacaactttctcttaatgctcaagaaagcatgaaaaacactgaagatgagcggaaagtcaatgagctgcaaaatcaacctttagaattagatactatgttaagaaatgaacaattagaagagatagagaaattatatacccagttggaagcaaagaaagcagccattaagccactggaacaaacagaatgtcttaacaaaacagaaactggggccttggttctccacaatataggatattcggcacagcatttggacaatttgcttcaggcacttattactttgaagaaaaacaaagaaagccaatattgtgtcctcagagattttcaggaataccttgctgcagttgaatcttcaatgaaagccttgttgacagacaaggaaagtcttaaagtaggaccactggacagtgtaacgtatctggacaaaattaaaaaattcatagcatccatagaaaaagagaaagattctttaggcaacttgaaaatcaaatgggagaatttatcaaaccacgtgactgacatggataagaaattgttggaaagccagattaagcaacttgaacatggttgggaacaagtggaacagcagattcaaaagaagtattctcagcaggtagtggaatatgatgaatttacaaccctcatgaataaggtacaggacactgagatttctctgcaacagcagcagcaacatctacagttaaggctgaagtctccagaagaacgggcagggaaccaaagcatgattgccttgaccactgacctccaggctaccaagcatggattttctgttttaaaggggcaagctgaacttcagatgaagaggatttggggagaaaaagaaaagaagaatttggaggatggaataaataacttgaagaaacaatgggaaacattggagccattacacttagaagcagaaaatcagattaagaagtgtgacataaggaacaagatgaaagagactatcttatgggccaagaatttgttgggtgaacttaatccctccattccccttctcccagatgacattctttcacagatcagaaagtgcaaagtgacacatgatggcattctagctaggcagcagtctgtggaatcgttggctgaagaggtcaaagataaggttcctagccttacaacctatgagggcagtgatttaaataataccctagaggacttacggaatcaataccaaatgctggttttaaaatcaactcaaagatcacagcaattagaatttaagttggaagaaagaagcaatttttttgctataataaggaagtttcaacttatggttcaagaaagtgaaacactgataattcccagggtggagacagctgccacggaagctgaactaaaacatcaccatgttactttggaggcatctcagaaggaattgcaagaaattgacagtggaatctcaacacatcttcaggagctaacaaacatctatgaggagctgaatgtgtttgaaagattatttctggaagatcagttgaaaaatcttaagattaggaccaacagaatacaaagattcattcagaatacatgtaatgaagtggaacacaagataaagttttgcagacaattccatgaaaaaacatcagcgcttcaggaggaggctgacagtatacagcgcaatgaactattacttaatcaagaagtaaataaaggtgttaaagaggagatctataatcttaaagacagactcaccgctattaagtgttgcatcttacaggtattgaaacttaaaaaagtgtttgactatattggactaaactgggatttttcacaacttgaccaattacaaacccaagtatttgaaaaagaaaaggaacttgaagaaaaaattaagcagttggacacatttgaggaagaacatggcaaatatcaggcattattaagtaaaatgagagctattgatttgcaaattaagaaaatgactgaagtagtactaaaagctcctgatagctctccggaaagcagacggctcaatgcccaaattttaagtcagagaattgagaaagccaagtgtttatgtgatgagataataaagaaattaaatgaaaataagacctttgatgactcattcaaggagaaagaaatactacaaataaagctgaatgcagaagaaaatgataagttatacaaagttctccaaaacatggtattagaactctcaccaaaagaattggatgaaaagaattgtcaggacaaactagaaacttccttacatgttttaaatcagataaaatctcaattacagcagccattacttataaatttggaaattaaacatattcaaaatgaaaaggacaattgtgaagcatttcaggagcaagtttgggcagaaatgtgtagtattaaagctgtgactgctattgagaaacaaagagaagaaaactcttctgaagcgagtgatgtggagacaaaactacgtgagtttgaagatcttcagatgcagcttaacacaagcattgatttgcgcacaaatgtcttgaatgatgcttatgaaaatctaacacgctataaagaagcagtcaccagggcagtggagagcatcacttccctcgaagccatcattataccctacagagtagatgttggtaatccagaagaatctttagagatgcctcttcgaaaacaagaggaattggaatccacagtagcacacatccaggacctcactgagaaactgggaatgatatccagccccgaagccaaactacaacttcagtatactttacaggaactagtttctaagaactcagcaatgaaggaagctttcaaagcacaggaaactgaggcagaaaggtatcttgagaattacaaatgctatagaaaaatggaagaggatatttacactaacctcagcaaaatggagacagttcttggacagtccatgtcctcgttgccactgtcttacagagaagctttagagcgcttggaacagagcaaggccttggtgtcaaatcttatatcaaccaaagaagagttaatgaaactacgacagatccttagactcttgagactcaggtgcacagaaaatgatggcatatgtttgctcaagattgtgtcggctctgtgggagaaatggctgagtttgctggaagctgctaaagagtgggagatgtggtgcgaagaactgaagcaggaatggaaatttgtcagtgaagaaattgaacgagaggcaattattttagataatcttcaggaagaactccctgaaatttccaaaacaaaagaggcagccaccacagaggaactctctgagctgctagactgtttatgccaatatggagagaacgtggagaagcaacagctgttactgactctacttcttcagcgcatcagaagtatccagaatgttcctgaaagctcaggggctgtggaaactgttccagcatttcaagaaattacttctatgaaagaacgatgcaacaagcttcttcagaaagttcagaaaaataaagaattggtgcagactgaaatccaagaaagacattccttcacaaaagagataattgctttgaagaatttctttcaacagaccacaacttcattccaaaatatggcattccaggatcacccagaaaagtcagaacaatttgaggagcttcaaagcatccttaagaaagggaaactaacttttgagaatattatggaaaaactgcgaatcaagtattccgaaatgtacaccatagtccctgcagagattgaatcccaggtggaagaatgcagaaaagctttagaagacatagatgagaagattagcaatgaagtcttaaaaagctcaccatcatatgcaatgaggagaaaaatagaagaaattaacaatgggcttcataatgttgaaaagatgttgcagcagaaaagcaaaaatattgagaaagctcaagaaattcaaaagaaaatgtgggacgagttagatctatggcattccaaactaaatgagctggattctgaagttcaggacattgttgaacaggacccaggacaggctcaagaatggatggataacttgatgattcctttccagcagtatcagcaagtatcacagagagcagagtgtagaacctcacagttgaataaggccacagttaagatggaggaatatagtgaccttctgaagagcactgaggcttggatagaaaataccagtcatttgctggccaatcctgctgactatgactctttgaggacactgagtcaccatgctagcactgtgcagatggctttggaagattcagaacagaagcacaatcttttacattcaatctttatggatctagaagacctgtcaataatttttgaaacagatgaattaacccaatccatacaagagttaagtaatcaagtaacagctttacaacaaaaaataatggaaagccttccacagattcagcgaatggctgatgatgtggttgctattgaatctgaagtaaaatcaatggaaaaaagagtttcaaaaatcaaaactatcctattatcaaaagaaatatttgatttttcacctgaagaacatctcaaacatggggaggtcatacttgaaaatatacgtcccatgaagaaaaccattgctgagatagtgtcttaccaagtggaactgaggttgccccaaacaggaatgaaacctctgcctgtgtttcagcggacaaatcagcttttacaagatataaaactattggaaaatgtgactcaagaacaaaatgagttattaaaggtagtcataaaacagaccaatgaatgggatgaagaaatagaaaatttgaaacagatcttaaataattattcagctcagttctcccttgaacatatgtcaccagaccaagctgacaagctgccacaactacagggagaaatcgaacgtatggagaaacagattctgagtttgaaccagagaaaagaagacctgttggtggacttgaaggccaccgtactaaaccttcaccagcatttgaagcaagaacaagaaggagtagaaagagataggctgccagctgtaacatcagaggaaggtggagtggcagagagggatgcttctgagcggaagttgaacagaagaggctccatgtcttacctggcagcagtcgaggaagaggtggaagaaagttccgtgaagagcgataatggagatgagaaggcagagccatcgcctcagtcttggtcttcactttggaagcatgacaaggacatggaagaagacagagcttcctcatcctctggaacaattgttcaggaagcatatgggaaaataagcacctctgataattccatggcacaaatcctcacaccagactcactaaacactgagcaaggcccagaatgttccctaaggcccaaccaaacagaagagggcaccacacctcctattgaggctgacactctggactcttctgacgcgcaaggaggtttggagcccagggtggagaaaactaggccggagcccacagaagtcctgcatgcctgcaagacccaggtggccgagctggagctgtggctgcaacaagccaacgtggcagttgagccggaaacattaaacgcagacatgcagcaggtgctggaacagcagctggtagggtgccaggctatgctaacagagattgagcacaaggttgcctttctgttagagacttgcaaagatcagggcctgggagataatggagccactcaacatgaggctgaagcgctttccctgaaactgaaaacagtgaagtgcaatttagaaaaagtccagatgatgcttcaggagaagcacagtgaagatcagcatcctaccattctaaagaaatcctcagagccagagcatcaagaagctctccaaccagttaacctttctgaattggaatccattgtaactgaaaggccacaattcagcagacaaaaagatttccagcagcaacaggttctggagttaaaaccaatggaacagaaagatttcatcaaattcatagaatttaatgctaagaaaatgtggccccagtattgccaacatgataacgatacaactcaggaatcatctgcaagcaaccaggcatccagccctgaaaatgacgttccagactcgatcttgtcaccccagggccaaaatggagataagtggcaatatctgcatcatgaactctcatcaaaaataaagctcccactccctcagcttgtggagcctcaggtttccacaaatatgggtattctacccagcgtgactatgtataactttagatacccaacaactgaagaactgaaaacctataccacccaacttgaagacctgcgccaagaagcaagtaaccttcagacacaggaaaatatgacagaagaagcatatatcaatttggataaaaaattgtttgaactattcctgaccctcagtcagtgcctcagcagtgtggaggagatgctggagatgcccagactttacagggaggatggttctggccagcaggtgcactacgagacgctggctcttgagttgaagaaactttatttagcgctaagtgacaagaagggtgatcttttgaaagccatgacttggcctggcgagaacaccaacttgctccttgaatgttttgacaaccttcaagtctgcctggagcacactcaggctgcagctgtctgtagaagcaagtccctgaaagctggcctcgattacaaccgcagttaccagaatgaaataaagagattatatcatcagctcattaagagtaagacatctttacaacagtctttgaatgaaatcagtgggcagagtgttgctgaacagcttcagaaagcagatgcatatacagtggagctggagaacgccgagagccgagtggccaaactaagagatgaaggggagaggcttcatttaccttatgctttactccaggaggtttacaaattagaggatgtacttgacagtatgtggggaatgctaagagccaggtacacagaactcagcagccctttcgtcactgagagccagcaagatgctttgttgcaaggcatggtggaactggtgaagattgggaaggaaaagcttgctcatggccacttaaaacaaaccaaaagtaaagtggcgttacaggctcaaatagaaaatcacaaggtttttttccagaagcttgttgctgacatgttgttgatccaagcatactctgccaaaatacttccttctttattgcaaaacagagagacattttgggcagaacaagtaacagaagttaaaatactagaagaaaagtcacgccaatgtggtatgaagctgcagagtttgttgcagaaatgggaagaatttgatgaaaactatgcatctcttgaaaaggacctggaaattcttatatctacattgccctctgtgagtttggtggaagaaacagaggaaagattagtggaaaggatttcattttaccagcaaataaaaagaaacattggtggaaaacacgcccggctttaccaaactctgaacgaaggcaaacagttggtggcgtctgtgagctgtcctgaattagagggccagatcgcaaaactggaagagcagtggttgtccctgaacaagaaaattgaccatgagctccacaggctgcaagctcttctcaagcatctgctcagttataacagagattcggatcagttaaccaagtggttggaatcttcccagcatactctgaattactggaaagaacagtccctcaatgtgtctcaggacttggatacaatcagaagcaacatcaacaatttttttgagttttcaaaagaagttgatgaaaaatcctccttgaagactgccgttatcagtatcgggaaccagcttcttcacctgaaagaaactgatacagctacactgagagcttctttagcacagtttgaacaaaaatggacaatgctcataactcaacttccagatattcaagaaaaacttcaccagcttcaaatggagaaattgccgtctcgtaaagcaatcacagaaatgattagctggatgaacaatgtggagcatcaaacttcagatgaagactccgtgcattcaccaagttctgcatctcaagttaaacatcttcttcagaagcacaaggagtttagaatggaaatggactataaacagtggatagttgacttcgttaaccagtcattacttcagctaagcacctgtgatgtagaaagcaagcgctatgaaagaacggagtttgcagagcacctgggggagatgaaccgccagtggcaccgtgtacatggaatgctgaatagaaagatacaacatttagaacaacttctagaaagtatcactgagagtgaaaataaaatacagatcttgaacaactggctggaagcacaagaagagagactgaaaactttacaaaaacctgaaagtgtgatctcagtgcagaagctgctcctggactgtcaggatatagaaaatcaacttgcaattaaatccaaagcactagatgagttgaaacaaagttatctgactttggagagtggggcagtgccattgttagaagatacagcatcccgaattgatgagttatttcaaaagagaagcagtgttctcactcaggtcaatcagctcaaaacctccatgcagtcagttttacaggagtggaagatttatgatcaactctatgatgaagtgaatatgatgacaatccgattctggtactgcatggaacacagcaagcctgtggtgttatcattggagaccttgagatgccaggtggagaaccttcagtctctgcaagatgaagctgagagcagtgaagggagttgggagaaactccaggaggttatcggcaaactcaaaggtctctgcccctctgttgctgaaataatcgaagagaaatgccaaaatactcataaaaggtggactcaggtgaaccaagccattgcagaccagttgcagaaggcccagagtctgctccagctctggaaggcctatagcaatgctcatggtgaagctgccgcaaggctgaagcagcaggaagcaaagtttcaacagctcgcaaacatcagcatgtctggaaacaacctggcagagatcctgcccccagccctgcaggacataaaggagctgcagcatgatgtgcagaaaacaaaagaagcctttctccaaaattccagtgtcctggatcgactcccacaacccgcagagtccagcacccacatgctcctcccgggccccctgcactctctccagagggctgcttatttggaaaagatgctgcttgtgaaagcaaatgaatttgagtttgttctctcacagtttaaggattttggagtccggctggaatctttaaaaggtcttattatgcatgaagaagagaatttggatagacttcaccaacaggaaaaagaaaatcctgactcattcctgaatcatgtgctggcactgacagcccaatcacctgatattgaacatttgaatgaagtgagcctcaagctcccacttagtgacgtagctgtgaagacgttacaaaatatgaaccggcaatggattcgggccacggccacggcactggagcgctgcagtgagcttcagggaattggattgaatgaaaagtttctttattgctgtgaaaagtggatccaacttttggagaagatagaagaagcactcaaagtggatgtggctaacagccttcctgagctcctggagcagcagaaaacctataagatgttagaagctgaagtttctataaaccagacaattgctgattcctatgtcacccagtccttacaactcctggacacaacagaaatagagaacagaccagaatttattacagaattctcaaagctgacggatcggtggcagaatgctgtccagggtgttcggcagaggaagggtgacgttgatgggctggtgaggcagtggcaagatttcactacttctgtggagaacttgtttcgcttcctcactgacaccagccacctgctatctgcagtgaagggccaggagcgcttcagcctctaccaaaccagaagtctgatccatgagctgaagaataaagaaattcattttcaaaggaggcgaactacctgtgccctaaccttggaagctggagaaaagttactgctcacaactgacctgaaaactaaagagtctgtgggtaggagaatcagtcaacttcaggacagctggaaagacatggagccccagctggcagagatgattaagcagttccagagcactgtagagacctgggaccagtgtgaaaagaaaatcaaggagttgaaaagcaggctgcaagttttaaaggcacaaagtgaagatcctcttccagagcttcacgaggacctccataacgaaaaagagctgattaaggaactagaacagtctttggctagctggactcagaacttgaaagaacttcaaactatgaaggcggacttaacccggcacgttctcgtggaagatgtgatggttttgaaggagcaaatagagcatttgcacagacaatgggaggacctctgcttaagggtggccatacgtaaacaggagattgaagacagactcaatacatgggttgtattcaatgaaaaaaataaagagttgtgtgcctggctggtgcagatggaaaacaaagttctacagacagcggacattagtattgaagaaatgattgaaaagttacagaaggactgcatggaagaaataaacttgtttagtgaaaacaagttacagttaaagcagatgggtgaccagttgatcaaggccagcaacaaatcaagagcagctgagatcgatgacaagctcaacaaaattaacgatcgttggcaacatctttttgatgtcatcggatcaagggtgaagaagctgaaggagacctttgcttttattcagcagttggacaaaaacatgagcaaccttcgcacctggttggctcgaattgagtctgagctttccaagcctgttgtttatgatgtctgcgatgatcaagagatccagaagaggctcgctgagcagcaggatctacagcgagatattgaacaacacagcgcaggggtggagtccgtgtttaacatctgtgacgtcctactgcacgactccgatgcctgtgcaaatgagaccgagtgtgactcgatccagcagaccaccaggagcctggacagacgctggaggaacatttgtgccatgtccatggagcggcgcatgaaaatcgaggagacgtggcgcctgtggcagaagtttttagacgactattctcgctttgaggactggctcaagtcagctgagaggacggcagcctgcccaaattcctcagaggtgttgtacacgagtgccaaagaggaactgaagaggtttgaggcctttcagcggcagattcatgagcggctcactcagctggagctcatcaacaagcagtaccggcggctggcccgggagaaccgcacagacacggccagcaggctgaagcagatggtccacgagggcaaccagcgctgggacaaccttcagaggcgggtcacagccgtcctgcggagactcaggcatttcaccaaccagagggaagaatttgagggcaccagggagagcattctggtgtggctcacagagatggacctgcagctgaccaacgtggagcacttctcagagagtgacgccgatgacaagatgcgccaactgaatggcttccaacaggaaattacattaaataccaacaagattgatcagctcattgtgtttggggagcagctgattcagaagagcgagcccctggatgctgtgctgattgaggatgagctggaggaactccaccgctactgccaggaggtgtttggaagggtctcccggttccaccggcggctcacctcctgcactccgggcttggaagatgaaaaggaggcctctgagaatgaaacagacatggaagaccccagagaaatccagactgattcttggcgtaaacggggagagagcgaggaaccgtcatctcctcagtccctgtgtcatctagtggccccagggcacgagcggtctggctgcgagacccctgtcagcgtggactccatccccctggagtgggaccacacaggcgacgtggggggctcctcctctcacgaagaggacgaggagggcccatactacagcgcactgtcagatgtagaaatccctgaaaatcctgaggcatatcttaaaatgaccacaaaaactttgaaagcgtcttctggtaaatccatttcggatggccactcgtggcatgttcccgacagcccttcctgtcccgagcatcactacaagcaaatggaaggtgacaggaatgttccacctgttccccctgcgtccagcaccccttataaaccaccctatggaaagctactattacctccaggcacggatggtggcaaagaaggcccgcgagtcctgaatggcaacccacagcaggaagacgggggactggccggtatcacagagcagcagtcaggtgccttcgacagatgggagatgattcaagcacaggagcttcacaataagctcaaaataaaacaaaatttgcaacagctgaactctgatatcagcgccatcactacttggctgaaaaaaactgaagcagagctggaaatgttaaagatggcaaagcctccctctgatatccaggaaatagaactgagagtgaagagactgcaggagatactgaaagcctttgacacttacaaggcattagtggtctctgtcaacgtgagcagcaaggaatttctgcaaaccgagagccccgaatccacagagctccaaagtagactccgccagctgagcctgctctgggaagcagcacagggcgcagtggacagctggagagggggcttacgacagtcgctcatgcagtgccaggacttccaccagttgagtcaaaatctgctgctgtggttagcgagtgccaagaaccggaggcagaaggctcatgtcaccgatccaaaggcagacccccgggctctcctagagtgtcggagggaactaatgcaactggaaaaggagctggtagaacgtcaacctcaagtggacatgttacaggagatttcaaacagccttctcattaagggacatggagaagactgtattgaagctgaagaaaaggtgcatgttattgagaagaaactcaaacagttacgggagcaagtgtcccaagatttaatggccttgcagggaacccagaacccagcctcacccctgcccagcttcgacgaggtagactcgggggaccagcctcctgcaacatccgtgccagctccccgagcaaagttcagagcagtgagaactacagaaggcgaggaggagacagagagcagggtccccggcagcacacggccacagcgctccttcctctcaagggtggtccgggcagccctacccctgcagctgctcctcctgctgctgctgctcctggcctgcctgctgccctcctccgaagaagactacagctgcactcaggccaacaactttgcccggtccttttaccccatgctgaggtacaccaatgggccaccccccacatagagggcatagctggccacagtgctacaccacctgcctgattgccaagggtgcccagcacgtggccccagaccaatctgagtgacttagtgttggcaaggtcccgggacctgtgcagacttcttctgggcttacccagcacgggctccctggagcccagggcagctttcagattgtgttcctccccaggagcagggaacctgtgtggcaggtgccccgggtattttggcagaactagttgattagtttagggatctctggaaatgtcagtttcctgaagagccaagcactttgtgaattctggtttgtttgtaaaacagcattattataatgtaggtatggtcaatgagcagtggtgtccatcacatatattatagaagcaagcgaggacattccaccctagaaatggttcagaaactcataggcacccttagctgatggaaacaatcaatcatatttaatacgcttagaatcagttttactccaatcagctggcaattttgagctgccggttatacaccaaaatgttctgttcagtacctagctctgctcttttatattgctttaaatttttaaagaaattgtattgcatggatgtggttatttgtgcatattttttaacaatgcccaatctgtatgaataatgtaaacttcgatttttttttaaaaaaattagattttagctggagcttttgactaatgtaaagtaaatgccaaactaccgacttgatagggatgtttttgtaagttaattttctaagactttttcacatccaaagtgatgctttgctttgggttttaactgtttggccacggcgggggtgggggcggggggttggtacagaaacttgaagctgtttgtgatatgtacaactcagatgtttctcattaaaaaacaaaattagccagacttctgttgtactg

SEQ ID NO: 257212 - DNA, 11532 bp, Artificial Sequence
  derived and/or modified sequence
atggaagaggatatttacactaacctcagcaaaatggagacagttcttggacagtccatgtcctcgttgccactgtcttacagagaagctttagagcgcttggaacagagcaaggccttggtgtcaaatcttatatcaaccaaagaagagttaatgaaactacgacagatccttagactcttgagactcaggtgcacagaaaatgatggcatatgtttgctcaagattgtgtcggctctgtgggagaaatggctgagtttgctggaagctgctaaagagtgggagatgtggtgcgaagaactgaagcaggaatggaaatttgtcagtgaagaaattgaacgagaggcaattattttagataatcttcaggaagaactccctgaaatttccaaaacaaaagaggcagccaccacagaggaactctctgagctgctagactgtttatgccaatatggagagaacgtggagaagcaacagctgttactgactctacttcttcagcgcatcagaagtatccagaatgttcctgaaagctcaggggctgtggaaactgttccagcatttcaagaaattacttctatgaaagaacgatgcaacaagcttcttcagaaagttcagaaaaataaagaattggtgcagactgaaatccaagaaagacattccttcacaaaagagataattgctttgaagaatttctttcaacagaccacaacttcattccaaaatatggcattccaggatcacccagaaaagtcagaacaatttgaggagcttcaaagcatccttaagaaagggaaactaacttttgagaatattatggaaaaactgcgaatcaagtattccgaaatgtacaccatagtccctgcagagattgaatcccaggtggaagaatgcagaaaagctttagaagacatagatgagaagattagcaatgaagtcttaaaaagctcaccatcatatgcaatgaggagaaaaatagaagaaattaacaatgggcttcataatgttgaaaagatgttgcagcagaaaagcaaaaatattgagaaagctcaagaaattcaaaagaaaatgtgggacgagttagatctatggcattccaaactaaatgagctggattctgaagttcaggacattgttgaacaggacccaggacaggctcaagaatggatggataacttgatgattcctttccagcagtatcagcaagtatcacagagagcagagtgtagaacctcacagttgaataaggccacagttaagatggaggaatatagtgaccttctgaagagcactgaggcttggatagaaaataccagtcatttgctggccaatcctgctgactatgactctttgaggacactgagtcaccatgctagcactgtgcagatggctttggaagattcagaacagaagcacaatcttttacattcaatctttatggatctagaagacctgtcaataatttttgaaacagatgaattaacccaatccatacaagagttaagtaatcaagtaacagctttacaacaaaaaataatggaaagccttccacagattcagcgaatggctgatgatgtggttgctattgaatctgaagtaaaatcaatggaaaaaagagtttcaaaaatcaaaactatcctattatcaaaagaaatatttgatttttcacctgaagaacatctcaaacatggggaggtcatacttgaaaatatacgtcccatgaagaaaaccattgctgagatagtgtcttaccaagtggaactgaggttgccccaaacaggaatgaaacctctgcctgtgtttcagcggacaaatcagcttttacaagatataaaactattggaaaatgtgactcaagaacaaaatgagttattaaaggtagtcataaaacagaccaatgaatgggatgaagaaatagaaaatttgaaacagatcttaaataattattcagctcagttctcccttgaacatatgtcaccagaccaagctgacaagctgccacaactacagggagaaatcgaacgtatggagaaacagattctgagtttgaaccagagaaaagaagacctgttggtggacttgaaggccaccgtactaaaccttcaccagcatttgaagcaagaacaagaaggagtagaaagagataggctgccagctgtaacatcagaggaaggtggagtggcagagagggatgcttctgagcggaagttgaacagaagaggctccatgtcttacctggcagcagtcgaggaagaggtggaagaaagttccgtgaagagcgataatggagatgagaaggcagagccatcgcctcagtcttggtcttcactttggaagcatgacaaggacatggaagaagacagagcttcctcatcctctggaacaattgttcaggaagcatatgggaaaataagcacctctgataattccatggcacaaatcctcacaccagactcactaaacactgagcaaggcccagaatgttccctaaggcccaaccaaacagaagagggcaccacacctcctattgaggctgacactctggactcttctgacgcgcaaggaggtttggagcccagggtggagaaaactaggccggagcccacagaagtcctgcatgcctgcaagacccaggtggccgagctggagctgtggctgcaacaagccaacgtggcagttgagccggaaacattaaacgcagacatgcagcaggtgctggaacagcagctggtagggtgccaggctatgctaacagagattgagcacaaggttgcctttctgttagagacttgcaaagatcagggcctgggagataatggagccactcaacatgaggctgaagcgctttccctgaaactgaaaacagtgaagtgcaatttagaaaaagtccagatgatgcttcaggagaagcacagtgaagatcagcatcctaccattctaaagaaatcctcagagccagagcatcaagaagctctccaaccagttaacctttctgaattggaatccattgtaactgaaaggccacaattcagcagacaaaaagatttccagcagcaacaggttctggagttaaaaccaatggaacagaaagatttcatcaaattcatagaatttaatgctaagaaaatgtggccccagtattgccaacatgataacgatacaactcaggaatcatctgcaagcaaccaggcatccagccctgaaaatgacgttccagactcgatcttgtcaccccagggccaaaatggagataagtggcaatatctgcatcatgaactctcatcaaaaataaagctcccactccctcagcttgtggagcctcaggtttccacaaatatgggtattctacccagcgtgactatgtataactttagatacccaacaactgaagaactgaaaacctataccacccaacttgaagacctgcgccaagaagcaagtaaccttcagacacaggaaaatatgacagaagaagcatatatcaatttggataaaaaattgtttgaactattcctgaccctcagtcagtgcctcagcagtgtggaggagatgctggagatgcccagactttacagggaggatggttctggccagcaggtgcactacgagacgctggctcttgagttgaagaaactttatttagcgctaagtgacaagaagggtgatcttttgaaagccatgacttggcctggcgagaacaccaacttgctccttgaatgttttgacaaccttcaagtctgcctggagcacactcaggctgcagctgtctgtagaagcaagtccctgaaagctggcctcgattacaaccgcagttaccagaatgaaataaagagattatatcatcagctcattaagagtaagacatctttacaacagtctttgaatgaaatcagtgggcagagtgttgctgaacagcttcagaaagcagatgcatatacagtggagctggagaacgccgagagccgagtggccaaactaagagatgaaggggagaggcttcatttaccttatgctttactccaggaggtttacaaattagaggatgtacttgacagtatgtggggaatgctaagagccaggtacacagaactcagcagccctttcgtcactgagagccagcaagatgctttgttgcaaggcatggtggaactggtgaagattgggaaggaaaagcttgctcatggccacttaaaacaaaccaaaagtaaagtggcgttacaggctcaaatagaaaatcacaaggtttttttccagaagcttgttgctgacatgttgttgatccaagcatactctgccaaaatacttccttctttattgcaaaacagagagacattttgggcagaacaagtaacagaagttaaaatactagaagaaaagtcacgccaatgtggtatgaagctgcagagtttgttgcagaaatgggaagaatttgatgaaaactatgcatctcttgaaaaggacctggaaattcttatatctacattgccctctgtgagtttggtggaagaaacagaggaaagattagtggaaaggatttcattttaccagcaaataaaaagaaacattggtggaaaacacgcccggctttaccaaactctgaacgaaggcaaacagttggtggcgtctgtgagctgtcctgaattagagggccagatcgcaaaactggaagagcagtggttgtccctgaacaagaaaattgaccatgagctccacaggctgcaagctcttctcaagcatctgctcagttataacagagattcggatcagttaaccaagtggttggaatcttcccagcatactctgaattactggaaagaacagtccctcaatgtgtctcaggacttggatacaatcagaagcaacatcaacaatttttttgagttttcaaaagaagttgatgaaaaatcctccttgaagactgccgttatcagtatcgggaaccagcttcttcacctgaaagaaactgatacagctacactgagagcttctttagcacagtttgaacaaaaatggacaatgctcataactcaacttccagatattcaagaaaaacttcaccagcttcaaatggagaaattgccgtctcgtaaagcaatcacagaaatgattagctggatgaacaatgtggagcatcaaacttcagatgaagactccgtgcattcaccaagttctgcatctcaagttaaacatcttcttcagaagcacaaggagtttagaatggaaatggactataaacagtggatagttgacttcgttaaccagtcattacttcagctaagcacctgtgatgtagaaagcaagcgctatgaaagaacggagtttgcagagcacctgggggagatgaaccgccagtggcaccgtgtacatggaatgctgaatagaaagatacaacatttagaacaacttctagaaagtatcactgagagtgaaaataaaatacagatcttgaacaactggctggaagcacaagaagagagactgaaaactttacaaaaacctgaaagtgtgatctcagtgcagaagctgctcctggactgtcaggatatagaaaatcaacttgcaattaaatccaaagcactagatgagttgaaacaaagttatctgactttggagagtggggcagtgccattgttagaagatacagcatcccgaattgatgagttatttcaaaagagaagcagtgttctcactcaggtcaatcagctcaaaacctccatgcagtcagttttacaggagtggaagatttatgatcaactctatgatgaagtgaatatgatgacaatccgattctggtactgcatggaacacagcaagcctgtggtgttatcattggagaccttgagatgccaggtggagaaccttcagtctctgcaagatgaagctgagagcagtgaagggagttgggagaaactccaggaggttatcggcaaactcaaaggtctctgcccctctgttgctgaaataatcgaagagaaatgccaaaatactcataaaaggtggactcaggtgaaccaagccattgcagaccagttgcagaaggcccagagtctgctccagctctggaaggcctatagcaatgctcatggtgaagctgccgcaaggctgaagcagcaggaagcaaagtttcaacagctcgcaaacatcagcatgtctggaaacaacctggcagagatcctgcccccagccctgcaggacataaaggagctgcagcatgatgtgcagaaaacaaaagaagcctttctccaaaattccagtgtcctggatcgactcccacaacccgcagagtccagcacccacatgctcctcccgggccccctgcactctctccagagggctgcttatttggaaaagatgctgcttgtgaaagcaaatgaatttgagtttgttctctcacagtttaaggattttggagtccggctggaatctttaaaaggtcttattatgcatgaagaagagaatttggatagacttcaccaacaggaaaaagaaaatcctgactcattcctgaatcatgtgctggcactgacagcccaatcacctgatattgaacatttgaatgaagtgagcctcaagctcccacttagtgacgtagctgtgaagacgttacaaaatatgaaccggcaatggattcgggccacggccacggcactggagcgctgcagtgagcttcagggaattggattgaatgaaaagtttctttattgctgtgaaaagtggatccaacttttggagaagatagaagaagcactcaaagtggatgtggctaacagccttcctgagctcctggagcagcagaaaacctataagatgttagaagctgaagtttctataaaccagacaattgctgattcctatgtcacccagtccttacaactcctggacacaacagaaatagagaacagaccagaatttattacagaattctcaaagctgacggatcggtggcagaatgctgtccagggtgttcggcagaggaagggtgacgttgatgggctggtgaggcagtggcaagatttcactacttctgtggagaacttgtttcgcttcctcactgacaccagccacctgctatctgcagtgaagggccaggagcgcttcagcctctaccaaaccagaagtctgatccatgagctgaagaataaagaaattcattttcaaaggaggcgaactacctgtgccctaaccttggaagctggagaaaagttactgctcacaactgacctgaaaactaaagagtctgtgggtaggagaatcagtcaacttcaggacagctggaaagacatggagccccagctggcagagatgattaagcagttccagagcactgtagagacctgggaccagtgtgaaaagaaaatcaaggagttgaaaagcaggctgcaagttttaaaggcacaaagtgaagatcctcttccagagcttcacgaggacctccataacgaaaaagagctgattaaggaactagaacagtctttggctagctggactcagaacttgaaagaacttcaaactatgaaggcggacttaacccggcacgttctcgtggaagatgtgatggttttgaaggagcaaatagagcatttgcacagacaatgggaggacctctgcttaagggtggccatacgtaaacaggagattgaagacagactcaatacatgggttgtattcaatgaaaaaaataaagagttgtgtgcctggctggtgcagatggaaaacaaagttctacagacagcggacattagtattgaagaaatgattgaaaagttacagaaggactgcatggaagaaataaacttgtttagtgaaaacaagttacagttaaagcagatgggtgaccagttgatcaaggccagcaacaaatcaagagcagctgagatcgatgacaagctcaacaaaattaacgatcgttggcaacatctttttgatgtcatcggatcaagggtgaagaagctgaaggagacctttgcttttattcagcagttggacaaaaacatgagcaaccttcgcacctggttggctcgaattgagtctgagctttccaagcctgttgtttatgatgtctgcgatgatcaagagatccagaagaggctcgctgagcagcaggatctacagcgagatattgaacaacacagcgcaggggtggagtccgtgtttaacatctgtgacgtcctactgcacgactccgatgcctgtgcaaatgagaccgagtgtgactcgatccagcagaccaccaggagcctggacagacgctggaggaacatttgtgccatgtccatggagcggcgcatgaaaatcgaggagacgtggcgcctgtggcagaagtttttagacgactattctcgctttgaggactggctcaagtcagctgagaggacggcagcctgcccaaattcctcagaggtgttgtacacgagtgccaaagaggaactgaagaggtttgaggcctttcagcggcagattcatgagcggctcactcagctggagctcatcaacaagcagtaccggcggctggcccgggagaaccgcacagacacggccagcaggctgaagcagatggtccacgagggcaaccagcgctgggacaaccttcagaggcgggtcacagccgtcctgcggagactcaggcatttcaccaaccagagggaagaatttgagggcaccagggagagcattctggtgtggctcacagagatggacctgcagctgaccaacgtggagcacttctcagagagtgacgccgatgacaagatgcgccaactgaatggcttccaacaggaaattacattaaataccaacaagattgatcagctcattgtgtttggggagcagctgattcagaagagcgagcccctggatgctgtgctgattgaggatgagctggaggaactccaccgctactgccaggaggtgtttggaagggtctcccggttccaccggcggctcacctcctgcactccgggcttggaagatgaaaaggaggcctctgagaatgaaacagacatggaagaccccagagaaatccagactgattcttggcgtaaacggggagagagcgaggaaccgtcatctcctcagtccctgtgtcatctagtggccccagggcacgagcggtctggctgcgagacccctgtcagcgtggactccatccccctggagtgggaccacacaggcgacgtggggggctcctcctctcacgaagaggacgaggagggcccatactacagcgcactgtcagatgtagaaatccctgaaaatcctgaggcatatcttaaaatgaccacaaaaactttgaaagcgtcttctggtaaatccatttcggatggccactcgtggcatgttcccgacagcccttcctgtcccgagcatcactacaagcaaatggaaggtgacaggaatgttccacctgttccccctgcgtccagcaccccttataaaccaccctatggaaagctactattacctccaggcacggatggtggcaaagaaggcccgcgagtcctgaatggcaacccacagcaggaagacgggggactggccggtatcacagagcagcagtcaggtgccttcgacagatgggagatgattcaagcacaggagcttcacaataagctcaaaataaaacaaaatttgcaacagctgaactctgatatcagcgccatcactacttggctgaaaaaaactgaagcagagctggaaatgttaaagatggcaaagcctccctctgatatccaggaaatagaactgagagtgaagagactgcaggagatactgaaagcctttgacacttacaaggcattagtggtctctgtcaacgtgagcagcaaggaatttctgcaaaccgagagccccgaatccacagagctccaaagtagactccgccagctgagcctgctctgggaagcagcacagggcgcagtggacagctggagagggggcttacgacagtcgctcatgcagtgccaggacttccaccagttgagtcaaaatctgctgctgtggttagcgagtgccaagaaccggaggcagaaggctcatgtcaccgatccaaaggcagacccccgggctctcctagagtgtcggagggaactaatgcaactggaaaaggagctggtagaacgtcaacctcaagtggacatgttacaggagatttcaaacagccttctcattaagggacatggagaagactgtattgaagctgaagaaaaggtgcatgttattgagaagaaactcaaacagttacgggagcaagtgtcccaagatttaatggccttgcagggaacccagaacccagcctcacccctgcccagcttcgacgaggtagactcgggggaccagcctcctgcaacatccgtgccagctccccgagcaaagttcagagcagtgagaactacagaaggcgaggaggagacagagagcagggtccccggcagcacacggccacagcgctccttcctctcaagggtggtccgggcagccctacccctgcagctgctcctcctgctgctgctgctcctggcctgcctgctgccctcctccgaagaagactacagctgcactcaggccaacaactttgcccggtccttttaccccatgctgaggtacaccaatgggccaccccccacatagagggcatagctggccacagtgctacaccacctgcctgattgccaagggtgcccagcacgtggccccagaccaatctgagtgacttagtgttggcaaggtcccgggacctgtgcagacttcttctgggcttacccagcacgggctccctggagcccagggcagctttcagattgtgttcctccccaggagcagggaacctgtgtggcaggtgccccgggtattttggcagaactagttgattagtttagggatctctggaaatgtcagtttcctgaagagccaagcactttgtgaattctggtttgtttgtaaaacagcattattataatgtaggtatggtcaatgagcagtggtgtccatcacatatattatagaagcaagcgaggacattccaccctagaaatggttcagaaactcataggcacccttagctgatggaaacaatcaatcatatttaatacgcttagaatcagttttactccaatcagctggcaattttgagctgccggttatacaccaaaatgttctgttcagtacctagctctgctcttttatattgctttaaatttttaaagaaattgtattgcatggatgtggttatttgtgcatattttttaacaatgcccaatctgtatgaataatgtaaacttcgatttttttttaaaaaaattagattttagctggagcttttgactaatgtaaagtaaatgccaaactaccgacttgatagggatgtttttgtaagttaattttctaagactttttcacatccaaagtgatgctttgctttgggttttaactgtttggccacggcgggggtgggggcggggggttggtacagaaacttgaagctgtttgtgatatgtacaactcagatgtttctcattaaaaaacaaaattagccag

SEQ ID NO: 257213 - protein, 498 aa, Artificial Sequence
  derived and/or modified sequence
MSHQPAVATKMPEEMDKPLISLHLVDSDSSLAKVPDEAPKVGILGSGDFARSLATRLVGSGFKVVVGSRNPKRTARLFPSAAQVTFQEEAVSSPEVIFVAVFREHYSSLCSLSDQLAGKILVDVSNPTEQEHLQHRESNAEYLASLFPTCTVVKAFNVISAWTLQAGPRDGNRQVPICGDQPEAKRAVSEMALAMGFMPVDMGSLASAWEVEAMPLRLLPAWKVPTLLALGLFVCFYAYNFVRDVLQPYVQESQNKFFKLPVSVVNTTLPCVAYVLLSLVYLPGVLAAALQLRRGTKYQRFPDWLDHWLQHRKQIGLLSFFCAALHALYSFCLPLRRAHRYDLVNLAVKQVLANKSHLWVEEEVWRMEIYLSLGVLALGTLSLLAVTSLPSIANSLNWREFSFVQSSLGFVALVLSTLHTLTYGWTRAFEESRYKFYLPPTFTLTLLVPCVVILAKALFLLPCISRRLARIRRGWERESTIKFTLPTDHALAEKTSHV

SEQ ID NO: 257214 - protein, 143 aa, Artificial Sequence
  derived and/or modified sequence
MEIYLSLGVLALGTLSLLAVTSLPSIANSLNWREFSFVQSSLGFVALVLSTLHTLTYGWTRAFEESRYKFYLPPTFTLTLLVPCVVILAKALFLLPCISRRLARIRRGWERESTIKFTLPTDHALSPLGFLFLVVQSGITVCK

SEQ ID NO: 257215 - DNA, 1497 bp, Artificial Sequence
  derived and/or modified sequence
atgagccaccagcccgccgtggccaccaagatgcccgaggagatggacaagcccctgatcagcctgcacctggtggacagcgacagcagcctggccaaggtgcccgacgaggcccccaaggtgggcatcctgggcagcggcgacttcgccagaagcctggccaccagactggtgggcagcggcttcaaggtggtggtgggcagcagaaaccccaagagaaccgccagactgttccccagcgccgcccaggtgaccttccaggaggaggccgtgagcagccccgaggtgatcttcgtggccgtgttcagagagcactacagcagcctgtgcagcctgagcgaccagctggccggcaagatcctggtggacgtgagcaaccccaccgagcaggagcacctgcagcacagagagagcaacgccgagtacctggccagcctgttccccacctgcaccgtggtgaaggccttcaacgtgatcagcgcctggaccctgcaggccggccccagagacggcaacagacaggtgcccatctgcggcgaccagcccgaggccaagagagccgtgagcgagatggccctggccatgggcttcatgcccgtggacatgggcagcctggccagcgcctgggaggtggaggccatgcccctgagactgctgcccgcctggaaggtgcccaccctgctggccctgggcctgttcgtgtgcttctacgcctacaacttcgtgagagacgtgctgcagccctacgtgcaggagagccagaacaagttcttcaagctgcccgtgagcgtggtgaacaccaccctgccctgcgtggcctacgtgctgctgagcctggtgtacctgcccggcgtgctggccgccgccctgcagctgagaagaggcaccaagtaccagagattccccgactggctggaccactggctgcagcacagaaagcagatcggcctgctgagcttcttctgcgccgccctgcacgccctgtacagcttctgcctgcccctgagaagagcccacagatacgacctggtgaacctggccgtgaagcaggtgctggccaacaagagccacctgtgggtggaggaggaggtgtggagaatggagatctacctgagcctgggcgtgctggccctgggcaccctgagcctgctggccgtgaccagcctgcccagcatcgccaacagcctgaactggagagagttcagcttcgtgcagagcagcctgggcttcgtggccctggtgctgagcaccctgcacaccctgacctacggctggaccagagccttcgaggagagcagatacaagttctacctgccccccaccttcaccctgaccctgctggtgccctgcgtggtgatcctggccaaggccctgttcctgctgccctgcatcagcagaagactggccagaatcagaagaggctgggagagagagagcaccatcaagttcaccctgcccaccgaccacgccctggccgagaagaccagccacgtgtag

SEQ ID NO: 257216 - DNA, 1497 bp, Artificial Sequence
  derived and/or modified sequence
atgagccatcaaccggcagtagcaaccaaaatgccagaggagatggataagcctctcatcagtttgcatcttgttgatagcgacagcagtctggctaaagtccctgatgaggcccctaaggtgggtattctgggaagcggggactttgcccggagcctggcgactagattagtgggcagtgggtttaaggttgtggtcggcagtcgtaaccccaagaggactgcacgtttatttccctctgccgcgcaggtgacctttcaggaagaagctgtgtcctctcccgaggtgatatttgtcgctgtgttccgtgagcattattcttcgctttgctccctcagtgaccagctagctggaaagattctcgtggacgtgtccaacccaaccgaacaagaacacctgcagcatcgtgaaagtaatgcggagtatttggcttctctttttcccacctgtaccgttgtgaaagccttcaatgtcattagcgcctggactcttcaggccgggccacgcgatggcaacagacaggttccgatatgcggtgaccagcctgaagctaaacgtgcggtgtcagagatggccctggcgatgggttttatgcccgtagacatggggagccttgccagcgcctgggaagtggaggcaatgcctctgcggctgctccccgcctggaaagtgcccacccttttggcactcggtctcttcgtgtgcttttacgcctacaactttgtgagggatgtcctccaaccttacgtgcaagagagccagaataaattcttcaaactgcctgtgtctgtggtcaatactacattgccttgcgtggcatacgtgttactgagcctggtttacctcccaggcgtgctcgccgccgccctgcagctgcggagaggcacaaaatatcagcggttcccagactggctcgaccactggctgcagcatcgcaaacagataggtctgttgtcctttttttgcgctgcactgcatgcgctttactcattttgcctgcctcttaggcgtgcccaccggtatgaccttgtgaacctggccgtcaaacaggtgctcgccaataaatcccatctctgggtcgaggaagaggtctggagaatggaaatatacctatccctgggagtcttggcgctgggaactctgtctcttctcgcggtgactagccttccatcaatcgccaatagcctgaattggcgagaattctccttcgtccagtctagtcttggcttcgtagcgctcgtccttagtaccttgcatacgctcacctacgggtggacgcgcgcctttgaagaatctaggtacaaattctacttacctcccaccttcacgctaacactgctggtgccctgcgtcgttatactggctaaggctctatttctcctcccttgcattagcagaaggctggcacgtatacgcagaggctgggaacgcgaatcgaccatcaagtttactctgccaacggatcatgccttggccgagaaaacgagtcacgtgtag

SEQ ID NO: 257217 - DNA, 1497 bp, Artificial Sequence
  derived and/or modified sequence
atgagccaccagcctgctgtggccaccaagatgcctgaggagatggacaagcccctcatcagcctgcacctggtggacagcgacagcagcctggccaaggtgcctgatgaggcccccaaggtgggcatcctgggcagcggggactttgcccggagcctggccacccggctggtgggcagcggcttcaaggtggtggtgggcagcaggaaccccaagaggacagcccggctcttccccagcgctgcccaggtgaccttccaggaggaggccgtgagcagccctgaggtgatctttgtggccgtgttccgggagcactacagcagcctgtgcagcctgagtgaccagctggccggcaagatcctggtggatgtgagcaaccccacagagcaggagcacctgcagcaccgggagagcaatgctgagtacctggccagcctcttccccacctgcaccgtggtgaaggccttcaacgtcatcagcgcctggaccctgcaggccggccccagagatggcaaccggcaggtgcccatctgtggggaccagcctgaggccaagagagctgtgtctgagatggccctggccatgggcttcatgcctgtggacatgggcagcctggccagcgcctgggaggtggaggccatgcccctgcggctgctgcctgcctggaaggtgcccaccctgctggccctgggcctgtttgtgtgcttctacgcctacaactttgtgagagatgtgctgcagccctacgtgcaggagagccagaacaagttcttcaagctgcctgtgtctgtggtgaacaccaccctgccctgtgtggcctacgtgctgctgagcctggtgtacctgcccggggtgctggccgccgccctgcagctgcggcggggcaccaagtaccagcgcttcccagactggctggaccactggctgcagcacaggaagcagatcggcctgctgtccttcttctgtgccgccctgcacgccctgtacagcttctgcctgcccctgcggcgggcccacagatatgacctggtgaacctggccgtgaagcaggtgctggccaacaagagccacctgtgggtggaggaggaggtgtggaggatggagatctacctgagcctgggcgtgctggccctgggcaccctgagcctgctggccgtgaccagcctgcccagcatcgccaacagcctgaactggagggagttctcctttgtgcagagcagcctgggctttgtggccctggtgctgagcaccctgcacaccctgacctacggctggacccgggcctttgaggagagccgctacaagttctacctgccccccaccttcaccctgaccctgctggtgccctgtgtggtgatcctggccaaggccctcttcctgctgccctgcatcagccggcggctggcccgcatccggcggggctgggagcgggagagcaccatcaagttcaccctgcccacagaccacgccctggccgagaagaccagccacgtgtag

SEQ ID NO: 257218 - DNA, 1497 bp, Artificial Sequence
  derived and/or modified sequence
atgagccaccagcccgccgtggccaccaagatgcccgaggagatggataagccattgattagtctacacctggttgacagtgattcatctctggccaaggttcctgacgaagcccccaaggtgggtatcttgggttctggtgatttcgccaggtccctagcaactcgtctggtgggttctggatttaaagtggtcgtgggcagccgtaatccaaagaggactgctcggttatttccatcagccgcccaggtgacctttcaggaagaggccgtgtcctctcctgaggtgatttttgttgccgttttccgggaacactactcaagcctctgttctctgtccgatcagttggccggaaagatcctggtggatgtgagcaatcctactgagcaggaacatctacaacaccgcgaatcgaatgccgaatatttagcctcgttattccctacctgcacagtggtgaaggctttcaatgtgattagtgcctggacactgcaggccggccccagagatggaaaccgtcaggtccctatctgcggagatcagcctgaagccaagcgggccgtgagtgagatggcgcttgcaatgggttttatgccagttgacatgggtagcctggcttccgcctgggaagtggaggcgatgccgcttcgcttgctgcccgcttggaaggtaccaaccctcctcgccctgggcctcttcgtctgcttttacgcgtacaactttgtacgggacgtcttacagccgtacgtgcaagagtcacaaaataagttttttaagctgcctgttagcgtcgtcaatacgacattgccgtgcgtggcttatgttctgctgtccctggtgtacctgccgggggtgctggccgcagcccttcaattgagaagaggaactaagtaccagcgctttcctgactggctggatcactggctgcagcaccgtaaacagatcggcttgctttcttttttttgcgcagcactgcatgcactatattctttctgccttccactgcgacgggcacacagatacgaccttgtgaatctcgctgtgaagcaagtactggccaataagagccacctttgggttgaagaagaagtatggcggatggaaatttatctgtcactgggagtgctcgccctcgggactttgtccctgctcgccgtgactagtcttccatcaatagctaattcactaaattggagggaatttagtttcgttcagtccagtctcggtttcgtggccctggtgctgtctactctccacactctgacttacggctggacgagagcattcgaggaatcccggtacaaattctatttacctcctacattcaccttgactctgctcgttccctgtgtggtgatcctggccaaagctctctttttacttccttgcatctccaggaggttggcacggatacgaagaggatgggaaagggaaagtaccatcaagtttacacttccaactgatcacgcattagctgagaagacctcacacgtctag

SEQ ID NO: 257219 - DNA, 1497 bp, Artificial Sequence
  derived and/or modified sequence
atgtcccaccaacccgcagtcgccaccaagatgcctgaggagatggataagcctctcatcagccttcatctggtggacagcgattcaagtctcgccaaggtgcccgacgaagcgcctaaggttggcatcttgggcagcggcgattttgcacgtagcttggccacacggttagtggggagcggctttaaggtggttgtcgggtctagaaacccaaagagaaccgctcgcctctttccctccgctgcacaggtgacgtttcaagaggaggcggtaagctccccggaggtgatattcgtggcagtgttcagggagcattattcatcgttgtgcagcctctcagaccaactggccggaaaaatactggttgatgtatctaatccaaccgaacaggagcatcttcagcacagggagtcaaacgccgaatacttagctagtctgtttccaacttgtactgtggtgaaggccttcaatgtgatcagcgcatggacgttgcaggctggaccaagggacggcaatcgccaggtgccaatttgcggagaccaaccggaagccaagcgggctgtgagcgagatggctctcgcgatggggtttatgcctgtggacatgggcagccttgcatccgcctgggaagtagaggcaatgcccctgcggctgctaccggcttggaaagtgcccaccctcctcgccctgggtctctttgtatgtttctatgcctataattttgtacgtgatgtgttgcaaccgtatgtacaggagtcccaaaacaaattttttaagctccccgtgtcagtcgttaataccacactgccttgcgtggcgtatgtcctcttaagccttgtgtacctccccggtgtactagccgcagccctgcagctacgtcggggtacgaagtaccagcgtttccctgactggctggaccattggctccagcacaggaaacagatcggcctcctgtccttcttctgcgcggcactgcatgccctatactccttttgccttccactcagacgcgctcatcgctacgacttggtgaacttggccgtcaaacaggtgctcgccaataagtcccacctgtgggtggaggaggaggtgtggagaatggaaatttacctgagcctcggggtgctggcactcggaacactctctttgctggcggtgacctccctcccctcaatcgccaatagtctgaattggagagagttttcatttgtacagtcttctctgggctttgtggccctcgtgctttcaaccctccacaccttgacgtatggctggaccagagcttttgaagagagccgctacaagttttacttgcccccaacctttaccctgaccctcttggtgccatgtgtggtcatccttgcaaaggccctgtttcttctgccctgcatctctcggagactggccaggattcgacgaggctgggaaagagagtcaactataaagtttaccttgcccacggatcatgctttagctgagaaaacttctcatgtgtag

SEQ ID NO: 257220 - DNA, 4282 bp, Artificial Sequence
  derived and/or modified sequence
gaggaggagcctcgggccgagccaccgccttcgccgcggaccttcagctgccgcggtcgctccgagcggcgggccgcagagatgacatttattcattttatgcatcctgggttctactggtcgtcccacctcagttcctgtagcaaagagacttgagtctgagccactaattatcacccgtgaggtttcctccccgagcaggaagcagcaggccagagctgcgctctctcagtgcactctccaaccaagcatcagtcaccactcccggtccagcccctgtggccaagagctggcgtgcaggctgcgggaggcagctggctgtgcaagaccctggcagggccctcgcctcctgagaaaccgagagtcagaaccaaagccaggctgtcctggttggagactgagccagaaagggtggctcacctcacggtgaggctgtcgagtgacctgagagcctcagaccctcacgtcagccggatgtcgcaccagcctgctgttgccaccaaaatgccagaagagatggacaagccactgatcagcctccacctggtggacagcgatagtagccttgccaaggtccccgatgaggcccccaaagtgggcatcctgggtagcggggactttgcccgctccctggccacacgcctggtgggctctggcttcaaagtggtggtggggagccgcaaccccaaacgcacagccaggctgtttccctcagcggcccaagtgactttccaagaggaggcagtgagctccccggaggtcatctttgtggctgtgttccgggagcactactcttcactgtgcagtctcagtgaccagctggcgggcaagatcctggtggatgtgagcaaccctacagagcaagagcaccttcagcatcgtgagtccaatgctgagtacctggcctccctcttccccacttgcacagtggtcaaggccttcaatgtcatctctgcctggaccctgcaggctggcccaagggatggtaacaggcaggtgcccatctgcggtgaccagccagaagccaagcgtgctgtctcggagatggcgctcgccatgggcttcatgcccgtggacatgggatccctggcgtcagcctgggaggtggaggccatgcccctgcgcctcctcccggcctggaaggtgcccaccctgctggccctggggctcttcgtctgcttctatgcctacaacttcgtccgggacgttctgcagccctatgtgcaggaaagccagaacaagttcttcaagctgcccgtgtccgtggtcaacaccacactgccgtgcgtggcctacgtgctgctgtcactcgtgtacttgcccggcgtgctggcggctgccctgcagctgcggcgcggcaccaagtaccagcgcttccccgactggctggaccactggctacagcaccgcaagcagatcgggctgctcagcttcttctgcgccgccctgcacgccctctacagcttctgcttgccgctgcgccgcgcccaccgctacgacctggtcaacctggcagtcaagcaggtcttggccaacaagagccacctctgggtggaggaggaggtctggcggatggagatctacctctccctgggagtgctggccctcggcacgttgtccctgctggccgtgacctcactgccgtccattgcaaactcgctcaactggagggagttcagcttcgttcagtcctcactgggctttgtggccctcgtgctgagcacactgcacacgctcacctacggctggacccgcgccttcgaggagagccgctacaagttctacctgcctcccaccttcacgctcacgctgctggtgccctgcgtcgtcatcctggccaaagccctgtttctcctgccctgcatcagccgcagactcgccaggatccggagaggctgggagagggagagcaccatcaagttcacgctgcccacagaccacgccctggccgagaagacgagccacgtatgaggtgcctgccctgggctctggaccccgggcacacgagggacggtgccctgagcccgttaggttttcttttcttggtggtgcaaagtggtataactgtgtgcaaataggaggtttgaggtccaaattcctgggactcaaatgtatgcagtactattcagaatgatatacacacatatgtgtatatgtatttacatatattccacatatataacaggatttgcaattatacatagctagctaaaaagttgggtctctgagatttcaacttgtagatttaaaaacaagtgccgtacgttaagagaagagcagatcatgctattgtgacatttgcagagatatacacacactttttgtacagaagaggcttgtgctgtggtgggttcgatttatccctgcccaccccacccccacaacttcccttttgctacttccccaaggctcttgcagagctagggctctgaaggggagggaaggcaacggctctgcccagagccatccctggagcatgtgagcagcggctggtctcttccctccacctggggcagcagcaggaggcctggggaggaggaaaatcaggcagtcggcctggagtctgtgcctggtcctttgcccggtggtgggaggatggagggattgggctgaagctgctccacctcatccttgctgagtgggggagacattttccctgaaagtcagaagtcaccatagagcctgcaaatggatcctcctgtgagagtgacgtcacctcctttccagagccattagtgagcctggcttgggaacaagtgtaatttccttccctcctttaacctggcgatgagcgtcctttaaaccactgtgccttctcaccctttccatcttcagtttgaatgactcccaggaaggcctagagcagaccctttagaaatcagcccaagggggagagcaagagaaaacactctagggagtaaagctccccgggcgtcagagttgagccctgcctgggctgaaggactgtcttcacgaagtcagtcctgaggaaaaatattggggactccaaatgtcctctggcagaggacccagaaaaccacactggctccaacttcctcctcatggggcattacacttcaaaacagtggggagcaacttttccaccaaagctacaaacctaaaatgctgctgccccaaagcacaagagggaagagcaccgccggggccacaggacgtctgtcctccagtcacaggccatccttgctgctccctactgactctagcttacttcccctgtgaagaaacaggtgttctcggctgagcccccaaccctctgcagaaccaggttgatctgccacagaaaaagcatctttgaagacaaagagggtgaggtcttcatgagtctcctgggcccaaagccatcttctgatggaaggaagagagtagggccagtgaaggctgcccagagagaatgtcacagatgaggctgcccctgccccccccccgccagggaggtttcatgagctcatgtctatgcagcacataagggttcttcagtgaaaagcaggagaagagcccactgcaaggatagctcattaggcacatgaccgatgcagggaaggccatgccggggaagctcttcctgcaggtattttccatctgctgtgccaaggctgagcggcagaaacttgtctcataaattggcactgatggagcatcagctgtggcccacagagagccttgctgagaagggggcaggtaaagcagagattttagcattgccttggcataacaagggcccatcgattccctactaatgagaggcagggagagcatgggcaatggagacccaccaatgatccccaaccccggtgggtactggctgcctgccctgggccagggaatggctccttataccaaagatgctggcacatagcagaacccagtgcacgtcctccccttcccacccacctctggctgaaggtgctcaagagggaagcaattataaggtgggtggcaggagggaacaggtgccacctgctggacaatcacacgaaaggcaggcgggctgtgtactgggccctgactgtgcgtccactgctgtcttccctacctcaccaggctactggcagcagcatcccgagagcacatcatctccacagcctggtaaattccatgtgcctctgggtacaaaagtgcctcaacgacatgctctggaaatcccaaatgccacagtctgaggttgatatctaaaatctatgccttcaaaagagtctctgttttttttttttaacctggtagacagtataaaagcagtgcaaataaacacctaaccttctgc

SEQ ID NO: 257221 - DNA, 3915 bp, Artificial Sequence
  derived and/or modified sequence
accgccttcgccgcggaccttcagctgccgcggtcgctccgagcggcgggccgcagaggttcaagcgattctcctgcttcagcctccggagtagctgggattacaggcacgtgccaacacacccagccaccaaaatgccagaagagatggacaagccactgatcagcctccacctggtggacagcgatagtagccttgccaaggtccccgatgaggcccccaaagtgggcatcctgggtagcggggactttgcccgctccctggccacacgcctggtgggctctggcttcaaagtggtggtggggagccgcaaccccaaacgcacagccaggctgtttccctcagcggcccaagtgactttccaagaggaggcagtgagctccccggaggtcatctttgtggctgtgttccgggagcactactcttcactgtgcagtctcagtgaccagctggcgggcaagatcctggtggatgtgagcaaccctacagagcaagagcaccttcagcatcgtgagtccaatgctgagtacctggcctccctcttccccacttgcacagtggtcaaggccttcaatgtcatctctgcctggaccctgcaggctggcccaagggatggtaacaggcaggtgcccatctgcggtgaccagccagaagccaagcgtgctgtctcggagatggcgctcgccatgggcttcatgcccgtggacatgggatccctggcgtcagcctgggaggtggaggccatgcccctgcgcctcctcccggcctggaaggtgcccaccctgctggccctggggctcttcgtctgcttctatgcctacaacttcgtccgggacgttctgcagccctatgtgcaggaaagccagaacaagttcttcaagctgcccgtgtccgtggtcaacaccacactgccgtgcgtggcctacgtgctgctgtcactcgtgtacttgcccggcgtgctggcggctgccctgcagctgcggcgcggcaccaagtaccagcgcttccccgactggctggaccactggctacagcaccgcaagcagatcgggctgctcagcttcttctgcgccgccctgcacgccctctacagcttctgcttgccgctgcgccgcgcccaccgctacgacctggtcaacctggcagtcaagcaggtcttggccaacaagagccacctctgggtggaggaggaggtctggcggatggagatctacctctccctgggagtgctggccctcggcacgttgtccctgctggccgtgacctcactgccgtccattgcaaactcgctcaactggagggagttcagcttcgttcagtcctcactgggctttgtggccctcgtgctgagcacactgcacacgctcacctacggctggacccgcgccttcgaggagagccgctacaagttctacctgcctcccaccttcacgctcacgctgctggtgccctgcgtcgtcatcctggccaaagccctgtttctcctgccctgcatcagccgcagactcgccaggatccggagaggctgggagagggagagcaccatcaagttcacgctgcccacagaccacgccctggccgagaagacgagccacgtatgaggtgcctgccctgggctctggaccccgggcacacgagggacggtgccctgagcccgttaggttttcttttcttggtggtgcaaagtggtataactgtgtgcaaataggaggtttgaggtccaaattcctgggactcaaatgtatgcagtactattcagaatgatatacacacatatgtgtatatgtatttacatatattccacatatataacaggatttgcaattatacatagctagctaaaaagttgggtctctgagatttcaacttgtagatttaaaaacaagtgccgtacgttaagagaagagcagatcatgctattgtgacatttgcagagatatacacacactttttgtacagaagaggcttgtgctgtggtgggttcgatttatccctgcccaccccacccccacaacttcccttttgctacttccccaaggctcttgcagagctagggctctgaaggggagggaaggcaacggctctgcccagagccatccctggagcatgtgagcagcggctggtctcttccctccacctggggcagcagcaggaggcctggggaggaggaaaatcaggcagtcggcctggagtctgtgcctggtcctttgcccggtggtgggaggatggagggattgggctgaagctgctccacctcatccttgctgagtgggggagacattttccctgaaagtcagaagtcaccatagagcctgcaaatggatcctcctgtgagagtgacgtcacctcctttccagagccattagtgagcctggcttgggaacaagtgtaatttccttccctcctttaacctggcgatgagcgtcctttaaaccactgtgccttctcaccctttccatcttcagtttgaatgactcccaggaaggcctagagcagaccctttagaaatcagcccaagggggagagcaagagaaaacactctagggagtaaagctccccgggcgtcagagttgagccctgcctgggctgaaggactgtcttcacgaagtcagtcctgaggaaaaatattggggactccaaatgtcctctggcagaggacccagaaaaccacactggctccaacttcctcctcatggggcattacacttcaaaacagtggggagcaacttttccaccaaagctacaaacctaaaatgctgctgccccaaagcacaagagggaagagcaccgccggggccacaggacgtctgtcctccagtcacaggccatccttgctgctccctactgactctagcttacttcccctgtgaagaaacaggtgttctcggctgagcccccaaccctctgcagaaccaggttgatctgccacagaaaaagcatctttgaagacaaagagggtgaggtcttcatgagtctcctgggcccaaagccatcttctgatggaaggaagagagtagggccagtgaaggctgcccagagagaatgtcacagatgaggctgcccctgccccccccccgccagggaggtttcatgagctcatgtctatgcagcacataagggttcttcagtgaaaagcaggagaagagcccactgcaaggatagctcattaggcacatgaccgatgcagggaaggccatgccggggaagctcttcctgcaggtattttccatctgctgtgccaaggctgagcggcagaaacttgtctcataaattggcactgatggagcatcagctgtggcccacagagagccttgctgagaagggggcaggtaaagcagagattttagcattgccttggcataacaagggcccatcgattccctactaatgagaggcagggagagcatgggcaatggagacccaccaatgatccccaaccccggtgggtactggctgcctgccctgggccagggaatggctccttataccaaagatgctggcacatagcagaacccagtgcacgtcctccccttcccacccacctctggctgaaggtgctcaagagggaagcaattataaggtgggtggcaggagggaacaggtgccacctgctggacaatcacacgaaaggcaggcgggctgtgtactgggccctgactgtgcgtccactgctgtcttccctacctcaccaggctactggcagcagcatcccgagagcacatcatctccacagcctggtaaattccatgtgcctctgggtacaaaagtgcctcaacgacatgctctggaaatcccaaatgccacagtctgaggttgatatctaaaatctatgccttcaaaagagtctctgttttttttttttaacctggtagacagtataaaagcagtgcaaataaacacctaaccttctgcaaa

SEQ ID NO: 257222 - DNA, 1871 bp, Artificial Sequence
  derived and/or modified sequence
agctgccgcggtcgctccgagcggcgggccgcagagccaccaaaatgccagaagagatggacaagccactgatcagcctccacctggtggacagcgatagtagccttgccaaggtccccgatgaggcccccaaagtgggcatcctgggtagcggggactttgcccgctccctggccacacgcctggtgggctctggcttcaaagtggtggtggggagccgcaaccccaaacgcacagccaggctgtttccctcagcggcccaagtgactttccaagaggaggcagtgagctccccggaggtcatctttgtggctgtgttccgggagcactactcttcactgtgcagtctcagtgaccagctggcgggcaagatcctggtggatgtgagcaaccctacagagcaagagcaccttcagcatcgtgagtccaatgctgagtacctggcctccctcttccccacttgcacagtggtcaaggccttcaatgtcatctctgcctggaccctgcaggctggcccaagggatggtaacaggcaggtgcccatctgcggtgaccagccagaagccaagcgtgctgtctcggagatggcgctcgccatgggcttcatgcccgtggacatgggatccctggcgtcagcctgggaggtggaggccatgcccctgcgcctcctcccggcctggaaggtgcccaccctgctggccctggggctcttcgtctgcttctatgcctacaacttcgtccgggacgttctgcagccctatgtgcaggaaagccagaacaagttcttcaagctgcccgtgtccgtggtcaacaccacactgccgtgcgtggcctacgtgctgctgtcactcgtgtacttgcccggcgtgctggcggctgccctgcagctgcggcgcggcaccaagtaccagcgcttccccgactggctggaccactggctacagcaccgcaagcagatcgggctgctcagcttcttctgcgccgccctgcacgccctctacagcttctgcttgccgctgcgccgcgcccaccgctacgacctggtcaacctggcagtcaagcaggtcttggccaacaagagccacctctgggtggaggaggaggtctggcggatggagatctacctctccctgggagtgctggccctcggcacgttgtccctgctggccgtgacctcactgccgtccattgcaaactcgctcaactggagggagttcagcttcgttcagtcctcactgggctttgtggccctcgtgctgagcacactgcacacgctcacctacggctggacccgcgccttcgaggagagccgctacaagttctacctgcctcccaccttcacgctcacgctgctggtgccctgcgtcgtcatcctggccaaagccctgtttctcctgccctgcatcagccgcagactcgccaggatccggagaggctgggagagggagagcaccatcaagttcacgctgcccacagaccacgccctggccgagaagacgagccacgtatgaggtgcctgccctgggctctggaccccgggcacacgagggacggtgccctgagcccgttaggttttcttttcttggtggtgcaaagtggtataactgtgtgcaaataggaggtttgaggtccaaattcctgggactcaaatgtatgcagtactattcagaatgatatacacacatatgtgtatatgtatttacatatattccacatatataacaggatttgcaattatacatagctagctaaaaagttgggtctctgagatttcaacttgtagatttaaaaacaagtgccgtacgttaagagaagagcagatcatgctattgtgacatttgcagagatatacacacactttttgtacagaa

SEQ ID NO: 257223 - DNA, 3934 bp, Artificial Sequence
  derived and/or modified sequence
gaggaggagcctcgggccgagccaccgccttcgccgcggaccttcagctgccgcggtcgctccgagcggcgggccgcagaggtgagtgtaccctcccccggtctccgcggggctgcgtgctgcgcccggtccccgagacgcccagccaccaaaatgccagaagagatggacaagccactgatcagcctccacctggtggacagcgatagtagccttgccaaggtccccgatgaggcccccaaagtgggcatcctgggtagcggggactttgcccgctccctggccacacgcctggtgggctctggcttcaaagtggtggtggggagccgcaaccccaaacgcacagccaggctgtttccctcagcggcccaagtgactttccaagaggaggcagtgagctccccggaggtcatctttgtggctgtgttccgggagcactactcttcactgtgcagtctcagtgaccagctggcgggcaagatcctggtggatgtgagcaaccctacagagcaagagcaccttcagcatcgtgagtccaatgctgagtacctggcctccctcttccccacttgcacagtggtcaaggccttcaatgtcatctctgcctggaccctgcaggctggcccaagggatggtaacaggcaggtgcccatctgcggtgaccagccagaagccaagcgtgctgtctcggagatggcgctcgccatgggcttcatgcccgtggacatgggatccctggcgtcagcctgggaggtggaggccatgcccctgcgcctcctcccggcctggaaggtgcccaccctgctggccctggggctcttcgtctgcttctatgcctacaacttcgtccgggacgttctgcagccctatgtgcaggaaagccagaacaagttcttcaagctgcccgtgtccgtggtcaacaccacactgccgtgcgtggcctacgtgctgctgtcactcgtgtacttgcccggcgtgctggcggctgccctgcagctgcggcgcggcaccaagtaccagcgcttccccgactggctggaccactggctacagcaccgcaagcagatcgggctgctcagcttcttctgcgccgccctgcacgccctctacagcttctgcttgccgctgcgccgcgcccaccgctacgacctggtcaacctggcagtcaagcaggtcttggccaacaagagccacctctgggtggaggaggaggtctggcggatggagatctacctctccctgggagtgctggccctcggcacgttgtccctgctggccgtgacctcactgccgtccattgcaaactcgctcaactggagggagttcagcttcgttcagtcctcactgggctttgtggccctcgtgctgagcacactgcacacgctcacctacggctggacccgcgccttcgaggagagccgctacaagttctacctgcctcccaccttcacgctcacgctgctggtgccctgcgtcgtcatcctggccaaagccctgtttctcctgccctgcatcagccgcagactcgccaggatccggagaggctgggagagggagagcaccatcaagttcacgctgcccacagaccacgccctggccgagaagacgagccacgtatgaggtgcctgccctgggctctggaccccgggcacacgagggacggtgccctgagcccgttaggttttcttttcttggtggtgcaaagtggtataactgtgtgcaaataggaggtttgaggtccaaattcctgggactcaaatgtatgcagtactattcagaatgatatacacacatatgtgtatatgtatttacatatattccacatatataacaggatttgcaattatacatagctagctaaaaagttgggtctctgagatttcaacttgtagatttaaaaacaagtgccgtacgttaagagaagagcagatcatgctattgtgacatttgcagagatatacacacactttttgtacagaagaggcttgtgctgtggtgggttcgatttatccctgcccaccccacccccacaacttcccttttgctacttccccaaggctcttgcagagctagggctctgaaggggagggaaggcaacggctctgcccagagccatccctggagcatgtgagcagcggctggtctcttccctccacctggggcagcagcaggaggcctggggaggaggaaaatcaggcagtcggcctggagtctgtgcctggtcctttgcccggtggtgggaggatggagggattgggctgaagctgctccacctcatccttgctgagtgggggagacattttccctgaaagtcagaagtcaccatagagcctgcaaatggatcctcctgtgagagtgacgtcacctcctttccagagccattagtgagcctggcttgggaacaagtgtaatttccttccctcctttaacctggcgatgagcgtcctttaaaccactgtgccttctcaccctttccatcttcagtttgaatgactcccaggaaggcctagagcagaccctttagaaatcagcccaagggggagagcaagagaaaacactctagggagtaaagctccccgggcgtcagagttgagccctgcctgggctgaaggactgtcttcacgaagtcagtcctgaggaaaaatattggggactccaaatgtcctctggcagaggacccagaaaaccacactggctccaacttcctcctcatggggcattacacttcaaaacagtggggagcaacttttccaccaaagctacaaacctaaaatgctgctgccccaaagcacaagagggaagagcaccgccggggccacaggacgtctgtcctccagtcacaggccatccttgctgctccctactgactctagcttacttcccctgtgaagaaacaggtgttctcggctgagcccccaaccctctgcagaaccaggttgatctgccacagaaaaagcatctttgaagacaaagagggtgaggtcttcatgagtctcctgggcccaaagccatcttctgatggaaggaagagagtagggccagtgaaggctgcccagagagaatgtcacagatgaggctgcccctgccccccccccgccagggaggtttcatgagctcatgtctatgcagcacataagggttcttcagtgaaaagcaggagaagagcccactgcaaggatagctcattaggcacatgaccgatgcagggaaggccatgccggggaagctcttcctgcaggtattttccatctgctgtgccaaggctgagcggcagaaacttgtctcataaattggcactgatggagcatcagctgtggcccacagagagccttgctgagaagggggcaggtaaagcagagattttagcattgccttggcataacaagggcccatcgattccctactaatgagaggcagggagagcatgggcaatggagacccaccaatgatccccaaccccggtgggtactggctgcctgccctgggccagggaatggctccttataccaaagatgctggcacatagcagaacccagtgcacgtcctccccttcccacccacctctggctgaaggtgctcaagagggaagcaattataaggtgggtggcaggagggaacaggtgccacctgctggacaatcacacgaaaggcaggcgggctgtgtactgggccctgactgtgcgtccactgctgtcttccctacctcaccaggctactggcagcagcatcccgagagcacatcatctccacagcctggtaaattccatgtgcctctgggtacaaaagtgcctcaacgacatgctctggaaatcccaaatgccacagtctgaggttgatatctaaaatctatgccttcaaaagagtctctgttttttttttttaacctggtagacagtataaaagcagtgcaaataaacacctaaccttctgcaaa

SEQ ID NO: 257224 - DNA, 4262 bp, Artificial Sequence
  derived and/or modified sequence
accgccttcgccgcggaccttcagctgccgcggtcgctccgagcggcgggccgcagagatgacatttattcattttatgcatcctgggttctactggtcgtcccacctcagttcctgtagcaaagagacttgagtctgagccactaattatcacccgtgaggtttcctccccgagcaggaagcagcaggccagagctgcgctctctcagtgcactctccaaccaagcatcagtcaccactcccggtccagcccctgtggccaagagctggcgtgcaggctgcgggaggcagctggctgtgcaagaccctggcagggccctcgcctcctgagaaaccgagagtcagaaccaaagccaggctgtcctggttggagactgagccagaaagggtggctcacctcacggtgaggctgtcgagtgacctgagagcctcagaccctcacgtcagccggatgtcgcaccagcctgctgttgccaccaaaatgccagaagagatggacaagccactgatcagcctccacctggtggacagcgatagtagccttgccaaggtccccgatgaggcccccaaagtgggcatcctgggtagcggggactttgcccgctccctggccacacgcctggtgggctctggcttcaaagtggtggtggggagccgcaaccccaaacgcacagccaggctgtttccctcagcggcccaagtgactttccaagaggaggcagtgagctccccggaggtcatctttgtggctgtgttccgggagcactactcttcactgtgcagtctcagtgaccagctggcgggcaagatcctggtggatgtgagcaaccctacagagcaagagcaccttcagcatcgtgagtccaatgctgagtacctggcctccctcttccccacttgcacagtggtcaaggccttcaatgtcatctctgcctggaccctgcaggctggcccaagggatggtaacaggcaggtgcccatctgcggtgaccagccagaagccaagcgtgctgtctcggagatggcgctcgccatgggcttcatgcccgtggacatgggatccctggcgtcagcctgggaggtggaggccatgcccctgcgcctcctcccggcctggaaggtgcccaccctgctggccctggggctcttcgtctgcttctatgcctacaacttcgtccgggacgttctgcagccctatgtgcaggaaagccagaacaagttcttcaagctgcccgtgtccgtggtcaacaccacactgccgtgcgtggcctacgtgctgctgtcactcgtgtacttgcccggcgtgctggcggctgccctgcagctgcggcgcggcaccaagtaccagcgcttccccgactggctggaccactggctacagcaccgcaagcagatcgggctgctcagcttcttctgcgccgccctgcacgccctctacagcttctgcttgccgctgcgccgcgcccaccgctacgacctggtcaacctggcagtcaagcaggtcttggccaacaagagccacctctgggtggaggaggaggtctggcggatggagatctacctctccctgggagtgctggccctcggcacgttgtccctgctggccgtgacctcactgccgtccattgcaaactcgctcaactggagggagttcagcttcgttcagtcctcactgggctttgtggccctcgtgctgagcacactgcacacgctcacctacggctggacccgcgccttcgaggagagccgctacaagttctacctgcctcccaccttcacgctcacgctgctggtgccctgcgtcgtcatcctggccaaagccctgtttctcctgccctgcatcagccgcagactcgccaggatccggagaggctgggagagggagagcaccatcaagttcacgctgcccacagaccacgccctggccgagaagacgagccacgtatgaggtgcctgccctgggctctggaccccgggcacacgagggacggtgccctgagcccgttaggttttcttttcttggtggtgcaaagtggtataactgtgtgcaaataggaggtttgaggtccaaattcctgggactcaaatgtatgcagtactattcagaatgatatacacacatatgtgtatatgtatttacatatattccacatatataacaggatttgcaattatacatagctagctaaaaagttgggtctctgagatttcaacttgtagatttaaaaacaagtgccgtacgttaagagaagagcagatcatgctattgtgacatttgcagagatatacacacactttttgtacagaagaggcttgtgctgtggtgggttcgatttatccctgcccaccccacccccacaacttcccttttgctacttccccaaggctcttgcagagctagggctctgaaggggagggaaggcaacggctctgcccagagccatccctggagcatgtgagcagcggctggtctcttccctccacctggggcagcagcaggaggcctggggaggaggaaaatcaggcagtcggcctggagtctgtgcctggtcctttgcccggtggtgggaggatggagggattgggctgaagctgctccacctcatccttgctgagtgggggagacattttccctgaaagtcagaagtcaccatagagcctgcaaatggatcctcctgtgagagtgacgtcacctcctttccagagccattagtgagcctggcttgggaacaagtgtaatttccttccctcctttaacctggcgatgagcgtcctttaaaccactgtgccttctcaccctttccatcttcagtttgaatgactcccaggaaggcctagagcagaccctttagaaatcagcccaagggggagagcaagagaaaacactctagggagtaaagctccccgggcgtcagagttgagccctgcctgggctgaaggactgtcttcacgaagtcagtcctgaggaaaaatattggggactccaaatgtcctctggcagaggacccagaaaaccacactggctccaacttcctcctcatggggcattacacttcaaaacagtggggagcaacttttccaccaaagctacaaacctaaaatgctgctgccccaaagcacaagagggaagagcaccgccggggccacaggacgtctgtcctccagtcacaggccatccttgctgctccctactgactctagcttacttcccctgtgaagaaacaggtgttctcggctgagcccccaaccctctgcagaaccaggttgatctgccacagaaaaagcatctttgaagacaaagagggtgaggtcttcatgagtctcctgggcccaaagccatcttctgatggaaggaagagagtagggccagtgaaggctgcccagagagaatgtcacagatgaggctgcccctgccccccccccgccagggaggtttcatgagctcatgtctatgcagcacataagggttcttcagtgaaaagcaggagaagagcccactgcaaggatagctcattaggcacatgaccgatgcagggaaggccatgccggggaagctcttcctgcaggtattttccatctgctgtgccaaggctgagcggcagaaacttgtctcataaattggcactgatggagcatcagctgtggcccacagagagccttgctgagaagggggcaggtaaagcagagattttagcattgccttggcataacaagggcccatcgattccctactaatgagaggcagggagagcatgggcaatggagacccaccaatgatccccaaccccggtgggtactggctgcctgccctgggccagggaatggctccttataccaaagatgctggcacatagcagaacccagtgcacgtcctccccttcccacccacctctggctgaaggtgctcaagagggaagcaattataaggtgggtggcaggagggaacaggtgccacctgctggacaatcacacgaaaggcaggcgggctgtgtactgggccctgactgtgcgtccactgctgtcttccctacctcaccaggctactggcagcagcatcccgagagcacatcatctccacagcctggtaaattccatgtgcctctgggtacaaaagtgcctcaacgacatgctctggaaatcccaaatgccacagtctgaggttgatatctaaaatctatgccttcaaaagagtctctgttttttttttttaacctggtagacagtataaaagcagtgcaaataaacacctaaccttctgcaaa

SEQ ID NO: 257225 - DNA, 3852 bp, Artificial Sequence
  derived and/or modified sequence
tcaagcgattctcctgccttgacctcctgaagtgctaagattacaggtgtgagccactgcacgcagccaccaaaatgccagaagagatggacaagccactgatcagcctccacctggtggacagcgatagtagccttgccaaggtccccgatgaggcccccaaagtgggcatcctgggtagcggggactttgcccgctccctggccacacgcctggtgggctctggcttcaaagtggtggtggggagccgcaaccccaaacgcacagccaggctgtttccctcagcggcccaagtgactttccaagaggaggcagtgagctccccggaggtcatctttgtggctgtgttccgggagcactactcttcactgtgcagtctcagtgaccagctggcgggcaagatcctggtggatgtgagcaaccctacagagcaagagcaccttcagcatcgtgagtccaatgctgagtacctggcctccctcttccccacttgcacagtggtcaaggccttcaatgtcatctctgcctggaccctgcaggctggcccaagggatggtaacaggcaggtgcccatctgcggtgaccagccagaagccaagcgtgctgtctcggagatggcgctcgccatgggcttcatgcccgtggacatgggatccctggcgtcagcctgggaggtggaggccatgcccctgcgcctcctcccggcctggaaggtgcccaccctgctggccctggggctcttcgtctgcttctatgcctacaacttcgtccgggacgttctgcagccctatgtgcaggaaagccagaacaagttcttcaagctgcccgtgtccgtggtcaacaccacactgccgtgcgtggcctacgtgctgctgtcactcgtgtacttgcccggcgtgctggcggctgccctgcagctgcggcgcggcaccaagtaccagcgcttccccgactggctggaccactggctacagcaccgcaagcagatcgggctgctcagcttcttctgcgccgccctgcacgccctctacagcttctgcttgccgctgcgccgcgcccaccgctacgacctggtcaacctggcagtcaagcaggtcttggccaacaagagccacctctgggtggaggaggaggtctggcggatggagatctacctctccctgggagtgctggccctcggcacgttgtccctgctggccgtgacctcactgccgtccattgcaaactcgctcaactggagggagttcagcttcgttcagtcctcactgggctttgtggccctcgtgctgagcacactgcacacgctcacctacggctggacccgcgccttcgaggagagccgctacaagttctacctgcctcccaccttcacgctcacgctgctggtgccctgcgtcgtcatcctggccaaagccctgtttctcctgccctgcatcagccgcagactcgccaggatccggagaggctgggagagggagagcaccatcaagttcacgctgcccacagaccacgccctggccgagaagacgagccacgtatgaggtgcctgccctgggctctggaccccgggcacacgagggacggtgccctgagcccgttaggttttcttttcttggtggtgcaaagtggtataactgtgtgcaaataggaggtttgaggtccaaattcctgggactcaaatgtatgcagtactattcagaatgatatacacacatatgtgtatatgtatttacatatattccacatatataacaggatttgcaattatacatagctagctaaaaagttgggtctctgagatttcaacttgtagatttaaaaacaagtgccgtacgttaagagaagagcagatcatgctattgtgacatttgcagagatatacacacactttttgtacagaagaggcttgtgctgtggtgggttcgatttatccctgcccaccccacccccacaacttcccttttgctacttccccaaggctcttgcagagctagggctctgaaggggagggaaggcaacggctctgcccagagccatccctggagcatgtgagcagcggctggtctcttccctccacctggggcagcagcaggaggcctggggaggaggaaaatcaggcagtcggcctggagtctgtgcctggtcctttgcccggtggtgggaggatggagggattgggctgaagctgctccacctcatccttgctgagtgggggagacattttccctgaaagtcagaagtcaccatagagcctgcaaatggatcctcctgtgagagtgacgtcacctcctttccagagccattagtgagcctggcttgggaacaagtgtaatttccttccctcctttaacctggcgatgagcgtcctttaaaccactgtgccttctcaccctttccatcttcagtttgaatgactcccaggaaggcctagagcagaccctttagaaatcagcccaagggggagagcaagagaaaacactctagggagtaaagctccccgggcgtcagagttgagccctgcctgggctgaaggactgtcttcacgaagtcagtcctgaggaaaaatattggggactccaaatgtcctctggcagaggacccagaaaaccacactggctccaacttcctcctcatggggcattacacttcaaaacagtggggagcaacttttccaccaaagctacaaacctaaaatgctgctgccccaaagcacaagagggaagagcaccgccggggccacaggacgtctgtcctccagtcacaggccatccttgctgctccctactgactctagcttacttcccctgtgaagaaacaggtgttctcggctgagcccccaaccctctgcagaaccaggttgatctgccacagaaaaagcatctttgaagacaaagagggtgaggtcttcatgagtctcctgggcccaaagccatcttctgatggaaggaagagagtagggccagtgaaggctgcccagagagaatgtcacagatgaggctgcccctgccccccccccgccagggaggtttcatgagctcatgtctatgcagcacataagggttcttcagtgaaaagcaggagaagagcccactgcaaggatagctcattaggcacatgaccgatgcagggaaggccatgccggggaagctcttcctgcaggtattttccatctgctgtgccaaggctgagcggcagaaacttgtctcataaattggcactgatggagcatcagctgtggcccacagagagccttgctgagaagggggcaggtaaagcagagattttagcattgccttggcataacaagggcccatcgattccctactaatgagaggcagggagagcatgggcaatggagacccaccaatgatccccaaccccggtgggtactggctgcctgccctgggccagggaatggctccttataccaaagatgctggcacatagcagaacccagtgcacgtcctccccttcccacccacctctggctgaaggtgctcaagagggaagcaattataaggtgggtggcaggagggaacaggtgccacctgctggacaatcacacgaaaggcaggcgggctgtgtactgggccctgactgtgcgtccactgctgtcttccctacctcaccaggctactggcagcagcatcccgagagcacatcatctccacagcctggtaaattccatgtgcctctgggtacaaaagtgcctcaacgacatgctctggaaatcccaaatgccacagtctgaggttgatatctaaaatctatgccttcaaaagagtctctgttttttttttttaacctggtagacagtataaaagcagtgcaaataaacacctaaccttctgc

SEQ ID NO: 257226 - protein, 1600 aa, Artificial Sequence
  derived and/or modified sequence
MNKAPQSTGPPPAPSPGLPQPAFPPGQTAPVVFSTPQATQMNTPSQPRQHFYPSRAQPPSSAASRVQSAAPARPGPAAHVYPAGSQVMMIPSQISYPASQGAYYIPGQGRSTYVVPTQQYPVQPGAPGFYPGASPTEFGTYAGAYYPAQGVQQFPTGVAPTPVLMNQPPQIAPKRERKTIRIRDPNQGGKDITEEIMSGARTASTPTPPQTGGGLEPQANGETPQVAVIVRPDDRSQGAIIADRPGLPGPEHSPSESQPSSPSPTPSPSPVLEPGSEPNLAVLSIPGDTMTTIQMSVEESTPISRETGEPYRLSPEPTPLAEPILEVEVTLSKPVPESEFSSSPLQAPTPLASHTVEIHEPNGMVPSEDLEPEVESSPELAPPPACPSESPVPIAPTAQPEELLNGAPSPPAVDLSPVSEPEEQAKEVTASMAPPTIPSATPATAPSATSPAQEEEMEEEEEEEEGEAGEAGEAESEKGGEELLPPESTPIPANLSQNLEAAAATQVAVSVPKRRRKIKELNKKEAVGDLLDAFKEANPAVPEVENQPPAGSNPGPESEGSGVPPRPEEADETWDSKEDKIHNAENIQPGEQKYEYKSDQWKPLNLEEKKRYDREFLLGFQFIFASMQKPEGLPHISDVVLDKANKTPLRPLDPTRLQGINCGPDFTPSFANLGRTTLSTRGPPRGGPGGELPRGPQAGLGPRRSQQGPRKEPRKIIATVLMTEDIKLNKAEKAWKPSSKRTAADKDRGEEDADGSKTQDLFRRVRSILNKLTPQMFQQLMKQVTQLAIDTEERLKGVIDLIFEKAISEPNFSVAYANMCRCLMALKVPTTEKPTVTVNFRKLLLNRCQKEFEKDKDDDEVFEKKQKEMDEAATAEERGRLKEELEEARDIARRRSLGNIKFIGELFKLKMLTEAIMHDCVVKLLKNHDEESLECLCRLLTTIGKDLDFEKAKPRMDQYFNQMEKIIKEKKTSSRIRFMLQDVLDLRGSNWVPRRGDQGPKTIDQIHKEAEMEEHREHIKVQQLMAKGSDKRRGGPPGPPISRGLPLVDDGGWNTVPISKGSRPIDTSRLTKITKPGSIDSNNQLFAPGGRLSWGKGSSGGSGAKPSDAASEAARPATSTLNRFSALQQAVPTESTDNRRVVQRSSLSRERGEKAGDRGDRLERSERGGDRGDRLDRARTPATKRSFSKEVEERSRERPSQPEGLRKAASLTEDRDRGRDAVKREAALPPVSPLKAALSEEELEKKSKAIIEEYLHLNDMKEAVQCVQELASPSLLFIFVRHGVESTLERSAIAREHMGQLLHQLLCAGHLSTAQYYQGLYEILELAEDMEIDIPHVWLYLAELVTPILQEGGVPMGELFREITKPLRPLGKAASLLLEILGLLCKSMGPKKVGTLWREAGLSWKEFLPEGQDIGAFVAEQKVEYTLGEESEAPGQRALPSEELNRQLEKLLKEGSSNQRVFDWIEANLSEQQIVSNTLVRALMTAVCYSAIIFETPLRVDVAVLKARAKLLQKYLCDEQKELQALYALQALVVTLEQPPNLLRMFFDALYDEDVVKEDAFYSWESSKDPAEQQGKGVALKSVTAFFKWLREAEEESDHN

SEQ ID NO: 257227 - protein, 1560 aa, Artificial Sequence
  derived and/or modified sequence
MNTPSQPRQHFYPSRAQPPSSAASRVQSAAPARPGPAAHVYPAGSQVMMIPSQISYPASQGAYYIPGQGRSTYVVPTQQYPVQPGAPGFYPGASPTEFGTYAGAYYPAQGVQQFPTGVAPTPVLMNQPPQIAPKRERKTIRIRDPNQGGKDITEEIMSGARTASTPTPPQTGGGLEPQANGETPQVAVIVRPDDRSQGAIIADRPGLPGPEHSPSESQPSSPSPTPSPSPVLEPGSEPNLAVLSIPGDTMTTIQMSVEESTPISRETGEPYRLSPEPTPLAEPILEVEVTLSKPVPESEFSSSPLQAPTPLASHTVEIHEPNGMVPSEDLEPEVESSPELAPPPACPSESPVPIAPTAQPEELLNGAPSPPAVDLSPVSEPEEQAKEVTASMAPPTIPSATPATAPSATSPAQEEEMEEEEEEEEGEAGEAGEAESEKGGEELLPPESTPIPANLSQNLEAAAATQVAVSVPKRRRKIKELNKKEAVGDLLDAFKEANPAVPEVENQPPAGSNPGPESEGSGVPPRPEEADETWDSKEDKIHNAENIQPGEQKYEYKSDQWKPLNLEEKKRYDREFLLGFQFIFASMQKPEGLPHISDVVLDKANKTPLRPLDPTRLQGINCGPDFTPSFANLGRTTLSTRGPPRGGPGGELPRGPQAGLGPRRSQQGPRKEPRKIIATVLMTEDIKLNKAEKAWKPSSKRTAADKDRGEEDADGSKTQDLFRRVRSILNKLTPQMFQQLMKQVTQLAIDTEERLKGVIDLIFEKAISEPNFSVAYANMCRCLMALKVPTTEKPTVTVNFRKLLLNRCQKEFEKDKDDDEVFEKKQKEMDEAATAEERGRLKEELEEARDIARRRSLGNIKFIGELFKLKMLTEAIMHDCVVKLLKNHDEESLECLCRLLTTIGKDLDFEKAKPRMDQYFNQMEKIIKEKKTSSRIRFMLQDVLDLRGSNWVPRRGDQGPKTIDQIHKEAEMEEHREHIKVQQLMAKGSDKRRGGPPGPPISRGLPLVDDGGWNTVPISKGSRPIDTSRLTKITKPGSIDSNNQLFAPGGRLSWGKGSSGGSGAKPSDAASEAARPATSTLNRFSALQQAVPTESTDNRRVVQRSSLSRERGEKAGDRGDRLERSERGGDRGDRLDRARTPATKRSFSKEVEERSRERPSQPEGLRKAASLTEDRDRGRDAVKREAALPPVSPLKAALSEEELEKKSKAIIEEYLHLNDMKEAVQCVQELASPSLLFIFVRHGVESTLERSAIAREHMGQLLHQLLCAGHLSTAQYYQGLYEILELAEDMEIDIPHVWLYLAELVTPILQEGGVPMGELFREITKPLRPLGKAASLLLEILGLLCKSMGPKKVGTLWREAGLSWKEFLPEGQDIGAFVAEQKVEYTLGEESEAPGQRALPSEELNRQLEKLLKEGSSNQRVFDWIEANLSEQQIVSNTLVRALMTAVCYSAIIFETPLRVDVAVLKARAKLLQKYLCDEQKELQALYALQALVVTLEQPPNLLRMFFDALYDEDVVKEDAFYSWESSKDPAEQQGKGVALKSVTAFFKWLREAEEESDHN

SEQ ID NO: 257228 - protein, 1513 aa, Artificial Sequence
  derived and/or modified sequence
MMIPSQISYPASQGAYYIPGQGRSTYVVPTQQYPVQPGAPGFYPGASPTEFGTYAGAYYPAQGVQQFPTGVAPTPVLMNQPPQIAPKRERKTIRIRDPNQGGKDITEEIMSGARTASTPTPPQTGGGLEPQANGETPQVAVIVRPDDRSQGAIIADRPGLPGPEHSPSESQPSSPSPTPSPSPVLEPGSEPNLAVLSIPGDTMTTIQMSVEESTPISRETGEPYRLSPEPTPLAEPILEVEVTLSKPVPESEFSSSPLQAPTPLASHTVEIHEPNGMVPSEDLEPEVESSPELAPPPACPSESPVPIAPTAQPEELLNGAPSPPAVDLSPVSEPEEQAKEVTASMAPPTIPSATPATAPSATSPAQEEEMEEEEEEEEGEAGEAGEAESEKGGEELLPPESTPIPANLSQNLEAAAATQVAVSVPKRRRKIKELNKKEAVGDLLDAFKEANPAVPEVENQPPAGSNPGPESEGSGVPPRPEEADETWDSKEDKIHNAENIQPGEQKYEYKSDQWKPLNLEEKKRYDREFLLGFQFIFASMQKPEGLPHISDVVLDKANKTPLRPLDPTRLQGINCGPDFTPSFANLGRTTLSTRGPPRGGPGGELPRGPQAGLGPRRSQQGPRKEPRKIIATVLMTEDIKLNKAEKAWKPSSKRTAADKDRGEEDADGSKTQDLFRRVRSILNKLTPQMFQQLMKQVTQLAIDTEERLKGVIDLIFEKAISEPNFSVAYANMCRCLMALKVPTTEKPTVTVNFRKLLLNRCQKEFEKDKDDDEVFEKKQKEMDEAATAEERGRLKEELEEARDIARRRSLGNIKFIGELFKLKMLTEAIMHDCVVKLLKNHDEESLECLCRLLTTIGKDLDFEKAKPRMDQYFNQMEKIIKEKKTSSRIRFMLQDVLDLRGSNWVPRRGDQGPKTIDQIHKEAEMEEHREHIKVQQLMAKGSDKRRGGPPGPPISRGLPLVDDGGWNTVPISKGSRPIDTSRLTKITKPGSIDSNNQLFAPGGRLSWGKGSSGGSGAKPSDAASEAARPATSTLNRFSALQQAVPTESTDNRRVVQRSSLSRERGEKAGDRGDRLERSERGGDRGDRLDRARTPATKRSFSKEVEERSRERPSQPEGLRKAASLTEDRDRGRDAVKREAALPPVSPLKAALSEEELEKKSKAIIEEYLHLNDMKEAVQCVQELASPSLLFIFVRHGVESTLERSAIAREHMGQLLHQLLCAGHLSTAQYYQGLYEILELAEDMEIDIPHVWLYLAELVTPILQEGGVPMGELFREITKPLRPLGKAASLLLEILGLLCKSMGPKKVGTLWREAGLSWKEFLPEGQDIGAFVAEQKVEYTLGEESEAPGQRALPSEELNRQLEKLLKEGSSNQRVFDWIEANLSEQQIVSNTLVRALMTAVCYSAIIFETPLRVDVAVLKARAKLLQKYLCDEQKELQALYALQALVVTLEQPPNLLRMFFDALYDEDVVKEDAFYSWESSKDPAEQQGKGVALKSVTAFFKWLREAEEESDHN

SEQ ID NO: 257229 - protein, 1404 aa, Artificial Sequence
  derived and/or modified sequence
MSGARTASTPTPPQTGGGLEPQANGETPQVAVIVRPDDRSQGAIIADRPGLPGPEHSPSESQPSSPSPTPSPSPVLEPGSEPNLAVLSIPGDTMTTIQMSVEESTPISRETGEPYRLSPEPTPLAEPILEVEVTLSKPVPESEFSSSPLQAPTPLASHTVEIHEPNGMVPSEDLEPEVESSPELAPPPACPSESPVPIAPTAQPEELLNGAPSPPAVDLSPVSEPEEQAKEVTASMAPPTIPSATPATAPSATSPAQEEEMEEEEEEEEGEAGEAGEAESEKGGEELLPPESTPIPANLSQNLEAAAATQVAVSVPKRRRKIKELNKKEAVGDLLDAFKEANPAVPEVENQPPAGSNPGPESEGSGVPPRPEEADETWDSKEDKIHNAENIQPGEQKYEYKSDQWKPLNLEEKKRYDREFLLGFQFIFASMQKPEGLPHISDVVLDKANKTPLRPLDPTRLQGINCGPDFTPSFANLGRTTLSTRGPPRGGPGGELPRGPQAGLGPRRSQQGPRKEPRKIIATVLMTEDIKLNKAEKAWKPSSKRTAADKDRGEEDADGSKTQDLFRRVRSILNKLTPQMFQQLMKQVTQLAIDTEERLKGVIDLIFEKAISEPNFSVAYANMCRCLMALKVPTTEKPTVTVNFRKLLLNRCQKEFEKDKDDDEVFEKKQKEMDEAATAEERGRLKEELEEARDIARRRSLGNIKFIGELFKLKMLTEAIMHDCVVKLLKNHDEESLECLCRLLTTIGKDLDFEKAKPRMDQYFNQMEKIIKEKKTSSRIRFMLQDVLDLRGSNWVPRRGDQGPKTIDQIHKEAEMEEHREHIKVQQLMAKGSDKRRGGPPGPPISRGLPLVDDGGWNTVPISKGSRPIDTSRLTKITKPGSIDSNNQLFAPGGRLSWGKGSSGGSGAKPSDAASEAARPATSTLNRFSALQQAVPTESTDNRRVVQRSSLSRERGEKAGDRGDRLERSERGGDRGDRLDRARTPATKRSFSKEVEERSRERPSQPEGLRKAASLTEDRDRGRDAVKREAALPPVSPLKAALSEEELEKKSKAIIEEYLHLNDMKEAVQCVQELASPSLLFIFVRHGVESTLERSAIAREHMGQLLHQLLCAGHLSTAQYYQGLYEILELAEDMEIDIPHVWLYLAELVTPILQEGGVPMGELFREITKPLRPLGKAASLLLEILGLLCKSMGPKKVGTLWREAGLSWKEFLPEGQDIGAFVAEQKVEYTLGEESEAPGQRALPSEELNRQLEKLLKEGSSNQRVFDWIEANLSEQQIVSNTLVRALMTAVCYSAIIFETPLRVDVAVLKARAKLLQKYLCDEQKELQALYALQALVVTLEQPPNLLRMFFDALYDEDVVKEDAFYSWESSKDPAEQQGKGVALKSVTAFFKWLREAEEESDHN

SEQ ID NO: 257230 - protein, 1436 aa, Artificial Sequence
  derived and/or modified sequence
MNQPPQIAPKRERKTIRIRDPNQGGKDITEEIMSGARTASTPTPPQTGGGLEPQANGETPQVAVIVRPDDRSQGAIIADRPGLPGPEHSPSESQPSSPSPTPSPSPVLEPGSEPNLAVLSIPGDTMTTIQMSVEESTPISRETGEPYRLSPEPTPLAEPILEVEVTLSKPVPESEFSSSPLQAPTPLASHTVEIHEPNGMVPSEDLEPEVESSPELAPPPACPSESPVPIAPTAQPEELLNGAPSPPAVDLSPVSEPEEQAKEVTASMAPPTIPSATPATAPSATSPAQEEEMEEEEEEEEGEAGEAGEAESEKGGEELLPPESTPIPANLSQNLEAAAATQVAVSVPKRRRKIKELNKKEAVGDLLDAFKEANPAVPEVENQPPAGSNPGPESEGSGVPPRPEEADETWDSKEDKIHNAENIQPGEQKYEYKSDQWKPLNLEEKKRYDREFLLGFQFIFASMQKPEGLPHISDVVLDKANKTPLRPLDPTRLQGINCGPDFTPSFANLGRTTLSTRGPPRGGPGGELPRGPQAGLGPRRSQQGPRKEPRKIIATVLMTEDIKLNKAEKAWKPSSKRTAADKDRGEEDADGSKTQDLFRRVRSILNKLTPQMFQQLMKQVTQLAIDTEERLKGVIDLIFEKAISEPNFSVAYANMCRCLMALKVPTTEKPTVTVNFRKLLLNRCQKEFEKDKDDDEVFEKKQKEMDEAATAEERGRLKEELEEARDIARRRSLGNIKFIGELFKLKMLTEAIMHDCVVKLLKNHDEESLECLCRLLTTIGKDLDFEKAKPRMDQYFNQMEKIIKEKKTSSRIRFMLQDVLDLRGSNWVPRRGDQGPKTIDQIHKEAEMEEHREHIKVQQLMAKGSDKRRGGPPGPPISRGLPLVDDGGWNTVPISKGSRPIDTSRLTKITKPGSIDSNNQLFAPGGRLSWGKGSSGGSGAKPSDAASEAARPATSTLNRFSALQQAVPTESTDNRRVVQRSSLSRERGEKAGDRGDRLERSERGGDRGDRLDRARTPATKRSFSKEVEERSRERPSQPEGLRKAASLTEDRDRGRDAVKREAALPPVSPLKAALSEEELEKKSKAIIEEYLHLNDMKEAVQCVQELASPSLLFIFVRHGVESTLERSAIAREHMGQLLHQLLCAGHLSTAQYYQGLYEILELAEDMEIDIPHVWLYLAELVTPILQEGGVPMGELFREITKPLRPLGKAASLLLEILGLLCKSMGPKKVGTLWREAGLSWKEFLPEGQDIGAFVAEQKVEYTLGEESEAPGQRALPSEELNRQLEKLLKEGSSNQRVFDWIEANLSEQQIVSNTLVRALMTAVCYSAIIFETPLRVDVAVLKARAKLLQKYLCDEQKELQALYALQALVVTLEQPPNLLRMFFDALYDEDVVKEDAFYSWESSKDPAEQQGKGVALKSVTAFFKWLREAEEESDHN

SEQ ID NO: 257231 - DNA, 4803 bp, Artificial Sequence
  derived and/or modified sequence
atgaacaaggccccccagagcaccggccccccccccgcccccagccccggcctgccccagcccgccttcccccccggccagaccgcccccgtggtgttcagcaccccccaggccacccagatgaacacccccagccagcccagacagcacttctaccccagcagagcccagccccccagcagcgccgccagcagagtgcagagcgccgcccccgccagacccggccccgccgcccacgtgtaccccgccggcagccaggtgatgatgatccccagccagatcagctaccccgccagccagggcgcctactacatccccggccagggcagaagcacctacgtggtgcccacccagcagtaccccgtgcagcccggcgcccccggcttctaccccggcgccagccccaccgagttcggcacctacgccggcgcctactaccccgcccagggcgtgcagcagttccccaccggcgtggcccccacccccgtgctgatgaaccagcccccccagatcgcccccaagagagagagaaagaccatcagaatcagagaccccaaccagggcggcaaggacatcaccgaggagatcatgagcggcgccagaaccgccagcacccccacccccccccagaccggcggcggcctggagccccaggccaacggcgagaccccccaggtggccgtgatcgtgagacccgacgacagaagccagggcgccatcatcgccgacagacccggcctgcccggccccgagcacagccccagcgagagccagcccagcagccccagccccacccccagccccagccccgtgctggagcccggcagcgagcccaacctggccgtgctgagcatccccggcgacaccatgaccaccatccagatgagcgtggaggagagcacccccatcagcagagagaccggcgagccctacagactgagccccgagcccacccccctggccgagcccatcctggaggtggaggtgaccctgagcaagcccgtgcccgagagcgagttcagcagcagccccctgcaggcccccacccccctggccagccacaccgtggagatccacgagcccaacggcatggtgcccagcgaggacctggagcccgaggtggagagcagccccgagctggcccccccccccgcctgccccagcgagagccccgtgcccatcgcccccaccgcccagcccgaggagctgctgaacggcgcccccagcccccccgccgtggacctgagccccgtgagcgagcccgaggagcaggccaaggaggtgaccgccagcatggccccccccaccatccccagcgccacccccgccaccgcccccagcgccaccagccccgcccaggaggaggagatggaggaggaggaggaggaggaggagggcgaggccggcgaggccggcgaggccgagagcgagaagggcggcgaggagctgctgccccccgagagcacccccatccccgccaacctgagccagaacctggaggccgccgccgccacccaggtggccgtgagcgtgcccaagagaagaagaaagatcaaggagctgaacaagaaggaggccgtgggcgacctgctggacgccttcaaggaggccaaccccgccgtgcccgaggtggagaaccagccccccgccggcagcaaccccggccccgagagcgagggcagcggcgtgccccccagacccgaggaggccgacgagacctgggacagcaaggaggacaagatccacaacgccgagaacatccagcccggcgagcagaagtacgagtacaagagcgaccagtggaagcccctgaacctggaggagaagaagagatacgacagagagttcctgctgggcttccagttcatcttcgccagcatgcagaagcccgagggcctgccccacatcagcgacgtggtgctggacaaggccaacaagacccccctgagacccctggaccccaccagactgcagggcatcaactgcggccccgacttcacccccagcttcgccaacctgggcagaaccaccctgagcaccagaggcccccccagaggcggccccggcggcgagctgcccagaggcccccaggccggcctgggccccagaagaagccagcagggccccagaaaggagcccagaaagatcatcgccaccgtgctgatgaccgaggacatcaagctgaacaaggccgagaaggcctggaagcccagcagcaagagaaccgccgccgacaaggacagaggcgaggaggacgccgacggcagcaagacccaggacctgttcagaagagtgagaagcatcctgaacaagctgaccccccagatgttccagcagctgatgaagcaggtgacccagctggccatcgacaccgaggagagactgaagggcgtgatcgacctgatcttcgagaaggccatcagcgagcccaacttcagcgtggcctacgccaacatgtgcagatgcctgatggccctgaaggtgcccaccaccgagaagcccaccgtgaccgtgaacttcagaaagctgctgctgaacagatgccagaaggagttcgagaaggacaaggacgacgacgaggtgttcgagaagaagcagaaggagatggacgaggccgccaccgccgaggagagaggcagactgaaggaggagctggaggaggccagagacatcgccagaagaagaagcctgggcaacatcaagttcatcggcgagctgttcaagctgaagatgctgaccgaggccatcatgcacgactgcgtggtgaagctgctgaagaaccacgacgaggagagcctggagtgcctgtgcagactgctgaccaccatcggcaaggacctggacttcgagaaggccaagcccagaatggaccagtacttcaaccagatggagaagatcatcaaggagaagaagaccagcagcagaatcagattcatgctgcaggacgtgctggacctgagaggcagcaactgggtgcccagaagaggcgaccagggccccaagaccatcgaccagatccacaaggaggccgagatggaggagcacagagagcacatcaaggtgcagcagctgatggccaagggcagcgacaagagaagaggcggcccccccggcccccccatcagcagaggcctgcccctggtggacgacggcggctggaacaccgtgcccatcagcaagggcagcagacccatcgacaccagcagactgaccaagatcaccaagcccggcagcatcgacagcaacaaccagctgttcgcccccggcggcagactgagctggggcaagggcagcagcggcggcagcggcgccaagcccagcgacgccgccagcgaggccgccagacccgccaccagcaccctgaacagattcagcgccctgcagcaggccgtgcccaccgagagcaccgacaacagaagagtggtgcagagaagcagcctgagcagagagagaggcgagaaggccggcgacagaggcgacagactggagagaagcgagagaggcggcgacagaggcgacagactggacagagccagaacccccgccaccaagagaagcttcagcaaggaggtggaggagagaagcagagagagacccagccagcccgagggcctgagaaaggccgccagcctgaccgaggacagagacagaggcagagacgccgtgaagagagaggccgccctgccccccgtgagccccctgaaggccgccctgagcgaggaggagctggagaagaagagcaaggccatcatcgaggagtacctgcacctgaacgacatgaaggaggccgtgcagtgcgtgcaggagctggccagccccagcctgctgttcatcttcgtgagacacggcgtggagagcaccctggagagaagcgccatcgccagagagcacatgggccagctgctgcaccagctgctgtgcgccggccacctgagcaccgcccagtactaccagggcctgtacgagatcctggagctggccgaggacatggagatcgacatcccccacgtgtggctgtacctggccgagctggtgacccccatcctgcaggagggcggcgtgcccatgggcgagctgttcagagagatcaccaagcccctgagacccctgggcaaggccgccagcctgctgctggagatcctgggcctgctgtgcaagagcatgggccccaagaaggtgggcaccctgtggagagaggccggcctgagctggaaggagttcctgcccgagggccaggacatcggcgccttcgtggccgagcagaaggtggagtacaccctgggcgaggagagcgaggcccccggccagagagccctgcccagcgaggagctgaacagacagctggagaagctgctgaaggagggcagcagcaaccagagagtgttcgactggatcgaggccaacctgagcgagcagcagatcgtgagcaacaccctggtgagagccctgatgaccgccgtgtgctacagcgccatcatcttcgagacccccctgagagtggacgtggccgtgctgaaggccagagccaagctgctgcagaagtacctgtgcgacgagcagaaggagctgcaggccctgtacgccctgcaggccctggtggtgaccctggagcagccccccaacctgctgagaatgttcttcgacgccctgtacgacgaggacgtggtgaaggaggacgccttctacagctgggagagcagcaaggaccccgccgagcagcagggcaagggcgtggccctgaagagcgtgaccgccttcttcaagtggctgagagaggccgaggaggagagcgaccacaactag

SEQ ID NO: 257232 - DNA, 4683 bp, Artificial Sequence
  derived and/or modified sequence
atgaacacccccagccagcccagacagcacttctaccccagcagagcccagccccccagcagcgccgccagcagagtgcagagcgccgcccccgccagacccggccccgccgcccacgtgtaccccgccggcagccaggtgatgatgatccccagccagatcagctaccccgccagccagggcgcctactacatccccggccagggcagaagcacctacgtggtgcccacccagcagtaccccgtgcagcccggcgcccccggcttctaccccggcgccagccccaccgagttcggcacctacgccggcgcctactaccccgcccagggcgtgcagcagttccccaccggcgtggcccccacccccgtgctgatgaaccagcccccccagatcgcccccaagagagagagaaagaccatcagaatcagagaccccaaccagggcggcaaggacatcaccgaggagatcatgagcggcgccagaaccgccagcacccccacccccccccagaccggcggcggcctggagccccaggccaacggcgagaccccccaggtggccgtgatcgtgagacccgacgacagaagccagggcgccatcatcgccgacagacccggcctgcccggccccgagcacagccccagcgagagccagcccagcagccccagccccacccccagccccagccccgtgctggagcccggcagcgagcccaacctggccgtgctgagcatccccggcgacaccatgaccaccatccagatgagcgtggaggagagcacccccatcagcagagagaccggcgagccctacagactgagccccgagcccacccccctggccgagcccatcctggaggtggaggtgaccctgagcaagcccgtgcccgagagcgagttcagcagcagccccctgcaggcccccacccccctggccagccacaccgtggagatccacgagcccaacggcatggtgcccagcgaggacctggagcccgaggtggagagcagccccgagctggcccccccccccgcctgccccagcgagagccccgtgcccatcgcccccaccgcccagcccgaggagctgctgaacggcgcccccagcccccccgccgtggacctgagccccgtgagcgagcccgaggagcaggccaaggaggtgaccgccagcatggccccccccaccatccccagcgccacccccgccaccgcccccagcgccaccagccccgcccaggaggaggagatggaggaggaggaggaggaggaggagggcgaggccggcgaggccggcgaggccgagagcgagaagggcggcgaggagctgctgccccccgagagcacccccatccccgccaacctgagccagaacctggaggccgccgccgccacccaggtggccgtgagcgtgcccaagagaagaagaaagatcaaggagctgaacaagaaggaggccgtgggcgacctgctggacgccttcaaggaggccaaccccgccgtgcccgaggtggagaaccagccccccgccggcagcaaccccggccccgagagcgagggcagcggcgtgccccccagacccgaggaggccgacgagacctgggacagcaaggaggacaagatccacaacgccgagaacatccagcccggcgagcagaagtacgagtacaagagcgaccagtggaagcccctgaacctggaggagaagaagagatacgacagagagttcctgctgggcttccagttcatcttcgccagcatgcagaagcccgagggcctgccccacatcagcgacgtggtgctggacaaggccaacaagacccccctgagacccctggaccccaccagactgcagggcatcaactgcggccccgacttcacccccagcttcgccaacctgggcagaaccaccctgagcaccagaggcccccccagaggcggccccggcggcgagctgcccagaggcccccaggccggcctgggccccagaagaagccagcagggccccagaaaggagcccagaaagatcatcgccaccgtgctgatgaccgaggacatcaagctgaacaaggccgagaaggcctggaagcccagcagcaagagaaccgccgccgacaaggacagaggcgaggaggacgccgacggcagcaagacccaggacctgttcagaagagtgagaagcatcctgaacaagctgaccccccagatgttccagcagctgatgaagcaggtgacccagctggccatcgacaccgaggagagactgaagggcgtgatcgacctgatcttcgagaaggccatcagcgagcccaacttcagcgtggcctacgccaacatgtgcagatgcctgatggccctgaaggtgcccaccaccgagaagcccaccgtgaccgtgaacttcagaaagctgctgctgaacagatgccagaaggagttcgagaaggacaaggacgacgacgaggtgttcgagaagaagcagaaggagatggacgaggccgccaccgccgaggagagaggcagactgaaggaggagctggaggaggccagagacatcgccagaagaagaagcctgggcaacatcaagttcatcggcgagctgttcaagctgaagatgctgaccgaggccatcatgcacgactgcgtggtgaagctgctgaagaaccacgacgaggagagcctggagtgcctgtgcagactgctgaccaccatcggcaaggacctggacttcgagaaggccaagcccagaatggaccagtacttcaaccagatggagaagatcatcaaggagaagaagaccagcagcagaatcagattcatgctgcaggacgtgctggacctgagaggcagcaactgggtgcccagaagaggcgaccagggccccaagaccatcgaccagatccacaaggaggccgagatggaggagcacagagagcacatcaaggtgcagcagctgatggccaagggcagcgacaagagaagaggcggcccccccggcccccccatcagcagaggcctgcccctggtggacgacggcggctggaacaccgtgcccatcagcaagggcagcagacccatcgacaccagcagactgaccaagatcaccaagcccggcagcatcgacagcaacaaccagctgttcgcccccggcggcagactgagctggggcaagggcagcagcggcggcagcggcgccaagcccagcgacgccgccagcgaggccgccagacccgccaccagcaccctgaacagattcagcgccctgcagcaggccgtgcccaccgagagcaccgacaacagaagagtggtgcagagaagcagcctgagcagagagagaggcgagaaggccggcgacagaggcgacagactggagagaagcgagagaggcggcgacagaggcgacagactggacagagccagaacccccgccaccaagagaagcttcagcaaggaggtggaggagagaagcagagagagacccagccagcccgagggcctgagaaaggccgccagcctgaccgaggacagagacagaggcagagacgccgtgaagagagaggccgccctgccccccgtgagccccctgaaggccgccctgagcgaggaggagctggagaagaagagcaaggccatcatcgaggagtacctgcacctgaacgacatgaaggaggccgtgcagtgcgtgcaggagctggccagccccagcctgctgttcatcttcgtgagacacggcgtggagagcaccctggagagaagcgccatcgccagagagcacatgggccagctgctgcaccagctgctgtgcgccggccacctgagcaccgcccagtactaccagggcctgtacgagatcctggagctggccgaggacatggagatcgacatcccccacgtgtggctgtacctggccgagctggtgacccccatcctgcaggagggcggcgtgcccatgggcgagctgttcagagagatcaccaagcccctgagacccctgggcaaggccgccagcctgctgctggagatcctgggcctgctgtgcaagagcatgggccccaagaaggtgggcaccctgtggagagaggccggcctgagctggaaggagttcctgcccgagggccaggacatcggcgccttcgtggccgagcagaaggtggagtacaccctgggcgaggagagcgaggcccccggccagagagccctgcccagcgaggagctgaacagacagctggagaagctgctgaaggagggcagcagcaaccagagagtgttcgactggatcgaggccaacctgagcgagcagcagatcgtgagcaacaccctggtgagagccctgatgaccgccgtgtgctacagcgccatcatcttcgagacccccctgagagtggacgtggccgtgctgaaggccagagccaagctgctgcagaagtacctgtgcgacgagcagaaggagctgcaggccctgtacgccctgcaggccctggtggtgaccctggagcagccccccaacctgctgagaatgttcttcgacgccctgtacgacgaggacgtggtgaaggaggacgccttctacagctgggagagcagcaaggaccccgccgagcagcagggcaagggcgtggccctgaagagcgtgaccgccttcttcaagtggctgagagaggccgaggaggagagcgaccacaactag

SEQ ID NO: 257233 - DNA, 4542 bp, Artificial Sequence
  derived and/or modified sequence
atgatgatccccagccagatcagctaccccgccagccagggcgcctactacatccccggccagggcagaagcacctacgtggtgcccacccagcagtaccccgtgcagcccggcgcccccggcttctaccccggcgccagccccaccgagttcggcacctacgccggcgcctactaccccgcccagggcgtgcagcagttccccaccggcgtggcccccacccccgtgctgatgaaccagcccccccagatcgcccccaagagagagagaaagaccatcagaatcagagaccccaaccagggcggcaaggacatcaccgaggagatcatgagcggcgccagaaccgccagcacccccacccccccccagaccggcggcggcctggagccccaggccaacggcgagaccccccaggtggccgtgatcgtgagacccgacgacagaagccagggcgccatcatcgccgacagacccggcctgcccggccccgagcacagccccagcgagagccagcccagcagccccagccccacccccagccccagccccgtgctggagcccggcagcgagcccaacctggccgtgctgagcatccccggcgacaccatgaccaccatccagatgagcgtggaggagagcacccccatcagcagagagaccggcgagccctacagactgagccccgagcccacccccctggccgagcccatcctggaggtggaggtgaccctgagcaagcccgtgcccgagagcgagttcagcagcagccccctgcaggcccccacccccctggccagccacaccgtggagatccacgagcccaacggcatggtgcccagcgaggacctggagcccgaggtggagagcagccccgagctggcccccccccccgcctgccccagcgagagccccgtgcccatcgcccccaccgcccagcccgaggagctgctgaacggcgcccccagcccccccgccgtggacctgagccccgtgagcgagcccgaggagcaggccaaggaggtgaccgccagcatggccccccccaccatccccagcgccacccccgccaccgcccccagcgccaccagccccgcccaggaggaggagatggaggaggaggaggaggaggaggagggcgaggccggcgaggccggcgaggccgagagcgagaagggcggcgaggagctgctgccccccgagagcacccccatccccgccaacctgagccagaacctggaggccgccgccgccacccaggtggccgtgagcgtgcccaagagaagaagaaagatcaaggagctgaacaagaaggaggccgtgggcgacctgctggacgccttcaaggaggccaaccccgccgtgcccgaggtggagaaccagccccccgccggcagcaaccccggccccgagagcgagggcagcggcgtgccccccagacccgaggaggccgacgagacctgggacagcaaggaggacaagatccacaacgccgagaacatccagcccggcgagcagaagtacgagtacaagagcgaccagtggaagcccctgaacctggaggagaagaagagatacgacagagagttcctgctgggcttccagttcatcttcgccagcatgcagaagcccgagggcctgccccacatcagcgacgtggtgctggacaaggccaacaagacccccctgagacccctggaccccaccagactgcagggcatcaactgcggccccgacttcacccccagcttcgccaacctgggcagaaccaccctgagcaccagaggcccccccagaggcggccccggcggcgagctgcccagaggcccccaggccggcctgggccccagaagaagccagcagggccccagaaaggagcccagaaagatcatcgccaccgtgctgatgaccgaggacatcaagctgaacaaggccgagaaggcctggaagcccagcagcaagagaaccgccgccgacaaggacagaggcgaggaggacgccgacggcagcaagacccaggacctgttcagaagagtgagaagcatcctgaacaagctgaccccccagatgttccagcagctgatgaagcaggtgacccagctggccatcgacaccgaggagagactgaagggcgtgatcgacctgatcttcgagaaggccatcagcgagcccaacttcagcgtggcctacgccaacatgtgcagatgcctgatggccctgaaggtgcccaccaccgagaagcccaccgtgaccgtgaacttcagaaagctgctgctgaacagatgccagaaggagttcgagaaggacaaggacgacgacgaggtgttcgagaagaagcagaaggagatggacgaggccgccaccgccgaggagagaggcagactgaaggaggagctggaggaggccagagacatcgccagaagaagaagcctgggcaacatcaagttcatcggcgagctgttcaagctgaagatgctgaccgaggccatcatgcacgactgcgtggtgaagctgctgaagaaccacgacgaggagagcctggagtgcctgtgcagactgctgaccaccatcggcaaggacctggacttcgagaaggccaagcccagaatggaccagtacttcaaccagatggagaagatcatcaaggagaagaagaccagcagcagaatcagattcatgctgcaggacgtgctggacctgagaggcagcaactgggtgcccagaagaggcgaccagggccccaagaccatcgaccagatccacaaggaggccgagatggaggagcacagagagcacatcaaggtgcagcagctgatggccaagggcagcgacaagagaagaggcggcccccccggcccccccatcagcagaggcctgcccctggtggacgacggcggctggaacaccgtgcccatcagcaagggcagcagacccatcgacaccagcagactgaccaagatcaccaagcccggcagcatcgacagcaacaaccagctgttcgcccccggcggcagactgagctggggcaagggcagcagcggcggcagcggcgccaagcccagcgacgccgccagcgaggccgccagacccgccaccagcaccctgaacagattcagcgccctgcagcaggccgtgcccaccgagagcaccgacaacagaagagtggtgcagagaagcagcctgagcagagagagaggcgagaaggccggcgacagaggcgacagactggagagaagcgagagaggcggcgacagaggcgacagactggacagagccagaacccccgccaccaagagaagcttcagcaaggaggtggaggagagaagcagagagagacccagccagcccgagggcctgagaaaggccgccagcctgaccgaggacagagacagaggcagagacgccgtgaagagagaggccgccctgccccccgtgagccccctgaaggccgccctgagcgaggaggagctggagaagaagagcaaggccatcatcgaggagtacctgcacctgaacgacatgaaggaggccgtgcagtgcgtgcaggagctggccagccccagcctgctgttcatcttcgtgagacacggcgtggagagcaccctggagagaagcgccatcgccagagagcacatgggccagctgctgcaccagctgctgtgcgccggccacctgagcaccgcccagtactaccagggcctgtacgagatcctggagctggccgaggacatggagatcgacatcccccacgtgtggctgtacctggccgagctggtgacccccatcctgcaggagggcggcgtgcccatgggcgagctgttcagagagatcaccaagcccctgagacccctgggcaaggccgccagcctgctgctggagatcctgggcctgctgtgcaagagcatgggccccaagaaggtgggcaccctgtggagagaggccggcctgagctggaaggagttcctgcccgagggccaggacatcggcgccttcgtggccgagcagaaggtggagtacaccctgggcgaggagagcgaggcccccggccagagagccctgcccagcgaggagctgaacagacagctggagaagctgctgaaggagggcagcagcaaccagagagtgttcgactggatcgaggccaacctgagcgagcagcagatcgtgagcaacaccctggtgagagccctgatgaccgccgtgtgctacagcgccatcatcttcgagacccccctgagagtggacgtggccgtgctgaaggccagagccaagctgctgcagaagtacctgtgcgacgagcagaaggagctgcaggccctgtacgccctgcaggccctggtggtgaccctggagcagccccccaacctgctgagaatgttcttcgacgccctgtacgacgaggacgtggtgaaggaggacgccttctacagctgggagagcagcaaggaccccgccgagcagcagggcaagggcgtggccctgaagagcgtgaccgccttcttcaagtggctgagagaggccgaggaggagagcgaccacaactag

SEQ ID NO: 257234 - DNA, 4311 bp, Artificial Sequence
  derived and/or modified sequence
atgaaccagcccccccagatcgcccccaagagagagagaaagaccatcagaatcagagaccccaaccagggcggcaaggacatcaccgaggagatcatgagcggcgccagaaccgccagcacccccacccccccccagaccggcggcggcctggagccccaggccaacggcgagaccccccaggtggccgtgatcgtgagacccgacgacagaagccagggcgccatcatcgccgacagacccggcctgcccggccccgagcacagccccagcgagagccagcccagcagccccagccccacccccagccccagccccgtgctggagcccggcagcgagcccaacctggccgtgctgagcatccccggcgacaccatgaccaccatccagatgagcgtggaggagagcacccccatcagcagagagaccggcgagccctacagactgagccccgagcccacccccctggccgagcccatcctggaggtggaggtgaccctgagcaagcccgtgcccgagagcgagttcagcagcagccccctgcaggcccccacccccctggccagccacaccgtggagatccacgagcccaacggcatggtgcccagcgaggacctggagcccgaggtggagagcagccccgagctggcccccccccccgcctgccccagcgagagccccgtgcccatcgcccccaccgcccagcccgaggagctgctgaacggcgcccccagcccccccgccgtggacctgagccccgtgagcgagcccgaggagcaggccaaggaggtgaccgccagcatggccccccccaccatccccagcgccacccccgccaccgcccccagcgccaccagccccgcccaggaggaggagatggaggaggaggaggaggaggaggagggcgaggccggcgaggccggcgaggccgagagcgagaagggcggcgaggagctgctgccccccgagagcacccccatccccgccaacctgagccagaacctggaggccgccgccgccacccaggtggccgtgagcgtgcccaagagaagaagaaagatcaaggagctgaacaagaaggaggccgtgggcgacctgctggacgccttcaaggaggccaaccccgccgtgcccgaggtggagaaccagccccccgccggcagcaaccccggccccgagagcgagggcagcggcgtgccccccagacccgaggaggccgacgagacctgggacagcaaggaggacaagatccacaacgccgagaacatccagcccggcgagcagaagtacgagtacaagagcgaccagtggaagcccctgaacctggaggagaagaagagatacgacagagagttcctgctgggcttccagttcatcttcgccagcatgcagaagcccgagggcctgccccacatcagcgacgtggtgctggacaaggccaacaagacccccctgagacccctggaccccaccagactgcagggcatcaactgcggccccgacttcacccccagcttcgccaacctgggcagaaccaccctgagcaccagaggcccccccagaggcggccccggcggcgagctgcccagaggcccccaggccggcctgggccccagaagaagccagcagggccccagaaaggagcccagaaagatcatcgccaccgtgctgatgaccgaggacatcaagctgaacaaggccgagaaggcctggaagcccagcagcaagagaaccgccgccgacaaggacagaggcgaggaggacgccgacggcagcaagacccaggacctgttcagaagagtgagaagcatcctgaacaagctgaccccccagatgttccagcagctgatgaagcaggtgacccagctggccatcgacaccgaggagagactgaagggcgtgatcgacctgatcttcgagaaggccatcagcgagcccaacttcagcgtggcctacgccaacatgtgcagatgcctgatggccctgaaggtgcccaccaccgagaagcccaccgtgaccgtgaacttcagaaagctgctgctgaacagatgccagaaggagttcgagaaggacaaggacgacgacgaggtgttcgagaagaagcagaaggagatggacgaggccgccaccgccgaggagagaggcagactgaaggaggagctggaggaggccagagacatcgccagaagaagaagcctgggcaacatcaagttcatcggcgagctgttcaagctgaagatgctgaccgaggccatcatgcacgactgcgtggtgaagctgctgaagaaccacgacgaggagagcctggagtgcctgtgcagactgctgaccaccatcggcaaggacctggacttcgagaaggccaagcccagaatggaccagtacttcaaccagatggagaagatcatcaaggagaagaagaccagcagcagaatcagattcatgctgcaggacgtgctggacctgagaggcagcaactgggtgcccagaagaggcgaccagggccccaagaccatcgaccagatccacaaggaggccgagatggaggagcacagagagcacatcaaggtgcagcagctgatggccaagggcagcgacaagagaagaggcggcccccccggcccccccatcagcagaggcctgcccctggtggacgacggcggctggaacaccgtgcccatcagcaagggcagcagacccatcgacaccagcagactgaccaagatcaccaagcccggcagcatcgacagcaacaaccagctgttcgcccccggcggcagactgagctggggcaagggcagcagcggcggcagcggcgccaagcccagcgacgccgccagcgaggccgccagacccgccaccagcaccctgaacagattcagcgccctgcagcaggccgtgcccaccgagagcaccgacaacagaagagtggtgcagagaagcagcctgagcagagagagaggcgagaaggccggcgacagaggcgacagactggagagaagcgagagaggcggcgacagaggcgacagactggacagagccagaacccccgccaccaagagaagcttcagcaaggaggtggaggagagaagcagagagagacccagccagcccgagggcctgagaaaggccgccagcctgaccgaggacagagacagaggcagagacgccgtgaagagagaggccgccctgccccccgtgagccccctgaaggccgccctgagcgaggaggagctggagaagaagagcaaggccatcatcgaggagtacctgcacctgaacgacatgaaggaggccgtgcagtgcgtgcaggagctggccagccccagcctgctgttcatcttcgtgagacacggcgtggagagcaccctggagagaagcgccatcgccagagagcacatgggccagctgctgcaccagctgctgtgcgccggccacctgagcaccgcccagtactaccagggcctgtacgagatcctggagctggccgaggacatggagatcgacatcccccacgtgtggctgtacctggccgagctggtgacccccatcctgcaggagggcggcgtgcccatgggcgagctgttcagagagatcaccaagcccctgagacccctgggcaaggccgccagcctgctgctggagatcctgggcctgctgtgcaagagcatgggccccaagaaggtgggcaccctgtggagagaggccggcctgagctggaaggagttcctgcccgagggccaggacatcggcgccttcgtggccgagcagaaggtggagtacaccctgggcgaggagagcgaggcccccggccagagagccctgcccagcgaggagctgaacagacagctggagaagctgctgaaggagggcagcagcaaccagagagtgttcgactggatcgaggccaacctgagcgagcagcagatcgtgagcaacaccctggtgagagccctgatgaccgccgtgtgctacagcgccatcatcttcgagacccccctgagagtggacgtggccgtgctgaaggccagagccaagctgctgcagaagtacctgtgcgacgagcagaaggagctgcaggccctgtacgccctgcaggccctggtggtgaccctggagcagccccccaacctgctgagaatgttcttcgacgccctgtacgacgaggacgtggtgaaggaggacgccttctacagctgggagagcagcaaggaccccgccgagcagcagggcaagggcgtggccctgaagagcgtgaccgccttcttcaagtggctgagagaggccgaggaggagagcgaccacaactag

SEQ ID NO: 257235 - DNA, 4803 bp, Artificial Sequence
  derived and/or modified sequence
atgaataaggccccccagtctactggtccacctcctgccccatcacccggcctgccacagcctgcctttcctcctgggcagaccgctccggtagttttcagtacacctcaggctacacagatgaacactcctagtcagcccaggcagcacttctacccctccagggcccagcccccaagtagcgcagccagtcgcgtgcaatcggcagcccccgcgagaccaggtccggccgcccacgtgtatccagccggctctcaggtcatgatgatcccttcacagatctcttacccagcaagccagggagcatactatatccctggacaagggcgtagtacttatgtcgtgcccacgcagcagtatcccgttcaacccggagcaccaggattttatcctggcgcgtcccctaccgagtttgggacttatgctggtgcatactacccggctcagggggttcagcaatttcctacaggtgtggcccccacccccgtgcttatgaaccaacctccacagatcgcaccaaagcgagagcgaaagaccattaggatacgggaccctaatcagggtgggaaagatattactgaggagatcatgagcggtgccaggactgcttccacgcctactcctccacagactggaggtggattggagcctcaagccaacggcgagaccccccaggttgcagtgattgtccggcctgatgatagatcccaaggcgccataattgccgaccgaccagggctccctggccctgaacacagcccgtcagagtctcaaccaagttccccatctcctactccctctccatcacctgtgcttgagcctggttcagaacctaatctagccgtgctgagtataccaggggacaccatgacaaccatacagatgtctgtagaggaaagcacacccatcagccgggagaccggtgaaccgtaccggctcagccctgaacctacccctctggccgagccaattctggaggttgaagtgacactgtcaaaacctgtccctgagtcagaattctcttcttcacccctacaggcgccaacaccgttagcaagccacacagttgagattcacgagccaaatggtatggttcccagtgaggacttagaaccagaagtcgaaagcagtcccgaacttgctcccccccccgcctgcccgtcggagagcccagttcctatcgcaccaacggcacagcccgaagaactgctgaacggcgcgccctcccctccagcggttgatttgagcccagtttctgagccggaggagcaagctaaagaggtgactgccagcatggctcctcccactataccaagcgccacccctgccacggccccaagtgccactagccccgctcaagaggaagaaatggaagaggaagaagaggaagaggagggcgaggctggcgaggcaggtgaagcagaaagtgagaagggcggggaagaattgcttccacccgaaagtacccctatccccgctaacctatcgcagaatctcgaggctgctgccgccacgcaagtggcagtctccgtgcctaagaggcggaggaaaattaaagaactgaacaagaaggaggccgtgggtgatctgttagacgccttcaaggaagctaatccagccgtccctgaagtggagaaccagcctccggccgggtcgaaccccggaccagaaagcgagggcagcggtgtcccacccagacccgaagaagctgacgagacatgggattccaaagaggataagatacataatgccgagaacatccaacctggggaacagaaatatgagtataagtcagaccagtggaaaccattaaatctggaggagaagaaaaggtacgatagagaattcctgctgggcttccagttcatatttgcaagtatgcaaaagcccgagggactccctcatattagtgatgtagtcttagataaagctaataaaacgccccttcggcctctggacccaacccgcctgcagggcatcaattgtggtcccgatttcactcctagttttgcaaatcttggaagaaccactctgagcactagaggtcccccgaggggcggccccggcggcgagcttccccgcggccctcaagcaggcttgggccccaggagatcccaacaggggccccgtaaggagccacgcaagataatcgctacggtattgatgaccgaggatatcaagctcaacaaggctgaaaaggcatggaaaccatcaagtaaacgaaccgccgcagataaagatcggggagaagaggacgctgatgggagcaagacgcaggatctgttccggcgcgtcaggtccattctgaacaagctaaccccccagatgttccagcagctgatgaaacaggtgactcagttagctatcgacacagaagaacgtctgaagggagtgatcgatttaattttcgaaaaagccatcagtgaaccgaacttcagtgttgcctacgccaatatgtgccgctgcttgatggcacttaaagtccctacaacagagaagcccaccgttaccgtgaattttcgcaaactgcttctgaacagatgtcagaaagagtttgagaaagataaagacgacgacgaggtgtttgaaaagaaacagaaagagatggacgaggccgctaccgccgaggagaggggaagactgaaagaagaactcgaagaagctagggacattgctcgcaggagatccctaggaaacatcaagttcataggcgagctctttaaactgaaaatgctgaccgaagcaattatgcatgactgtgtggttaagttgctcaaaaaccatgatgaggaatcactggagtgcttatgtcgccttctcactactatcggtaaggatttagattttgagaaagccaagcctaggatggaccagtacttcaatcaaatggagaagataataaaggaaaagaagactagcagccggataaggttcatgcttcaggacgtactggacctgcgggggtctaactgggtacccaggagaggcgaccagggacccaagacgatcgaccagatccataaggaggcagagatggaggaacaccgcgagcacatcaaagtgcagcagttgatggccaagggatccgacaagcggcgtggcggcccgcccgggccgcccatttcaagaggactcccccttgttgacgacggaggatggaacaccgttccgatttccaaaggtagcaggcccatcgatacctcaaggctaaccaagattactaaaccaggatccattgattccaataaccaactgttcgcaccaggcggcagattaagctggggtaaggggagctccgggggaagtggagccaaaccctctgacgccgcctcagaggctgcaaggcctgccacctcaactctgaataggttcagtgcactgcagcaggctgtgcccaccgagtcaactgacaaccgccgtgtggtacaacgtagtagcctctctcgcgagcggggggaaaaggcaggagacagaggagaccgactcgagcggagcgaaagaggtggggaccggggggaccggctagatcgagcgcgcacaccagcgacaaagcggtccttctctaaggaggtcgaagaaagaagcagggagcggccatcacagcctgaaggtctgagaaaggcagcctctcttactgaggaccgggatcggggacgcgatgccgtgaagagggaagcagcgctgcctccagtgtctcccctcaaagccgccctctctgaagaagaactcgaaaaaaagagcaaagcaatcatagaggaatatctgcatctgaatgacatgaaagaagccgttcagtgcgtccaggagctcgcctccccctccctgctcttcatttttgttcggcatggggttgagagtaccttggaaaggtccgcaatcgccagagagcatatgggacaactgctccaccagctactctgtgctggccacctcagcaccgcccagtattatcaagggctgtacgaaatcttggagctcgccgaagatatggaaattgatattccccatgtttggctctatctggctgagctagtaactcccatcctccaggaggggggggtccccatgggggagctctttcgagagattacgaaaccacttcggccattaggtaaagcagcaagtcttctacttgaaatattgggcctgctttgcaaatccatggggccaaagaaggtgggtacactctggcgggaagccggactcagttggaaggagttcctcccagaagggcaggacattggggcgtttgtagcagaacagaaggttgagtataccttgggggaggaatccgaggcacccggccagagggccctcccgtctgaggagctcaatcgtcaattagagaagttactcaaggagggctctagcaaccagcgagttttcgactggatagaggcaaacctttctgagcagcagattgtcagtaacacactagttcgggctctgatgacagctgtgtgctacagtgccatcatttttgagactccgttacgcgtggacgtggctgtgctgaaggcacgagccaagttgctgcagaagtacttgtgtgatgaacaaaaagaactgcaggcactgtacgccctccaggcgctggtggtgactctggagcagcctccgaacttattgcgcatgttcttcgacgctctttatgatgaggacgtggttaaagaagatgcgttttatagctgggaatccagcaaggatcccgccgagcagcaagggaagggagtggctctgaagagtgtgacagcgttcttcaagtggctgagggaggccgaggaggagagtgatcataattag

SEQ ID NO: 257236 - DNA, 4683 bp, Artificial Sequence
  derived and/or modified sequence
atgaacacaccatctcagcctaggcaacacttttatccttccagagcccagcccccttcctcagctgcttccagggtccagagcgcggctccggccagacccgggccagcagcccacgtgtaccccgcagggagccaggttatgatgatcccgtcccagatctcatatcccgcctcacagggggcatattatattccaggccaagggaggtctacgtacgtagtcccaactcaacaatacccagtacagcccggggcaccaggcttctatcccggggcaagccctacagagttcgggacgtatgcaggggcatactatcccgcccagggtgtccagcaatttcctaccggggtggcgccgacacccgtcctgatgaaccagcctcctcagatagcaccaaaacgcgagcgaaagaccatccgcattagggacccaaatcagggtgggaaggatatcaccgaagaaatcatgtcaggggccaggactgcctccacacctacccccccacaaacgggcggtggtctcgagccacaggccaatggtgagacaccacaggtggcagtcatcgtgcggccagacgacaggtcccagggggcaataatagcagatagacccggtttgccagggcctgaacattcaccctccgagtctcagccgtcaagcccctcaccgactccatccccatcccccgtcctcgagcccgggtctgaaccaaatctagcggttctctcaatacctggcgatacaatgacaacgattcagatgagtgttgaagagtcaacacctatctcaagagaaactggagaaccctatcgcctatcccctgagccaacccccctcgccgaacctatcctggaggtcgaagtgactttaagcaagcccgtgccagaatccgagttttccagcagcccactacaggccccgaccccactcgcatcacacaccgtggagattcacgagcctaacgggatggtgcctagtgaggacctggagccagaagttgaaagttctccagaattggctccaccacccgcctgtccatcagagtctcccgtgcccattgcgccaacagcccagcccgaggagctgctgaacggagctccctctcccccagccgtggacttgagccctgtgtccgagccggaggagcaggccaaagaggtgaccgcaagtatggcacctcctaccatcccatccgccactcctgccacggcaccctctgctacttcaccagcgcaggaggaagagatggaagaagaagaggaggaggaagaaggggaggctggcgaggctggcgaggctgagtccgaaaaagggggggaggaattactcccccctgagtctacaccaatccccgcaaatctctcacagaacctggaagccgccgcagctacccaggtggcagtgtccgtgccgaaaagaaggcgcaagatcaaagaactgaataaaaaagaggctgttggagacctgctggatgcgtttaaagaggcaaaccctgccgtaccggaggtagagaatcaacctcctgcggggagcaaccccggtcccgagtctgaaggctccggtgtaccaccgagaccagaggaagcagatgaaacttgggactcaaaggaggataaaatccacaatgcagaaaatatacagcctggggagcagaaatacgagtacaaaagtgaccagtggaagcctctgaacctcgaggagaagaaacggtatgaccgggagttcctgcttgggttccaattcatctttgcttctatgcaaaagccagagggcctccctcacattagtgacgtggtcttggacaaggccaacaaaacacctcttaggcccctcgatccaacccgacttcagggaataaactgtggcccagatttcacccccagcttcgctaaccttgggaggactacccttagcactcgcggacctcccagaggtggcccaggcggcgaacttcctcggggaccccaagcaggactaggcccgaggcgcagccagcagggccctaggaaagagcccagaaagatcatcgcaactgtgctgatgactgaggacatcaagctgaataaggccgagaaagcctggaagccctccagtaagaggaccgccgctgacaaggaccgtggggaggaggacgccgatggaagcaagacacaggacttatttcgccgcgtccggagtatcttgaacaagctaacaccccaaatgttccagcagcttatgaaacaggtgacccagctggccatcgatacagaggagcgtctcaaaggggtgattgatctgatctttgaaaaagctatctctgagccaaacttttctgtcgcctatgctaacatgtgcaggtgtcttatggctctgaaagtcccaactactgagaagcctaccgttactgtcaacttccggaaactactactcaaccgatgtcagaaagagtttgaaaaggataaggacgacgacgaggtgttcgaaaaaaaacagaaggaaatggatgaggccgccaccgccgaagagagaggacggttaaaggaggagcttgaggaagctcgtgatattgcgcggcggagaagcctcggtaacatcaaatttataggcgagctgtttaagctcaaaatgctgaccgaggcaatcatgcacgattgtgttgtgaaactgctgaaaaatcatgatgaggagtctctagagtgcctgtgcaggttgctcacaaccatcggcaaagatctcgatttcgagaaggccaagccgagaatggatcagtacttcaaccagatggagaaaatcatcaaagaaaagaaaactagtagccggatacgattcatgctccaggacgtgctcgacctgaggggaagcaactgggttcccaggagaggagaccagggtccaaagaccatcgaccagatccataaagaggcagagatggaggagcatagagagcacatcaaggtgcagcaactgatggctaagggctccgataagagacgcggcgggccacccggcccgcccatctcaaggggccttccgctcgtggacgatggtgggtggaacaccgtcccaatatcgaagggctcccgtcccatcgacacaagtcgactgacgaaaatcacaaaacctggaagcattgacagtaacaatcaattatttgccccagggggccgcttatcgtggggcaaaggctccagtggcggctccggtgcgaagccatccgacgctgcctcagaagctgccaggcctgcaacttctacgctgaaccgcttctctgctctccaacaggctgtaccaacagaaagcaccgacaacagaagggtggtgcaacgcagttcgctctcccgggaacgcggggagaaagctggcgaccgcggagataggttagaaagatctgagagggggggcgaccgcggagaccgcttggaccgcgctaggactcccgctaccaagcggagctttagcaaggaagtcgaggagcgtagccgcgaacgtccctcgcaaccagaggggctccggaaggccgcctcactcacagaggacagggatcgagggagagatgctgtaaaacgcgaagcagccctgcccccagtgtcccctctcaaggccgctctgagtgaagaagagctcgaaaagaaatcgaaggcgatcatcgaggaatacttgcacctgaatgatatgaaagaagctgtgcagtgcgtccaggagctcgccagccccagcttgctgttcatctttgtgcgacatggagtggaatccaccttagaacgctcagcaattgctagggagcatatgggccagctgcttcatcagctgctgtgtgccgggcatctgtctactgcacagtattaccaggggttatatgaaattctcgagctggcagaggatatggagattgatattccacatgtttggttgtacctggcagaactggtgactcccatcctccaagaagggggggtgcccatgggggagcttttcagggaaattactaaacccctcaggccgttggggaaggccgcaagcttgttactcgaaatcctggggctgttatgcaagtccatgggccctaaaaaagtgggcactctgtggcgcgaggccggactgtcttggaaggaatttctgcctgagggacaggatattggcgccttcgtcgccgagcagaaagtggagtatacgctgggcgaggagtctgaggcccccgggcagagggccctgcccagtgaggagctgaaccgtcagcttgagaagctgctcaaggagggcagctcaaatcagagagtattcgattggatcgaggcaaatcttagcgagcagcagatcgtatctaatacactggtccgcgcgctgatgaccgccgtgtgctattcggctattatattcgagacacccctaagggtggatgtggccgttctcaaggccagggctaagcttcttcagaagtacttgtgcgacgaacagaaagaactccaggctctctatgcgctgcaagctcttgtggtgaccctggaacagccacctaacttactgcgcatgttcttcgatgccctctatgacgaggatgtagtgaaagaggacgccttctattcatgggagtcatctaaagatcccgctgaacagcaagggaaaggtgttgccttgaagtcggtaacagccttctttaaatggctgcgggaggcagaagaggagtctgatcataactag

SEQ ID NO: 257237 - DNA, 4542 bp, Artificial Sequence
  derived and/or modified sequence
atgatgataccctcccagatttcatacccggcgagtcagggtgcctactacatccctggtcaggggagaagtacttacgtggtaccaactcagcagtatcctgtccagcctggcgcccccggcttttatccgggcgccagtccaaccgagttcggcacctatgccggcgcctattatcccgcacagggcgtgcagcagttccccacgggcgtggcccctacccctgttctcatgaaccagcccccccagattgcccctaaacgcgagaggaagactattcggataagggatcccaatcagggtgggaaggatatcactgaagagattatgtccggagcacgcaccgcttcaactccaactccaccacagacgggaggtggactagaacctcaggctaacggcgagacaccgcaagtcgctgtgatcgtaaggcctgacgaccgatcccaaggtgcaataatcgctgaccgaccaggcttaccgggccctgagcattctccatccgaatcccagccgagcagcccaagtcctactccaagtcccagtccagtcctggagcccggttccgaacccaatttagccgtgttatctatccccggtgatactatgaccacaattcagatgagcgtcgaagagagtactccaatttcccgggaaacaggagagccgtaccggctttcccccgaaccaacaccgctcgccgagccaatacttgaggtcgaagtgacattgagtaagccagtccctgagagtgagtttagcagcagtcccctacaggccccgacccctcttgctagtcacactgtcgaaattcacgagccaaatgggatggtgccctcagaggaccttgagcctgaagtggagagttcccccgaactggcacccccgcccgcttgcccaagcgagagtcccgtgccaatagccccgaccgcccagccggaggagctgttgaatggggctccttctccacccgctgtggacctctctccagtctcagaacctgaggagcaggccaaggaagtgaccgcctcaatggcccctccgacgatcccctccgcgactcccgccactgcccccagcgcaacgagccctgcccaagaggaagaaatggaagaggaagaagaagaggaagagggcgaggcaggagaggctggagaagccgagagcgagaaaggcggagaagaacttctaccccctgagtcaacgcccatcccggcaaacttgagtcaaaacctggaagccgccgctgcaacacaggtggctgtaagcgtgccaaaacgcagacgaaagataaaggagctgaataaaaaggaagcggtgggtgatttactggatgccttcaaagaggctaaccccgccgtgcctgaagtggaaaatcagccacccgcagggtcgaacccaggacccgaatctgagggaagtggcgtgcccccccggccagaggaggcggatgaaacctgggactcaaaggaagacaagatccacaatgccgagaatattcagccaggagagcagaagtacgagtataagtccgaccagtggaagcccctgaatctggaggagaaaaagaggtacgaccgtgagttcctcctgggctttcagttcatctttgcttccatgcagaagcctgagggcctgccccatatctcagacgtcgtcctcgacaaggcaaataaaaccccactgaggccgctcgatcccacccgtttgcagggcatcaactgtggacccgatttcacaccctcattcgcaaatctgggtagaaccaccctgtctacacgtgggccaccccgcggtgggcccggcggggagttaccacgcggcccgcaggctggtctgggtcccagacgatctcaacaagggcccaggaaggagcctcggaaaattatcgcaactgtcctcatgactgaagacattaagctgaacaaggccgaaaaggcttggaagccttcaagtaaaaggaccgctgccgacaaagataggggggaggaagacgccgatggaagtaaaacccaggaccttttcaggagagtacggtcaattcttaacaagctgacccctcagatgttccagcaattgatgaagcaggtcacccagctcgccattgacaccgaagagagactaaaaggtgtgatagacctcatttttgaaaaagccatatctgaaccaaatttttccgtagcatacgccaatatgtgcagatgtctgatggcattgaaagtacccaccactgaaaagccaacagtaacagtcaatttccgcaagcttctgctgaaccgatgccaaaaagagtttgagaaagataaggatgatgatgaggtctttgagaagaagcagaaagaaatggacgaagctgccacagcggaggaacgtggtagactgaaggaagaactagaagaggctcgcgatatcgcacgtcggagaagtctgggcaacataaaattcataggcgaactgttcaagttaaagatgttaaccgaggccattatgcatgattgcgttgttaagctgcttaagaaccatgacgaggaaagtctggaatgcctttgcagattactgacaaccataggaaaggacctcgacttcgaaaaggccaagccccggatggatcagtactttaaccagatggagaagatcattaaggaaaaaaagacaagcagtaggatcagatttatgctccaggacgttttggacctcaggggaagcaactgggtgccacgcaggggggaccagggccccaagacaatcgatcaaatccataaagaggctgagatggaagagcaccgcgagcacatcaaagtccagcagctgatggctaaggggtcagataagcgtcgggggggcccaccagggcccccaatctccagaggacttcccctggtggacgacgggggctggaatactgtacctatctcaaagggtagcaggcccattgacacttcgcggttgaccaagatcaccaaacccgggtcgattgattctaataaccagctgtttgcgcctggaggaagactctcttggggaaagggctcgagcggcggcagcggcgccaagcccagcgacgccgcctccgaggctgcgagaccagctaccagcacactgaatcgcttcagcgcgttgcaacaagctgtcccgaccgagtccacggataatcggcgcgttgtccaaaggagcagtttaagccgcgagaggggcgagaaggcaggggaccggggcgataggctcgagcgaagcgaacggggcggagatcggggcgaccggctagatagagcgcgaactcccgccacaaaaagaagtttttccaaagaggtcgaagagcggagtagagagagaccttcccagcccgagggcctccgcaaggctgcatctctaactgaggaccgcgatcgggggagggatgccgtgaaaagggaggcagctctgccgcctgttagtccgcttaaggccgccctgagcgaggaggagctggagaagaagtccaaagctatcatagaggaatacctgcacctcaatgatatgaaagaggcagtacagtgtgttcaggaattggcttcaccgtcactccttttcattttcgtgcgccatggagtggaatcaacgttagaacggagcgcaatcgcaagggagcacatgggacagctcctgcaccagctgctgtgtgcaggtcacctgtcaacagctcagtactatcaaggattgtacgagatcctggagctcgctgaggatatggagatcgacatcccacacgtgtggttatacctcgccgagctggtcactccaatactccaagagggtggggttccaatgggcgagctgtttagagaaataacaaaacccctgagaccgcttgggaaagcagcctccctgctgctagagattctgggcctactctgtaagtccatggggccaaaaaaggtggggacactatggagggaggcgggcttaagctggaaagagtttcttcctgaaggccaggacatcggtgccttcgtcgccgagcagaaagtcgaatacactctgggggaagagtccgaagcacccggccagcgcgctctcccgagtgaggagcttaaccgccaactggaaaagttactgaaagagggctcctctaatcagagggttttcgattggatcgaggctaacttgtctgagcaacagattgtgtctaatacactggtcagggccctcatgacggcagtttgttattctgccatcatcttcgaaacccctctgcgagtggatgtggcagtcctgaaagcaagagccaagctgttacagaagtacctctgtgacgaacagaaggaactgcaagccctatacgctttgcaggctctggtcgtgacactcgagcagccccccaacctgctcaggatgttcttcgacgccctgtacgatgaggatgtcgttaaggaagacgccttttacagctgggaatctagtaaagatcccgccgaacagcagggcaagggagtcgcattgaagagcgtcacggcatttttcaaatggcttcgcgaggcagaagaagagtccgaccacaattag

SEQ ID NO: 257238 - DNA, 4311 bp, Artificial Sequence
  derived and/or modified sequence
atgaaccagcctcctcagatagctcccaaaagagagcgcaaaaccatcaggattcgagacccaaatcagggcggtaaggatatcacagaggaaatcatgtcaggagcacgcacagcctctacacctactccccctcaaacaggaggaggtttggagccccaggctaatggagaaactccacaagttgcagttatcgtcaggccagacgaccgttcacagggcgccattattgctgaccgtcctggacttccgggtccagaacattcccccagcgagagccagccctcctccccatcaccgacgccttccccctcccccgtactggaacctggaagcgagcccaacctcgcggtgttatccataccaggcgataccatgacaaccatccagatgagcgtcgaagagagcacacctatcagtagagaaacaggtgaaccataccgcctaagcccagagccgactcccttagctgagccgattctggaagtggaggtgaccctctccaagcccgtgcctgaatcagagttttccagctcgccacttcaggctccgacaccgctcgcctctcatactgttgagattcacgagcccaacgggatggtgccctcagaggatcttgagccagaagtagagagctctccagagcttgccccgccacccgcatgtccgagtgagtcccccgtccccattgcacccactgcacaacctgaggaattacttaacggggccccaagccccccagctgtggacttatctcctgtctccgaacccgaggagcaggcaaaagaggtcacggcttctatggcaccaccgacaattccatccgcaacacctgcaactgctccatcagccacctcacccgcacaggaggaggaaatggaagaggaagaggaggaagaggaaggcgaagctggcgaagccggtgaagcggaatctgaaaagggaggagaagaattacttcctccagaatctactcccatcccagcaaatctgagccagaacctggaagcggcagccgcgacacaagtggctgtgagtgtccctaaaagaaggaggaaaatcaaagaacttaacaaaaaggaggctgtgggcgacctgctggacgcattcaaagaggcaaaccctgccgtgcccgaagtggagaaccaacccccagccggatcaaatccggggcccgagagtgaagggagcggggtgccccctaggcccgaagaagcagacgagacttgggactccaaggaggacaagattcacaacgctgagaatatccaacccggtgagcagaaatacgagtataagagcgatcagtggaaaccccttaacctggaggaaaagaagagatacgaccgggaatttttgctcggatttcagttcatattcgcgtccatgcagaaacccgagggcctcccccacatctctgacgtggtgctcgataaggccaacaagactcccctaaggcctttagatccgacacgcctgcagggaatcaactgtgggccagactttactccgtcatttgccaacttggggagaacaactttgtcaacccgagggccaccacgaggtggtccaggcggcgagttgccgagaggaccacaggccggcctcggcccccggcggagtcaacagggtcctcgcaaggaacccaggaagatcattgcaactgtgttgatgacggaggacattaaacttaacaaggcggagaaggcgtggaagccaagctccaagcgcacggctgccgataaggacagaggggaagaagacgcagatggcagcaagactcaagacctcttccggcgagtcagaagcatccttaacaagctgacacctcagatgttccaacagttgatgaagcaggtgacgcaacttgccatagatactgaggaaagactgaagggggtgattgatctgatatttgaaaaggcaatatctgagcctaacttcagcgttgcgtacgctaacatgtgccgatgcttaatggctctcaaggtgcctactacagaaaagcccactgtgaccgtgaatttcagaaagctgctactgaaccggtgccaaaaggaattcgagaaggataaggacgatgatgaagtctttgaaaaaaagcaaaaggaaatggatgaggcagctacagcagaggaaagaggacggctcaaggaagaattggaggaggcaagagacatcgccagacgaagaagcctcggcaacattaagttcataggggagttgtttaaactaaagatgttgacggaggccattatgcatgactgcgtggttaaactcctcaagaaccacgatgaagaaagtctcgagtgcctgtgtaggttgcttaccactattggcaaagatctggacttcgagaaggccaagcccaggatggatcagtatttcaaccagatggagaaaattatcaaggagaaaaaaacatcttctcgaatcaggttcatgctgcaggacgtcctggatttacgtgggtccaattgggtgcctcgtcgcggggatcagggaccaaagaccatcgaccagatccacaaggaagctgagatggaggagcaccgagagcatattaaagtccagcagctgatggccaaaggaagcgataaacgtagaggtggcccaccaggtccccccattagtaggggcctgcccttggtagacgatggcgggtggaatacagtgcccatttccaagggttctagaccaattgacacaagccgtttaacgaaaattacgaaaccgggatccatcgactccaataaccagttgttcgctcccggaggcagactgtcttggggtaagggaagttccggcgggtcaggtgcaaagccatcggacgccgcctctgaggccgcccgccccgccacttccacactgaataggtttagcgctttacagcaggccgtgccgaccgagtcgaccgacaataggagagtggttcagaggtctagcctcagtcgcgaacggggcgagaaagccggagatagaggtgacaggctcgaaaggtccgaacgtggaggggacaggggtgataggcttgaccgtgccaggacgcctgccacaaaacgctctttcagcaaggaagttgaagagcgctctcgagagcgcccctcccaaccggagggcctgaggaaagccgcttcactgacagaggatcgtgaccggggcagggacgctgtgaaacgtgaggccgccctgcctccagtgagtcctctgaaggccgccctgtccgaggaagagctcgaaaaaaaatctaaggcaatcatcgaggaatatttgcatttgaacgatatgaaggaggcagtgcaatgtgttcaggagctggcatcaccctctttgctcttcatcttcgtccgccacggggtggaatcaacattagagcgaagcgcaattgccagagaacacatgggccagttactccatcagcttctgtgtgcaggacatctctcgacagcacagtactaccaaggtctgtatgagattctcgagctcgcggaggacatggagatagatattccgcacgtgtggttgtacctcgcagagctcgtcactcctattctgcaggaaggaggcgtgcccatgggtgagttgttccgggagatcaccaaacccctgaggcctttaggaaaggcagcttctttacttttggagattctgggactgctgtgcaagagtatgggacctaaaaaggtgggcaccttgtggcgggaggccggactgagctggaaggaattcttgcctgagggacaagatatcggagctttcgtcgcagagcagaaggtggagtacacccttggtgaggagagtgaagctccggggcagcgggcattgccgtcagaagagctgaacagacaactcgagaaactgctgaaagaaggctcgtccaatcaaagggtatttgattggattgaggctaatctctctgaacagcaaattgtttcaaacacattggtccgggctttaatgaccgcagtttgttacagcgccatcatatttgagactccattacgcgtggacgtggctgtgctcaaagccagggccaagttgctccaaaagtacctctgcgatgagcaaaaggaactgcaggccttgtatgctctgcaggctctagttgttaccctcgagcaaccgcccaaccttcttcgcatgttttttgatgctctctatgacgaggacgtagtgaaggaagacgctttttattcttgggaaagttctaaggatcccgcagaacaacagggaaagggagtcgcacttaagtcagtcacagcgttctttaaatggctgagagaagcagaggaagagtccgatcataactag

SEQ ID NO: 257239 - DNA, 5667 bp, Artificial Sequence
  derived and/or modified sequence
acttgcctgaaaccggctcctcgacggccgccgcccgcctggccttttagggcctgactcccgcccttcctggcctacactcctgggcggcggcaggcctagcttctggcccagtgcgggttccccggcggcaggcgtatcctgtgtgcccctgggccaggcccgaacccggtgtccccgggtggggggtggggacgccacggccgaagcagctagctccgttcgtgatccgggagcctggtgccagcgagacctggaatttccggtctggttggtctggggccccgcggagccaggttgataccctcacctcccaaccccaggccctcggatgcccagaacctgtaggccgcaccgtggacttgttcttaatcgagggggtgctggggggaccctgatgtggcaccaaatgaaatgaacaaagctccacagtccacaggccccccacccgccccatcccccggactcccacagccagcgtttcccccggggcagacagcgccggtggtgttcagtacgccacaagcgacacaaatgaacacgccttctcagccccgccagcacttctaccctagccgggcccagcccccgagcagtgcagcctcccgagtgcagagtgcagcccctgcccgccctggcccagctgcccatgtctaccctgctggatcccaagtaatgatgatcccttcccagatctcctacccagcctcccagggggcctactacatccctggacaggggcgttccacatacgttgtcccgacacagcagtaccctgtgcagccaggagccccaggcttctatccaggtgcaagccctacagaatttgggacctacgctggcgcctactatccagcccaaggggtgcagcagtttcccactggcgtggcccccaccccagttttgatgaaccagccaccccagattgctcccaagagggagcgtaagacgatccgaattcgagatccaaaccaaggaggaaaggatatcacagaggagatcatgtctggggcccgcactgcctccacacccacccctccccagacgggaggcggtctggagcctcaagctaatggggagacgccccaggttgctgtcattgtccggccagatgaccggtcacagggagcaatcattgctgaccggccagggctgcctggcccagagcatagcccttcagaatcccagccttcgtcgccttctccgaccccatcaccatccccagtcttggaaccggggtctgagcctaatctcgcagtcctctctattcctggggacactatgacaactatacaaatgtctgtagaagaatcaacccccatctcccgtgaaactggggagccatatcgcctctctccagaacccactcctctcgccgaacccatactggaagtagaagtgacacttagcaaaccggttccagaatctgagttttcttccagtcctctccaggctcccacccctttggcatctcacacagtggaaattcatgagcctaatggcatggtcccatctgaagatctggaaccagaggtggagtcaagcccagagcttgctcctcccccagcttgcccctccgaatcccctgtgcccattgctccaactgcccaacctgaggaactgctcaacggagccccctcgccaccagctgtggacttaagcccagtcagtgagccagaggagcaggccaaggaggtgacagcatcaatggcgccccccaccatcccctctgctactccagctacggctccttcagctacttccccagctcaggaggaggaaatggaagaagaagaagaagaggaagaaggagaagcaggagaagcaggagaagctgagagtgagaaaggaggagaggaactgctccccccagagagtacccctattccagccaacttgtctcagaatttggaggcagcagcagccactcaagtggcagtatctgtgccaaagaggagacggaaaattaaggagctaaataagaaggaggctgttggagaccttctggatgccttcaaggaggcgaacccggcagtaccagaggtggaaaatcagcctcctgcaggcagcaatccaggcccagagtctgagggcagtggtgtgcccccacgtcctgaggaagcagatgagacctgggactcaaaggaagacaaaattcacaatgctgagaacatccagcccggggaacagaagtatgaatataagtcagatcagtggaagcctctaaacctagaggagaaaaaacgttacgaccgtgagttcctgcttggttttcagttcatctttgccagtatgcagaagccagagggattgccacatatcagtgacgtggtgctggacaaggccaataaaacaccactgcggccactggatcccactagactacaaggcataaattgtggcccagacttcactccatcctttgccaaccttggccggacaacccttagcacccgtgggcccccaaggggtgggccaggtggggagctgccccgtgggccgcaggctggcctgggaccccggcgctctcagcagggaccccgaaaagaaccacgcaagatcattgccacagtgttaatgaccgaagatataaaactgaacaaagcagagaaagcctggaaacccagcagcaagcggacggcggctgataaggatcgaggggaagaagatgctgatggcagcaaaacccaggacctattccgcagggtgcgctccatcctgaataaactgacaccccagatgttccagcagctgatgaagcaagtgacgcagctggccatcgacaccgaggaacgcctcaaaggggtcattgacctcatttttgagaaggccatttcagagcccaacttctctgtggcctatgccaacatgtgccgctgcctcatggcgctgaaagtgcccactacggaaaagccaacagtgactgtgaacttccgaaagctgttgttgaatcgatgtcagaaggagtttgagaaagacaaagatgatgatgaggtttttgagaagaagcaaaaagagatggatgaagctgctacggcagaggaacgaggacgcctgaaggaagagctggaagaggctcgggacatagcccggcggcgctctttagggaatatcaagtttattggagagttgttcaaactgaagatgttaacagaggcaataatgcatgactgtgtggtcaaactgcttaagaaccatgatgaagagtcccttgagtgcctttgtcgtctgctcaccaccattggcaaagacctggactttgaaaaagccaagccccgaatggatcagtatttcaaccagatggaaaaaatcattaaagaaaagaagacgtcatcccgcatccgctttatgctgcaggacgtgctggatctgcgagggagcaattgggtgccacgccgaggggatcagggtcccaagaccattgaccagatccataaggaggctgagatggaagaacatcgagagcacatcaaagtgcagcagctcatggccaagggcagtgacaagcgtcggggcggtcctccaggccctcccatcagccgtggacttccccttgtggatgatggtggctggaacacagttcccatcagcaaaggtagccgccccattgacacctcacgactcaccaagatcaccaagcctggctccatcgattctaacaaccagctctttgcacctggagggcgactgagctggggcaagggcagcagcggaggctcaggagccaagccctcagacgcagcatcagaagctgctcgcccagctactagtactttgaatcgcttctcagcccttcaacaagcggtacccacagaaagcacagataatagacgtgtggtgcagaggagtagcttgagccgagaacgaggcgagaaagctggagaccgaggagaccgcctagagcggagtgaacggggaggggaccgtggggaccggcttgatcgtgcgcggacacctgctaccaagcggagcttcagcaaggaagtggaggagcggagtagagaacggccctcccagcctgaggggctgcgcaaggcagctagcctcacggaggatcgggaccgtgggcgggatgccgtgaagcgagaagctgccctacccccagtgagccccctgaaggcggctctctctgaggaggagttagagaagaaatccaaggctatcattgaggaatatctccatctcaatgacatgaaagaggcagtccagtgcgtgcaggagctggcctcaccctccttgctcttcatctttgtacggcatggtgtcgagtctacgctggagcgcagtgccattgctcgtgagcatatggggcagctgctgcaccagctgctctgtgctgggcatctgtctactgctcagtactaccaagggttgtatgaaatcttggaattggctgaggacatggaaattgacatcccccacgtgtggctctacctagcggaactggtaacacccattctgcaggaaggtggggtgcccatgggggagctgttcagggagattacaaagcctctgagaccgttgggcaaagctgcttccctgttgctggagatcctgggcctcctgtgcaaaagcatgggtcctaaaaaggtggggacgctgtggcgagaagccgggcttagctggaaggaatttctacctgaaggccaggacattggtgcattcgtcgctgaacagaaggtggagtataccctgggagaggagtcggaagcccctggccagagggcactcccctccgaggagctgaacaggcagctggagaagctgctgaaggagggcagcagtaaccagcgggtgttcgactggatagaggccaacctgagtgagcagcagatagtatccaacacgttagttcgagccctcatgacggctgtctgctattctgcaattatttttgagactcccctccgagtggacgttgcagtgctgaaagcgcgagcgaagctgctgcagaaatacctgtgtgacgagcagaaggagctacaggcgctctacgccctccaggcccttgtagtgaccttagaacagcctcccaacctgctgcggatgttctttgacgcactgtatgacgaggacgtggtgaaggaggatgccttctacagttgggagagtagcaaggaccccgctgagcagcagggcaagggtgtggcccttaaatctgtcacagccttcttcaagtggctccgtgaagcagaggaggagtctgaccacaactgagggctggtggggccggggacctggagccccatggacacacagatggcccggctagccgcctggactgcaggggggcggcagcagcggcggtggcagtgggtgcctgtagtgtgatgtgtctgaactaataaagtggctgaagaggcaggatggcttggggctgcctgggcccccctccaggatgccgccaggtgtccctctcctccccctggggcacagagatatattatatataaagtcttgaaatttggtgtgtcttggggtggggaggggcaccaacgcctgcccctggggtccttttttttattttctgaaaatcactctcgggactgccgtcctcgctgctgggggcatatgccccagcccctgtaccacccctgctgttgcctgggcagggggaagggggggcacggtgcctgtaattattaaacatgaattcaattaagctca

SEQ ID NO: 257240 - DNA, 4683 bp, Artificial Sequence
  derived and/or modified sequence
atgaacacgccttctcagccccgccagcacttctaccctagccgggcccagcccccgagcagtgcagcctcccgagtgcagagtgcagcccctgcccgccctggcccagctgcccatgtctaccctgctggatcccaagtaatgatgatcccttcccagatctcctacccagcctcccagggggcctactacatccctggacaggggcgttccacatacgttgtcccgacacagcagtaccctgtgcagccaggagccccaggcttctatccaggtgcaagccctacagaatttgggacctacgctggcgcctactatccagcccaaggggtgcagcagtttcccactggcgtggcccccaccccagttttgatgaaccagccaccccagattgctcccaagagggagcgtaagacgatccgaattcgagatccaaaccaaggaggaaaggatatcacagaggagatcatgtctggggcccgcactgcctccacacccacccctccccagacgggaggcggtctggagcctcaagctaatggggagacgccccaggttgctgtcattgtccggccagatgaccggtcacagggagcaatcattgctgaccggccagggctgcctggcccagagcatagcccttcagaatcccagccttcgtcgccttctccgaccccatcaccatccccagtcttggaaccggggtctgagcctaatctcgcagtcctctctattcctggggacactatgacaactatacaaatgtctgtagaagaatcaacccccatctcccgtgaaactggggagccatatcgcctctctccagaacccactcctctcgccgaacccatactggaagtagaagtgacacttagcaaaccggttccagaatctgagttttcttccagtcctctccaggctcccacccctttggcatctcacacagtggaaattcatgagcctaatggcatggtcccatctgaagatctggaaccagaggtggagtcaagcccagagcttgctcctcccccagcttgcccctccgaatcccctgtgcccattgctccaactgcccaacctgaggaactgctcaacggagccccctcgccaccagctgtggacttaagcccagtcagtgagccagaggagcaggccaaggaggtgacagcatcaatggcgccccccaccatcccctctgctactccagctacggctccttcagctacttccccagctcaggaggaggaaatggaagaagaagaagaagaggaagaaggagaagcaggagaagcaggagaagctgagagtgagaaaggaggagaggaactgctccccccagagagtacccctattccagccaacttgtctcagaatttggaggcagcagcagccactcaagtggcagtatctgtgccaaagaggagacggaaaattaaggagctaaataagaaggaggctgttggagaccttctggatgccttcaaggaggcgaacccggcagtaccagaggtggaaaatcagcctcctgcaggcagcaatccaggcccagagtctgagggcagtggtgtgcccccacgtcctgaggaagcagatgagacctgggactcaaaggaagacaaaattcacaatgctgagaacatccagcccggggaacagaagtatgaatataagtcagatcagtggaagcctctaaacctagaggagaaaaaacgttacgaccgtgagttcctgcttggttttcagttcatctttgccagtatgcagaagccagagggattgccacatatcagtgacgtggtgctggacaaggccaataaaacaccactgcggccactggatcccactagactacaaggcataaattgtggcccagacttcactccatcctttgccaaccttggccggacaacccttagcacccgtgggcccccaaggggtgggccaggtggggagctgccccgtgggccgcaggctggcctgggaccccggcgctctcagcagggaccccgaaaagaaccacgcaagatcattgccacagtgttaatgaccgaagatataaaactgaacaaagcagagaaagcctggaaacccagcagcaagcggacggcggctgataaggatcgaggggaagaagatgctgatggcagcaaaacccaggacctattccgcagggtgcgctccatcctgaataaactgacaccccagatgttccagcagctgatgaagcaagtgacgcagctggccatcgacaccgaggaacgcctcaaaggggtcattgacctcatttttgagaaggccatttcagagcccaacttctctgtggcctatgccaacatgtgccgctgcctcatggcgctgaaagtgcccactacggaaaagccaacagtgactgtgaacttccgaaagctgttgttgaatcgatgtcagaaggagtttgagaaagacaaagatgatgatgaggtttttgagaagaagcaaaaagagatggatgaagctgctacggcagaggaacgaggacgcctgaaggaagagctggaagaggctcgggacatagcccggcggcgctctttagggaatatcaagtttattggagagttgttcaaactgaagatgttaacagaggcaataatgcatgactgtgtggtcaaactgcttaagaaccatgatgaagagtcccttgagtgcctttgtcgtctgctcaccaccattggcaaagacctggactttgaaaaagccaagccccgaatggatcagtatttcaaccagatggaaaaaatcattaaagaaaagaagacgtcatcccgcatccgctttatgctgcaggacgtgctggatctgcgagggagcaattgggtgccacgccgaggggatcagggtcccaagaccattgaccagatccataaggaggctgagatggaagaacatcgagagcacatcaaagtgcagcagctcatggccaagggcagtgacaagcgtcggggcggtcctccaggccctcccatcagccgtggacttccccttgtggatgatggtggctggaacacagttcccatcagcaaaggtagccgccccattgacacctcacgactcaccaagatcaccaagcctggctccatcgattctaacaaccagctctttgcacctggagggcgactgagctggggcaagggcagcagcggaggctcaggagccaagccctcagacgcagcatcagaagctgctcgcccagctactagtactttgaatcgcttctcagcccttcaacaagcggtacccacagaaagcacagataatagacgtgtggtgcagaggagtagcttgagccgagaacgaggcgagaaagctggagaccgaggagaccgcctagagcggagtgaacggggaggggaccgtggggaccggcttgatcgtgcgcggacacctgctaccaagcggagcttcagcaaggaagtggaggagcggagtagagaacggccctcccagcctgaggggctgcgcaaggcagctagcctcacggaggatcgggaccgtgggcgggatgccgtgaagcgagaagctgccctacccccagtgagccccctgaaggcggctctctctgaggaggagttagagaagaaatccaaggctatcattgaggaatatctccatctcaatgacatgaaagaggcagtccagtgcgtgcaggagctggcctcaccctccttgctcttcatctttgtacggcatggtgtcgagtctacgctggagcgcagtgccattgctcgtgagcatatggggcagctgctgcaccagctgctctgtgctgggcatctgtctactgctcagtactaccaagggttgtatgaaatcttggaattggctgaggacatggaaattgacatcccccacgtgtggctctacctagcggaactggtaacacccattctgcaggaaggtggggtgcccatgggggagctgttcagggagattacaaagcctctgagaccgttgggcaaagctgcttccctgttgctggagatcctgggcctcctgtgcaaaagcatgggtcctaaaaaggtggggacgctgtggcgagaagccgggcttagctggaaggaatttctacctgaaggccaggacattggtgcattcgtcgctgaacagaaggtggagtataccctgggagaggagtcggaagcccctggccagagggcactcccctccgaggagctgaacaggcagctggagaagctgctgaaggagggcagcagtaaccagcgggtgttcgactggatagaggccaacctgagtgagcagcagatagtatccaacacgttagttcgagccctcatgacggctgtctgctattctgcaattatttttgagactcccctccgagtggacgttgcagtgctgaaagcgcgagcgaagctgctgcagaaatacctgtgtgacgagcagaaggagctacaggcgctctacgccctccaggcccttgtagtgaccttagaacagcctcccaacctgctgcggatgttctttgacgcactgtatgacgaggacgtggtgaaggaggatgccttctacagttgggagagtagcaaggaccccgctgagcagcagggcaagggtgtggcccttaaatctgtcacagccttcttcaagtggctccgtgaagcagaggaggagtctgaccacaactga

SEQ ID NO: 257241 - DNA, 5038 bp, Artificial Sequence
  derived and/or modified sequence
tcacttgcctgaaaccggctcctcgacggccgccgcccgcctggccttttagggcctgactcccgcccttcctggcctacactcctgggcggcggcaggcctagcttctggcccagtgcgggttccccggcggcaggcgtatcctgtgtgcccctgggccaggcccgaacccggtgtccccgggtggggggtggggacgccacggccgaagcagctagctccgttcgtgatccgggagcctggtgccagcgagacctggaatttccggtctggttggtctggggccccgcggagccaggttgataccctcacctcccaaccccaggccctcggatgcccagaacctgtaggccgcaccgtggacttgttcttaatcgaggggcacttctaccctagccgggcccagcccccgagcagtgcagcctcccgagtgcagagtgcagcccctgcccgccctggcccagctgcccatgtctaccctgctggatcccaagtaatgatgatcccttcccagatctcctacccagcctcccagggggcctactacatccctggacaggggcgttccacatacgttgtcccgacacagcagtaccctgtgcagccaggagccccaggcttctatccaggtgcaagccctacagaatttgggacctacgctggcgcctactatccagcccaaggggtgcagcagtttcccactggcgtggcccccaccccagttttgatgaaccagccaccccagattgctcccaagagggagcgtaagacgatccgaattcgagatccaaaccaaggaggaaaggatatcacagaggagatcatgtctggggcccgcactgcctccacacccacccctccccagacgggaggcggtctggagcctcaagctaatggggagacgccccaggttgctgtcattgtccggccagatgaccggtcacagggagcaatcattgctgaccggccagggctgcctggcccagagcatagcccttcagaatcccagccttcgtcgccttctccgaccccatcaccatccccagtcttggaaccggggtctgagcctaatctcgcagtcctctctattcctggggacactatgacaactatacaaatgtctgtagaagaatcaacccccatctcccgtgaaactggggagccatatcgcctctctccagaacccactcctctcgccgaacccatactggaagtagaagtgacacttagcaaaccggttccagaatctgagttttcttccagtcctctccaggctcccacccctttggcatctcacacagtggaaattcatgagcctaatggcatggtcccatctgaagatctggaaccagaggtggagtcaagcccagagcttgctcctcccccagcttgcccctccgaatcccctgtgcccattgctccaactgcccaacctgaggaactgctcaacggagccccctcgccaccagctgtggacttaagcccagtcagtgagccagaggagcaggccaaggaggtgacagcatcaatggcgccccccaccatcccctctgctactccagctacggctccttcagctacttccccagctcaggaggaggaaatggaagaagaagaagaagaggaagaaggagaagcaggagaagcaggagaagctgagagtgagaaaggaggagaggaactgctccccccagagagtacccctattccagccaacttgtctcagaatttggaggcagcagcagccactcaagtggcagtatctgtgccaaagaggagacggaaaattaaggagctaaataagaaggaggctgttggagaccttctggatgccttcaaggaggcgaacccggcagtaccagaggtggaaaatcagcctcctgcaggcagcaatccaggcccagagtctgagggcagtggtgtgcccccacgtcctgaggaagcagatgagacctgggactcaaaggaagacaaaattcacaatgctgagaacatccagcccggggaacagaagtatgaatataagtcagatcagtggaagcctctaaacctagaggagaaaaaacgttacgaccgtgagttcctgcttggttttcagttcatctttgccagtatgcagaagccagagggattgccacatatcagtgacgtggtgctggacaaggccaataaaacaccactgcggccactggatcccactagactacaaggcataaattgtggcccagacttcactccatcctttgccaaccttggccggacaacccttagcacccgtgggcccccaaggggtgggccaggtggggagctgccccgtgggccgcaggctggcctgggaccccggcgctctcagcagggaccccgaaaagaaccacgcaagatcattgccacagtgttaatgaccgaagatataaaactgaacaaagcagagaaagcctggaaacccagcagcaagcggacggcggctgataaggatcgaggggaagaagatgctgatggcagcaaaacccaggacctattccgcagggtgcgctccatcctgaataaactgacaccccagatgttccagcagctgatgaagcaagtgacgcagctggccatcgacaccgaggaacgcctcaaaggggtcattgacctcatttttgagaaggccatttcagagcccaacttctctgtggcctatgccaacatgtgccgctgcctcatggcgctgaaagtgcccactacggaaaagccaacagtgactgtgaacttccgaaagctgttgttgaatcgatgtcagaaggagtttgagaaagacaaagatgatgatgaggtttttgagaagaagcaaaaagagatggatgaagctgctacggcagaggaacgaggacgcctgaaggaagagctggaagaggctcgggacatagcccggcggcgctctttagggaatatcaagtttattggagagttgttcaaactgaagatgttaacagaggcaataatgcatgactgtgtggtcaaactgcttaagaaccatgatgaagagtcccttgagtgcctttgtcgtctgctcaccaccattggcaaagacctggactttgaaaaagccaagccccgaatggatcagtatttcaaccagatggaaaaaatcattaaagaaaagaagacgtcatcccgcatccgctttatgctgcaggacgtgctggatctgcgagggagcaattgggtgccacgccgaggggatcagggtcccaagaccattgaccagatccataaggaggctgagatggaagaacatcgagagcacatcaaagtgcagcagctcatggccaagggcagtgacaagcgtcggggcggtcctccaggccctcccatcagccgtggacttccccttgtggatgatggtggctggaacacagttcccatcagcaaaggtagccgccccattgacacctcacgactcaccaagatcaccaagcctggctccatcgattctaacaaccagctctttgcacctggagggcgactgagctggggcaagggcagcagcggaggctcaggagccaagccctcagacgcagcatcagaagctgctcgcccagctactagtactttgaatcgcttctcagcccttcaacaagcggtacccacagaaagcacagataatagacgtgtggtgcagaggagtagcttgagccgagaacgaggcgagaaagctggagaccgaggagaccgcctagagcggagtgaacggggaggggaccgtggggaccggcttgatcgtgcgcggacacctgctaccaagcggagcttcagcaaggaagtggaggagcggagtagagaacggccctcccagcctgaggggctgcgcaaggcagctagcctcacggaggatcgggaccgtgggcgggatgccgtgaagcgagaagctgccctacccccagtgagccccctgaaggcggctctctctgaggaggagttagagaagaaatccaaggctatcattgaggaatatctccatctcaatgacatgaaagaggcagtccagtgcgtgcaggagctggcctcaccctccttgctcttcatctttgtacggcatggtgtcgagtctacgctggagcgcagtgccattgctcgtgagcatatggggcagctgctgcaccagctgctctgtgctgggcatctgtctactgctcagtactaccaagggttgtatgaaatcttggaattggctgaggacatggaaattgacatcccccacgtgtggctctacctagcggaactggtaacacccattctgcaggaaggtggggtgcccatgggggagctgttcagggagattacaaagcctctgagaccgttgggcaaagctgcttccctgttgctggagatcctgggcctcctgtgcaaaagcatgggtcctaaaaaggtggggacgctgtggcgagaagccgggcttagctggaaggaatttctacctgaaggccaggacattggtgcattcgtcgctgaacagaaggtggagtataccctgggagaggagtcggaagcccctggccagagggcactcccctccgaggagctgaacaggcagctggagaagctgctgaaggagggcagcagtaaccagcgggtgttcgactggatagaggccaacctgagtgagcagcagatagtatccaacacgttagttcgagccctcatgacggctgtctgctattctgcaattatttttgagactcccctccgagtggacgttgcagtgctgaaagcgcgagcgaagctgctgcagaaatacctgtgtgacgagcagaaggagctacaggcgctctacgccctccaggcccttgtagtgaccttagaacagcctcccaacctgctgcggatgttctttgacgcactgtatgacgaggacgtggtgaaggaggatgccttctacagttgggagagtagcaaggaccccgctgagcagcagggcaagggtgtggcccttaaatctgtcacagccttcttcaagtggctccgtgaagcagaggaggagtctgaccacaactga

SEQ ID NO: 257242 - DNA, 5026 bp, Artificial Sequence
  derived and/or modified sequence
tctagatgggggtcctgggccccagggtgtgcagccactgacttggggactgctggtggggtagggatgagggagggaggggcattgtgatgtacagggctgctctgtgagatcaagggtctcttaagggtgggagctggggcagggactacgagagcagccagatgggctgaaagtggaactcaaggggtttctggcacctacctacctgcttcccgctggggggtggggagttggcccagagtcttaagattggggcagggtggagaggtgggctcttcctgcttcccactcatcttatagctttctttccccagatccgaattcgagatccaaaccaaggaggaaaggatatcacagaggagatcatgtctggggcccgcactgcctccacacccacccctccccagacgggaggcggtctggagcctcaagctaatggggagacgccccaggttgctgtcattgtccggccagatgaccggtcacagggagcaatcattgctgaccggccagggctgcctggcccagagcatagcccttcagaatcccagccttcgtcgccttctccgaccccatcaccatccccagtcttggaaccggggtctgagcctaatctcgcagtcctctctattcctggggacactatgacaactatacaaatgtctgtagaagaatcaacccccatctcccgtgaaactggggagccatatcgcctctctccagaacccactcctctcgccgaacccatactggaagtagaagtgacacttagcaaaccggttccagaatctgagttttcttccagtcctctccaggctcccacccctttggcatctcacacagtggaaattcatgagcctaatggcatggtcccatctgaagatctggaaccagaggtggagtcaagcccagagcttgctcctcccccagcttgcccctccgaatcccctgtgcccattgctccaactgcccaacctgaggaactgctcaacggagccccctcgccaccagctgtggacttaagcccagtcagtgagccagaggagcaggccaaggaggtgacagcatcaatggcgccccccaccatcccctctgctactccagctacggctccttcagctacttccccagctcaggaggaggaaatggaagaagaagaagaagaggaagaaggagaagcaggagaagcaggagaagctgagagtgagaaaggaggagaggaactgctccccccagagagtacccctattccagccaacttgtctcagaatttggaggcagcagcagccactcaagtggcagtatctgtgccaaagaggagacggaaaattaaggagctaaataagaaggaggctgttggagaccttctggatgccttcaaggaggcgaacccggcagtaccagaggtggaaaatcagcctcctgcaggcagcaatccaggcccagagtctgagggcagtggtgtgcccccacgtcctgaggaagcagatgagacctgggactcaaaggaagacaaaattcacaatgctgagaacatccagcccggggaacagaagtatgaatataagtcagatcagtggaagcctctaaacctagaggagaaaaaacgttacgaccgtgagttcctgcttggttttcagttcatctttgccagtatgcagaagccagagggattgccacatatcagtgacgtggtgctggacaaggccaataaaacaccactgcggccactggatcccactagactacaaggcataaattgtggcccagacttcactccatcctttgccaaccttggccggacaacccttagcacccgtgggcccccaaggggtgggccaggtggggagctgccccgtgggccgcaggctggcctgggaccccggcgctctcagcagggaccccgaaaagaaccacgcaagatcattgccacagtgttaatgaccgaagatataaaactgaacaaagcagagaaagcctggaaacccagcagcaagcggacggcggctgataaggatcgaggggaagaagatgctgatggcagcaaaacccaggacctattccgcagggtgcgctccatcctgaataaactgacaccccagatgttccagcagctgatgaagcaagtgacgcagctggccatcgacaccgaggaacgcctcaaaggggtcattgacctcatttttgagaaggccatttcagagcccaacttctctgtggcctatgccaacatgtgccgctgcctcatggcgctgaaagtgcccactacggaaaagccaacagtgactgtgaacttccgaaagctgttgttgaatcgatgtcagaaggagtttgagaaagacaaagatgatgatgaggtttttgagaagaagcaaaaagagatggatgaagctgctacggcagaggaacgaggacgcctgaaggaagagctggaagaggctcgggacatagcccggcggcgctctttagggaatatcaagtttattggagagttgttcaaactgaagatgttaacagaggcaataatgcatgactgtgtggtcaaactgcttaagaaccatgatgaagagtcccttgagtgcctttgtcgtctgctcaccaccattggcaaagacctggactttgaaaaagccaagccccgaatggatcagtatttcaaccagatggaaaaaatcattaaagaaaagaagacgtcatcccgcatccgctttatgctgcaggacgtgctggatctgcgagggagcaattgggtgccacgccgaggggatcagggtcccaagaccattgaccagatccataaggaggctgagatggaagaacatcgagagcacatcaaagtgcagcagctcatggccaagggcagtgacaagcgtcggggcggtcctccaggccctcccatcagccgtggacttccccttgtggatgatggtggctggaacacagttcccatcagcaaaggtagccgccccattgacacctcacgactcaccaagatcaccaagcctggctccatcgattctaacaaccagctctttgcacctggagggcgactgagctggggcaagggcagcagcggaggctcaggagccaagccctcagacgcagcatcagaagctgctcgcccagctactagtactttgaatcgcttctcagcccttcaacaagcggtacccacagaaagcacagataatagacgtgtggtgcagaggagtagcttgagccgagaacgaggcgagaaagctggagaccgaggagaccgcctagagcggagtgaacggggaggggaccgtggggaccggcttgatcgtgcgcggacacctgctaccaagcggagcttcagcaaggaagtggaggagcggagtagagaacggccctcccagcctgaggggctgcgcaaggcagctagcctcacggaggatcgggaccgtgggcgggatgccgtgaagcgagaagctgccctacccccagtgagccccctgaaggcggctctctctgaggaggagttagagaagaaatccaaggctatcattgaggaatatctccatctcaatgacatgaaagaggcagtccagtgcgtgcaggagctggcctcaccctccttgctcttcatctttgtacggcatggtgtcgagtctacgctggagcgcagtgccattgctcgtgagcatatggggcagctgctgcaccagctgctctgtgctgggcatctgtctactgctcagtactaccaagggttgtatgaaatcttggaattggctgaggacatggaaattgacatcccccacgtgtggctctacctagcggaactggtaacacccattctgcaggaaggtggggtgcccatgggggagctgttcagggagattacaaagcctctgagaccgttgggcaaagctgcttccctgttgctggagatcctgggcctcctgtgcaaaagcatgggtcctaaaaaggtggggacgctgtggcgagaagccgggcttagctggaaggaatttctacctgaaggccaggacattggtgcattcgtcgctgaacagaaggtggagtataccctgggagaggagtcggaagcccctggccagagggcactcccctccgaggagctgaacaggcagctggagaagctgctgaaggagggcagcagtaaccagcgggtgttcgactggatagaggccaacctgagtgagcagcagatagtatccaacacgttagttcgagccctcatgacggctgtctgctattctgcaattatttttgagactcccctccgagtggacgttgcagtgctgaaagcgcgagcgaagctgctgcagaaatacctgtgtgacgagcagaaggagctacaggcgctctacgccctccaggcccttgtagtgaccttagaacagcctcccaacctgctgcggatgttctttgacgcactgtatgacgaggacgtggtgaaggaggatgccttctacagttgggagagtagcaaggaccccgctgagcagcagggcaagggtgtggcccttaaatctgtcacagccttcttcaagtggctccgtgaagcagaggaggagtctgaccacaactgagggctggtggggccggggacctggagccccatggacacacagatggcccggctagccgcctggactgcaggggggcggcagcagcggcggtggcagtgggtgcctgtagtgtgatgtgtctgaactaataaagtggctgaagaggcaggatggcttggggctgcctgggcccccctccaggatgccgccaggtgtccctctcctccccctggggcacagagatatattatatataaagtcttgaaatttggtgtgtcttggggtggggaggggcaccaacgcctgcccctggggtccttttttttattttctgaaaatcactctcgggactgccgtcctcgctgctgggggcatatgccccagcccctgtaccacccctgctgttgcctgggcagggggaagggggggcacggtgcctgtaattattaaacatgaattcaatt

SEQ ID NO: 257243 - DNA, 4311 bp, Artificial Sequence
  derived and/or modified sequence
atgaaccagccaccccagattgctcccaagagggagcgtaagacgatccgaattcgagatccaaaccaaggaggaaaggatatcacagaggagatcatgtctggggcccgcactgcctccacacccacccctccccagacgggaggcggtctggagcctcaagctaatggggagacgccccaggttgctgtcattgtccggccagatgaccggtcacagggagcaatcattgctgaccggccagggctgcctggcccagagcatagcccttcagaatcccagccttcgtcgccttctccgaccccatcaccatccccagtcttggaaccggggtctgagcctaatctcgcagtcctctctattcctggggacactatgacaactatacaaatgtctgtagaagaatcaacccccatctcccgtgaaactggggagccatatcgcctctctccagaacccactcctctcgccgaacccatactggaagtagaagtgacacttagcaaaccggttccagaatctgagttttcttccagtcctctccaggctcccacccctttggcatctcacacagtggaaattcatgagcctaatggcatggtcccatctgaagatctggaaccagaggtggagtcaagcccagagcttgctcctcccccagcttgcccctccgaatcccctgtgcccattgctccaactgcccaacctgaggaactgctcaacggagccccctcgccaccagctgtggacttaagcccagtcagtgagccagaggagcaggccaaggaggtgacagcatcaatggcgccccccaccatcccctctgctactccagctacggctccttcagctacttccccagctcaggaggaggaaatggaagaagaagaagaagaggaagaaggagaagcaggagaagcaggagaagctgagagtgagaaaggaggagaggaactgctccccccagagagtacccctattccagccaacttgtctcagaatttggaggcagcagcagccactcaagtggcagtatctgtgccaaagaggagacggaaaattaaggagctaaataagaaggaggctgttggagaccttctggatgccttcaaggaggcgaacccggcagtaccagaggtggaaaatcagcctcctgcaggcagcaatccaggcccagagtctgagggcagtggtgtgcccccacgtcctgaggaagcagatgagacctgggactcaaaggaagacaaaattcacaatgctgagaacatccagcccggggaacagaagtatgaatataagtcagatcagtggaagcctctaaacctagaggagaaaaaacgttacgaccgtgagttcctgcttggttttcagttcatctttgccagtatgcagaagccagagggattgccacatatcagtgacgtggtgctggacaaggccaataaaacaccactgcggccactggatcccactagactacaaggcataaattgtggcccagacttcactccatcctttgccaaccttggccggacaacccttagcacccgtgggcccccaaggggtgggccaggtggggagctgccccgtgggccgcaggctggcctgggaccccggcgctctcagcagggaccccgaaaagaaccacgcaagatcattgccacagtgttaatgaccgaagatataaaactgaacaaagcagagaaagcctggaaacccagcagcaagcggacggcggctgataaggatcgaggggaagaagatgctgatggcagcaaaacccaggacctattccgcagggtgcgctccatcctgaataaactgacaccccagatgttccagcagctgatgaagcaagtgacgcagctggccatcgacaccgaggaacgcctcaaaggggtcattgacctcatttttgagaaggccatttcagagcccaacttctctgtggcctatgccaacatgtgccgctgcctcatggcgctgaaagtgcccactacggaaaagccaacagtgactgtgaacttccgaaagctgttgttgaatcgatgtcagaaggagtttgagaaagacaaagatgatgatgaggtttttgagaagaagcaaaaagagatggatgaagctgctacggcagaggaacgaggacgcctgaaggaagagctggaagaggctcgggacatagcccggcggcgctctttagggaatatcaagtttattggagagttgttcaaactgaagatgttaacagaggcaataatgcatgactgtgtggtcaaactgcttaagaaccatgatgaagagtcccttgagtgcctttgtcgtctgctcaccaccattggcaaagacctggactttgaaaaagccaagccccgaatggatcagtatttcaaccagatggaaaaaatcattaaagaaaagaagacgtcatcccgcatccgctttatgctgcaggacgtgctggatctgcgagggagcaattgggtgccacgccgaggggatcagggtcccaagaccattgaccagatccataaggaggctgagatggaagaacatcgagagcacatcaaagtgcagcagctcatggccaagggcagtgacaagcgtcggggcggtcctccaggccctcccatcagccgtggacttccccttgtggatgatggtggctggaacacagttcccatcagcaaaggtagccgccccattgacacctcacgactcaccaagatcaccaagcctggctccatcgattctaacaaccagctctttgcacctggagggcgactgagctggggcaagggcagcagcggaggctcaggagccaagccctcagacgcagcatcagaagctgctcgcccagctactagtactttgaatcgcttctcagcccttcaacaagcggtacccacagaaagcacagataatagacgtgtggtgcagaggagtagcttgagccgagaacgaggcgagaaagctggagaccgaggagaccgcctagagcggagtgaacggggaggggaccgtggggaccggcttgatcgtgcgcggacacctgctaccaagcggagcttcagcaaggaagtggaggagcggagtagagaacggccctcccagcctgaggggctgcgcaaggcagctagcctcacggaggatcgggaccgtgggcgggatgccgtgaagcgagaagctgccctacccccagtgagccccctgaaggcggctctctctgaggaggagttagagaagaaatccaaggctatcattgaggaatatctccatctcaatgacatgaaagaggcagtccagtgcgtgcaggagctggcctcaccctccttgctcttcatctttgtacggcatggtgtcgagtctacgctggagcgcagtgccattgctcgtgagcatatggggcagctgctgcaccagctgctctgtgctgggcatctgtctactgctcagtactaccaagggttgtatgaaatcttggaattggctgaggacatggaaattgacatcccccacgtgtggctctacctagcggaactggtaacacccattctgcaggaaggtggggtgcccatgggggagctgttcagggagattacaaagcctctgagaccgttgggcaaagctgcttccctgttgctggagatcctgggcctcctgtgcaaaagcatgggtcctaaaaaggtggggacgctgtggcgagaagccgggcttagctggaaggaatttctacctgaaggccaggacattggtgcattcgtcgctgaacagaaggtggagtataccctgggagaggagtcggaagcccctggccagagggcactcccctccgaggagctgaacaggcagctggagaagctgctgaaggagggcagcagtaaccagcgggtgttcgactggatagaggccaacctgagtgagcagcagatagtatccaacacgttagttcgagccctcatgacggctgtctgctattctgcaattatttttgagactcccctccgagtggacgttgcagtgctgaaagcgcgagcgaagctgctgcagaaatacctgtgtgacgagcagaaggagctacaggcgctctacgccctccaggcccttgtagtgaccttagaacagcctcccaacctgctgcggatgttctttgacgcactgtatgacgaggacgtggtgaaggaggatgccttctacagttgggagagtagcaaggaccccgctgagcagcagggcaagggtgtggcccttaaatctgtcacagccttcttcaagtggctccgtgaagcagaggaggagtctgaccacaactga

SEQ ID NO: 257244 - DNA, 4803 bp, Artificial Sequence
  derived and/or modified sequence
atgaacaaggccccccagagcacaggccccccaccagcccccagccctggcctgccccagcctgccttccccccaggccagacagcccctgtggtgttcagcaccccccaggccacccagatgaacacccccagccagccccggcagcacttctaccccagccgggcccagccccccagcagcgctgccagccgggtgcagagcgctgccccagcccggcccggccctgctgcccacgtgtacccagctggcagccaggtgatgatgatccccagccagatctcctacccagccagccagggcgcctactacatccctggccagggccgcagcacctacgtggtgcccacccagcagtaccctgtgcagcccggggcccctggcttctacccaggggccagccccacagaatttggcacctacgccggggcctactacccagcccagggcgtgcagcagttccccaccggggtggcccccacccctgtgctgatgaaccagcccccccagatcgcccccaagcgggagaggaagaccatccgcatccgggaccccaaccagggcggcaaggacatcacagaggagatcatgtctggggccaggacagccagcacccccaccccaccccagacaggaggcggcctggagccccaggccaacggggagaccccccaggtggccgtgattgtgcggccagatgacaggagccagggcgccatcatcgctgacaggcctggcctgcccggccctgagcacagccccagcgagagccagcccagcagccccagccccacccccagccccagccctgtgctggagcccggcagcgagcccaacctggccgtgctgagcatccctggggacaccatgaccaccatccagatgtctgtggaggagagcacccccatcagccgggagactggagagccctaccgcctgagccctgagcccacccccctggccgagcccatcctggaggtggaggtgaccctgagcaagcctgtgcctgagagcgagttcagcagcagccccctgcaggcccccacccccctggccagccacacagtggagatccacgagcccaacggcatggtgcccagcgaggacctggagcctgaggtggagagcagccctgagctggcccctcctccagcctgccccagcgagagccctgtgcccatcgcccccacagcccagcctgaggagctgctgaatggagcccccagccccccagctgtggacctgagccctgtgtctgagcctgaggagcaggccaaggaggtgacagcctccatggccccacccaccatccccagcgccaccccagccacagcccccagcgccaccagccctgcccaggaggaggagatggaggaggaggaggaggaggaggagggggaggccggggaggccggggaggccgagagcgagaagggcggggaggagctgctgcccccagagagcacccccatcccagccaacctgagccagaacctggaggccgctgctgccacccaggtggccgtgtctgtgcccaagagaagaaggaagatcaaggagctgaacaagaaggaggccgtgggggacctgctggatgccttcaaggaggccaacccagctgtgcctgaggtggagaaccagcccccagctggcagcaaccctggccctgagagcgagggcagcggcgtgccccccaggcctgaggaggctgatgagacctgggacagcaaggaggacaagatccacaatgctgagaacatccagcctggagagcagaagtatgagtacaagagtgaccagtggaagcccctgaacctggaggagaagaagagatatgaccgggagttcctgctgggcttccagttcatctttgcctccatgcagaagccagagggcctgccccacatcagtgatgtggtgctggacaaggccaacaagacccccctgcggcccctggaccccacccggctgcagggcatcaactgtggccctgacttcacccccagctttgccaacctgggccgcaccaccctgagcacccggggccccccccggggcggccctggaggagagctgccccggggcccccaggccggcctgggccccaggaggagccagcagggccccaggaaggagcccaggaagatcatcgccaccgtgctgatgacagaggacatcaagctgaacaaggccgagaaggcctggaagcccagcagcaagaggacagctgctgacaaggacagaggagaagaagatgctgatggcagcaagacccaggacctcttcagaagagtgcgcagcatcctgaacaagctgaccccccagatgttccagcagctgatgaagcaggtgacccagctggccatcgacacagaggagcggctgaagggcgtgattgacctgatctttgagaaggccatcagcgagcccaacttctctgtggcctatgccaacatgtgccgctgcctgatggccctgaaggtgcccaccacagagaagcccaccgtgacagtgaacttcaggaagctgctgctgaaccgctgccagaaggagtttgagaaggacaaggatgatgatgaggtgtttgagaagaagcagaaggagatggatgaggccgccacagctgaggagcggggccgcctgaaggaggagctggaggaggcccgggacatcgcccggcggcgcagcctgggcaacatcaagttcatcggggagctgttcaagctgaagatgctgacagaggccatcatgcatgactgtgtggtgaagctgctgaagaaccatgatgaggagagcctggagtgcctgtgccgcctgctgaccaccatcggcaaggacctggactttgagaaggccaagcccaggatggaccagtacttcaaccagatggagaagatcatcaaggagaagaagaccagcagccgcatccgcttcatgctgcaggatgtgctggacctgcggggcagcaactgggtgccccggcggggggaccagggccccaagaccatcgaccagatccacaaggaggccgagatggaggagcaccgggagcacatcaaggtgcagcagctgatggccaagggcagtgacaagaggcggggcggccccccaggcccccccatcagccggggcctgcccctggtggatgatggcggctggaacacagtgcccatcagcaagggcagccggcccatcgacaccagccggctgaccaagatcaccaagccaggcagcattgacagcaacaaccagctgtttgcccctgggggccgcctgtcctggggcaagggcagcagcggcggcagcggggccaagcccagtgatgctgccagcgaggccgcccggcctgccaccagcaccctgaaccgcttcagcgccctgcagcaggccgtgcccacagagagcacagacaacagaagagtggtgcagaggagcagcctgagccgggagcggggggagaaggccggggacagaggagaccggctggagaggtctgagcggggcggggacagaggagaccggctggaccgggcccggaccccagccaccaagaggagcttcagcaaggaggtggaggagaggagccgggagcggcccagccagcctgagggcctgaggaaggccgccagcctgacagaagatcgggaccggggcagagatgctgtgaagcgggaggccgccctgccccctgtgagccccctgaaggccgccctgtctgaggaggagctggagaagaagagcaaggccatcatcgaggagtacctgcacctgaatgacatgaaggaggccgtgcagtgtgtgcaggagctggccagccccagcctgctcttcatctttgtgagacatggagtggagagcaccctggagaggtctgccatcgcccgggagcacatgggccagctgctgcaccagctgctgtgtgccggccacctgagcacagcccagtactaccagggcctgtatgagatcctggagctggccgaggacatggagattgacatcccccacgtgtggctgtacctggccgagctggtgacccccatcctgcaggagggcggcgtgcccatgggagagctgttccgggagatcaccaagcccctgcggcccctgggcaaggccgccagcctgctgctggagatcctgggcctgctgtgcaagtccatgggccccaagaaggtgggcaccctgtggagggaggccggcctgtcctggaaggagttcctgcctgagggccaggacatcggggcctttgtggccgagcagaaggtggagtacaccctgggggaggagagcgaggcccctggccagagggccctgcccagcgaggagctgaaccggcagctggagaagctgctgaaggagggcagcagcaaccagagggtgtttgactggattgaggccaacctgtctgagcagcagatcgtgagcaacaccctggtgcgggccctgatgacagctgtgtgctacagcgccatcatctttgagacccccctgcgggtggatgtggccgtgctgaaggcccgggccaagctgctgcagaagtacctgtgtgatgagcagaaggagctgcaggccctgtatgccctgcaggccctggtggtgaccctggagcagccccccaacctgctgaggatgttctttgatgccctgtatgatgaagatgtggtgaaggaggatgccttctacagctgggagagcagcaaggaccctgctgagcagcagggcaagggcgtggccctgaagtctgtgacagccttcttcaagtggctgcgggaggccgaggaggagagtgaccacaactag

SEQ ID NO: 257245 - DNA, 4683 bp, Artificial Sequence
  derived and/or modified sequence
atgaacacccccagccagccccggcagcacttctaccccagccgggcccagccccccagcagcgctgccagccgggtgcagagcgctgccccagcccggcccggccctgctgcccacgtgtacccagctggcagccaggtgatgatgatccccagccagatctcctacccagccagccagggcgcctactacatccctggccagggccgcagcacctacgtggtgcccacccagcagtaccctgtgcagcccggggcccctggcttctacccaggggccagccccacagaatttggcacctacgccggggcctactacccagcccagggcgtgcagcagttccccaccggggtggcccccacccctgtgctgatgaaccagcccccccagatcgcccccaagcgggagaggaagaccatccgcatccgggaccccaaccagggcggcaaggacatcacagaggagatcatgtctggggccaggacagccagcacccccaccccaccccagacaggaggcggcctggagccccaggccaacggggagaccccccaggtggccgtgattgtgcggccagatgacaggagccagggcgccatcatcgctgacaggcctggcctgcccggccctgagcacagccccagcgagagccagcccagcagccccagccccacccccagccccagccctgtgctggagcccggcagcgagcccaacctggccgtgctgagcatccctggggacaccatgaccaccatccagatgtctgtggaggagagcacccccatcagccgggagactggagagccctaccgcctgagccctgagcccacccccctggccgagcccatcctggaggtggaggtgaccctgagcaagcctgtgcctgagagcgagttcagcagcagccccctgcaggcccccacccccctggccagccacacagtggagatccacgagcccaacggcatggtgcccagcgaggacctggagcctgaggtggagagcagccctgagctggcccctcctccagcctgccccagcgagagccctgtgcccatcgcccccacagcccagcctgaggagctgctgaatggagcccccagccccccagctgtggacctgagccctgtgtctgagcctgaggagcaggccaaggaggtgacagcctccatggccccacccaccatccccagcgccaccccagccacagcccccagcgccaccagccctgcccaggaggaggagatggaggaggaggaggaggaggaggagggggaggccggggaggccggggaggccgagagcgagaagggcggggaggagctgctgcccccagagagcacccccatcccagccaacctgagccagaacctggaggccgctgctgccacccaggtggccgtgtctgtgcccaagagaagaaggaagatcaaggagctgaacaagaaggaggccgtgggggacctgctggatgccttcaaggaggccaacccagctgtgcctgaggtggagaaccagcccccagctggcagcaaccctggccctgagagcgagggcagcggcgtgccccccaggcctgaggaggctgatgagacctgggacagcaaggaggacaagatccacaatgctgagaacatccagcctggagagcagaagtatgagtacaagagtgaccagtggaagcccctgaacctggaggagaagaagagatatgaccgggagttcctgctgggcttccagttcatctttgcctccatgcagaagccagagggcctgccccacatcagtgatgtggtgctggacaaggccaacaagacccccctgcggcccctggaccccacccggctgcagggcatcaactgtggccctgacttcacccccagctttgccaacctgggccgcaccaccctgagcacccggggccccccccggggcggccctggaggagagctgccccggggcccccaggccggcctgggccccaggaggagccagcagggccccaggaaggagcccaggaagatcatcgccaccgtgctgatgacagaggacatcaagctgaacaaggccgagaaggcctggaagcccagcagcaagaggacagctgctgacaaggacagaggagaagaagatgctgatggcagcaagacccaggacctcttcagaagagtgcgcagcatcctgaacaagctgaccccccagatgttccagcagctgatgaagcaggtgacccagctggccatcgacacagaggagcggctgaagggcgtgattgacctgatctttgagaaggccatcagcgagcccaacttctctgtggcctatgccaacatgtgccgctgcctgatggccctgaaggtgcccaccacagagaagcccaccgtgacagtgaacttcaggaagctgctgctgaaccgctgccagaaggagtttgagaaggacaaggatgatgatgaggtgtttgagaagaagcagaaggagatggatgaggccgccacagctgaggagcggggccgcctgaaggaggagctggaggaggcccgggacatcgcccggcggcgcagcctgggcaacatcaagttcatcggggagctgttcaagctgaagatgctgacagaggccatcatgcatgactgtgtggtgaagctgctgaagaaccatgatgaggagagcctggagtgcctgtgccgcctgctgaccaccatcggcaaggacctggactttgagaaggccaagcccaggatggaccagtacttcaaccagatggagaagatcatcaaggagaagaagaccagcagccgcatccgcttcatgctgcaggatgtgctggacctgcggggcagcaactgggtgccccggcggggggaccagggccccaagaccatcgaccagatccacaaggaggccgagatggaggagcaccgggagcacatcaaggtgcagcagctgatggccaagggcagtgacaagaggcggggcggccccccaggcccccccatcagccggggcctgcccctggtggatgatggcggctggaacacagtgcccatcagcaagggcagccggcccatcgacaccagccggctgaccaagatcaccaagccaggcagcattgacagcaacaaccagctgtttgcccctgggggccgcctgtcctggggcaagggcagcagcggcggcagcggggccaagcccagtgatgctgccagcgaggccgcccggcctgccaccagcaccctgaaccgcttcagcgccctgcagcaggccgtgcccacagagagcacagacaacagaagagtggtgcagaggagcagcctgagccgggagcggggggagaaggccggggacagaggagaccggctggagaggtctgagcggggcggggacagaggagaccggctggaccgggcccggaccccagccaccaagaggagcttcagcaaggaggtggaggagaggagccgggagcggcccagccagcctgagggcctgaggaaggccgccagcctgacagaagatcgggaccggggcagagatgctgtgaagcgggaggccgccctgccccctgtgagccccctgaaggccgccctgtctgaggaggagctggagaagaagagcaaggccatcatcgaggagtacctgcacctgaatgacatgaaggaggccgtgcagtgtgtgcaggagctggccagccccagcctgctcttcatctttgtgagacatggagtggagagcaccctggagaggtctgccatcgcccgggagcacatgggccagctgctgcaccagctgctgtgtgccggccacctgagcacagcccagtactaccagggcctgtatgagatcctggagctggccgaggacatggagattgacatcccccacgtgtggctgtacctggccgagctggtgacccccatcctgcaggagggcggcgtgcccatgggagagctgttccgggagatcaccaagcccctgcggcccctgggcaaggccgccagcctgctgctggagatcctgggcctgctgtgcaagtccatgggccccaagaaggtgggcaccctgtggagggaggccggcctgtcctggaaggagttcctgcctgagggccaggacatcggggcctttgtggccgagcagaaggtggagtacaccctgggggaggagagcgaggcccctggccagagggccctgcccagcgaggagctgaaccggcagctggagaagctgctgaaggagggcagcagcaaccagagggtgtttgactggattgaggccaacctgtctgagcagcagatcgtgagcaacaccctggtgcgggccctgatgacagctgtgtgctacagcgccatcatctttgagacccccctgcgggtggatgtggccgtgctgaaggcccgggccaagctgctgcagaagtacctgtgtgatgagcagaaggagctgcaggccctgtatgccctgcaggccctggtggtgaccctggagcagccccccaacctgctgaggatgttctttgatgccctgtatgatgaagatgtggtgaaggaggatgccttctacagctgggagagcagcaaggaccctgctgagcagcagggcaagggcgtggccctgaagtctgtgacagccttcttcaagtggctgcgggaggccgaggaggagagtgaccacaactag

SEQ ID NO: 257246 - DNA, 4542 bp, Artificial Sequence
  derived and/or modified sequence
atgatgatccccagccagatctcctacccagccagccagggcgcctactacatccctggccagggccgcagcacctacgtggtgcccacccagcagtaccctgtgcagcccggggcccctggcttctacccaggggccagccccacagaatttggcacctacgccggggcctactacccagcccagggcgtgcagcagttccccactggagtggcccccacccctgtgctgatgaaccagcccccccagatcgcccccaagcgggagaggaagaccatccgcatccgggaccccaaccagggcggcaaggacatcacagaggagatcatgtctggggccaggacagccagcacccccaccccaccccagacaggaggcggcctggagccccaggccaatggagagaccccccaggtggccgtcatcgtgcggccagatgacaggagccagggcgccatcatcgctgaccggcccggcctgcccggccctgagcacagccccagcgagagccagcccagcagccccagccccacccccagccccagccctgtgctggagcccggcagcgagcccaacctggccgtgctgagcatccctggggacaccatgaccaccatccagatgtctgtggaggagagcacccccatcagccgggagaccggggagccctaccgcctgagccctgagcccacccccctggccgagcccatcctggaggtggaggtgaccctgagcaagcctgtgcctgagagcgagttcagcagcagccccctgcaggcccccacccccctggccagccacacagtggagatccacgagcccaacggcatggtgcccagcgaggacctggagcctgaggtggagagcagccctgagctggcccctcctccagcctgccccagcgagagccctgtgcccatcgcccccacagcccagcctgaggagctgctgaatggagcccccagccccccagctgtggacctgagccctgtgtctgagcctgaggagcaggccaaggaggtgacagcctccatggccccacccaccatccccagcgccaccccagccacagcccccagcgccaccagccctgcccaggaggaggagatggaggaggaggaggaggaggaggagggggaggccggggaggccggggaggccgagagcgagaagggcggggaggagctgctgcccccagagagcacccccatcccagccaacctgagccagaacctggaggccgccgccgccacccaggtggccgtgtctgtgcccaagagaagaaggaagatcaaggagctgaacaagaaggaggccgtgggggacctgctggatgccttcaaggaggccaacccagctgtgcctgaggtggagaaccagcccccagctggcagcaaccctggccctgagagcgagggcagcggcgtgccccccaggcctgaggaggctgatgagacctgggacagcaaagaagacaagatccacaatgctgagaacatccagcccggggagcagaagtatgagtacaagagtgaccagtggaagcccctgaacctggaggagaagaagagatatgaccgggagttcctgctgggcttccagttcatctttgcctccatgcagaagccagagggcctgccccacatcagtgatgtggtgctggacaaggccaacaagacccccctgcggcccctggaccccacccggctgcagggcatcaactgtggccctgacttcacccccagctttgccaacctgggccgcaccaccctgagcacccggggccccccccggggcggccctggaggagagctgccccggggcccccaggccggcctgggcccccggcgcagccagcagggccccaggaaggagcccaggaagatcatcgccaccgtgctgatgacagaggacatcaagctgaacaaggccgagaaggcctggaagcccagcagcaagaggacagctgctgacaaggacagaggagaggaggatgctgatggcagcaagacccaggacctcttccggcgggtgcgcagcatcctgaacaagctgaccccccagatgttccagcagctgatgaagcaggtgacccagctggccatcgacacagaggagcggctgaagggcgtcatcgacctgatctttgagaaggccatcagcgagcccaacttctctgtggcctatgccaacatgtgccgctgcctgatggccctgaaggtgcccaccacagagaagcccaccgtgacagtgaacttcaggaagctgctgctgaaccgctgccagaaggagtttgagaaggacaaggatgatgatgaggtgtttgagaagaagcagaaggagatggatgaagctgccacagctgaggagcggggccgcctgaaggaggagctggaggaggcccgggacatcgccaggagaagaagcctgggcaacatcaagttcatcggggagctgttcaagctgaagatgctgacagaggccatcatgcatgactgtgtggtgaagctgctgaagaaccatgatgaggagagcctggagtgcctgtgccgcctgctgaccaccatcggcaaggacctggactttgagaaggccaagcccaggatggaccagtacttcaaccagatggagaagatcatcaaggagaagaagaccagcagccgcatccgcttcatgctgcaggatgtgctggacctgcggggcagcaactgggtgcccaggagaggagaccagggccccaagaccatcgaccagatccacaaggaggccgagatggaggagcaccgggagcacatcaaggtgcagcagctgatggccaagggcagtgacaagagaagaggaggccccccaggcccccccatcagccggggcctgcccctggtggatgatggcggctggaacacagtgcccatcagcaagggcagccggcccatcgacaccagccggctgaccaagatcaccaagccaggcagcattgacagcaacaaccagctgtttgcccctgggggccgcctgtcctggggcaagggcagcagcggcggcagcggggccaagcccagtgatgctgccagcgaggccgcccggcctgccaccagcaccctgaaccgcttcagcgccctgcagcaggccgtgcccacagagagcacagacaacagaagagtggtgcagaggagcagcctgagccgggagcggggggagaaggccggggacagaggagaccggctggagaggtctgagcggggcggggacagaggagaccggctggaccgggcccggaccccagccaccaagaggagcttcagcaaggaggtggaggagaggagccgggagcggcccagccagcctgagggcctgaggaaggccgccagcctgacagaggaccgggaccggggcagagatgctgtgaagcgggaggccgccctgccccctgtgagccccctgaaggccgccctgtctgaggaggagctggagaagaagagcaaggccatcatcgaggagtacctgcacctgaatgacatgaaggaggccgtgcagtgtgtgcaggagctggccagccccagcctgctcttcatctttgtgagacatggagtggagagcaccctggagaggtctgccatcgcccgggagcacatgggccagctgctgcaccagctgctgtgtgccggccacctgagcacagcccagtactaccagggcctgtatgagatcctggagctggccgaggacatggagattgacatcccccacgtgtggctgtacctggccgagctggtgacccccatcctgcaggagggcggcgtgcccatgggagagctgttccgggagatcaccaagcccctgcggcccctgggcaaggccgccagcctgctgctggagatcctgggcctgctgtgcaagtccatgggccccaagaaggtgggcaccctgtggagggaggccggcctgtcctggaaggagttcctgcctgagggccaggacattggagcctttgtggccgagcagaaggtggagtacaccctgggggaggagagcgaggcccctggccagagggccctgcccagcgaggagctgaaccggcagctggagaagctgctgaaggagggcagcagcaaccagagggtgtttgactggattgaggccaacctgtctgagcagcagatcgtgagcaacaccctggtgcgggccctgatgacagctgtgtgctacagcgccatcatctttgagacccccctgcgggtggatgtggccgtgctgaaggcccgggccaagctgctgcagaagtacctgtgtgatgagcagaaggagctgcaggccctgtatgccctgcaggccctggtggtgaccctggagcagccccccaacctgctgaggatgttctttgatgccctgtatgatgaagatgtggtgaaggaggatgccttctacagctgggagagcagcaaggaccctgctgagcagcagggcaaaggagtggccctgaagtctgtgacagccttcttcaagtggctgcgggaggccgaggaggagagtgaccacaactag

SEQ ID NO: 257247 - DNA, 4311 bp, Artificial Sequence
  derived and/or modified sequence
atgaaccagcccccccagatcgcccccaagcgggagaggaagaccatccgcatccgggaccccaaccagggcggcaaggacatcacagaggagatcatgtctggggccaggacagccagcacccccaccccaccccagacaggaggcggcctggagccccaggccaacggggagaccccccaggtggccgtgattgtgcggccagatgacaggagccagggcgccatcatcgctgacaggcctggcctgcccggccctgagcacagccccagcgagagccagcccagcagccccagccccacccccagccccagccctgtgctggagcccggcagcgagcccaacctggccgtgctgagcatccctggggacaccatgaccaccatccagatgtctgtggaggagagcacccccatcagccgggagactggagagccctaccgcctgagccctgagcccacccccctggccgagcccatcctggaggtggaggtgaccctgagcaagcctgtgcctgagagcgagttcagcagcagccccctgcaggcccccacccccctggccagccacacagtggagatccacgagcccaacggcatggtgcccagcgaggacctggagcctgaggtggagagcagccctgagctggcccctcctccagcctgccccagcgagagccctgtgcccatcgcccccacagcccagcctgaggagctgctgaatggagcccccagccccccagctgtggacctgagccctgtgtctgagcctgaggagcaggccaaggaggtgacagcctccatggccccacccaccatccccagcgccaccccagccacagcccccagcgccaccagccctgcccaggaggaggagatggaggaggaggaggaggaggaggagggggaggccggggaggccggggaggccgagagcgagaagggcggggaggagctgctgcccccagagagcacccccatcccagccaacctgagccagaacctggaggccgctgctgccacccaggtggccgtgtctgtgcccaagagaagaaggaagatcaaggagctgaacaagaaggaggccgtgggggacctgctggatgccttcaaggaggccaacccagctgtgcctgaggtggagaaccagcccccagctggcagcaaccctggccctgagagcgagggcagcggcgtgccccccaggcctgaggaggctgatgagacctgggacagcaaggaggacaagatccacaatgctgagaacatccagcctggagagcagaagtatgagtacaagagtgaccagtggaagcccctgaacctggaggagaagaagagatatgaccgggagttcctgctgggcttccagttcatctttgcctccatgcagaagccagagggcctgccccacatcagtgatgtggtgctggacaaggccaacaagacccccctgcggcccctggaccccacccggctgcagggcatcaactgtggccctgacttcacccccagctttgccaacctgggccgcaccaccctgagcacccggggccccccccggggcggccctggaggagagctgccccggggcccccaggccggcctgggccccaggaggagccagcagggccccaggaaggagcccaggaagatcatcgccaccgtgctgatgacagaggacatcaagctgaacaaggccgagaaggcctggaagcccagcagcaagaggacagctgctgacaaggacagaggagaagaagatgctgatggcagcaagacccaggacctcttcagaagagtgcgcagcatcctgaacaagctgaccccccagatgttccagcagctgatgaagcaggtgacccagctggccatcgacacagaggagcggctgaagggcgtgattgacctgatctttgagaaggccatcagcgagcccaacttctctgtggcctatgccaacatgtgccgctgcctgatggccctgaaggtgcccaccacagagaagcccaccgtgacagtgaacttcaggaagctgctgctgaaccgctgccagaaggagtttgagaaggacaaggatgatgatgaggtgtttgagaagaagcagaaggagatggatgaggccgccacagctgaggagcggggccgcctgaaggaggagctggaggaggcccgggacatcgcccggcggcgcagcctgggcaacatcaagttcatcggggagctgttcaagctgaagatgctgacagaggccatcatgcatgactgtgtggtgaagctgctgaagaaccatgatgaggagagcctggagtgcctgtgccgcctgctgaccaccatcggcaaggacctggactttgagaaggccaagcccaggatggaccagtacttcaaccagatggagaagatcatcaaggagaagaagaccagcagccgcatccgcttcatgctgcaggatgtgctggacctgcggggcagcaactgggtgccccggcggggggaccagggccccaagaccatcgaccagatccacaaggaggccgagatggaggagcaccgggagcacatcaaggtgcagcagctgatggccaagggcagtgacaagaggcggggcggccccccaggcccccccatcagccggggcctgcccctggtggatgatggcggctggaacacagtgcccatcagcaagggcagccggcccatcgacaccagccggctgaccaagatcaccaagccaggcagcattgacagcaacaaccagctgtttgcccctgggggccgcctgtcctggggcaagggcagcagcggcggcagcggggccaagcccagtgatgctgccagcgaggccgcccggcctgccaccagcaccctgaaccgcttcagcgccctgcagcaggccgtgcccacagagagcacagacaacagaagagtggtgcagaggagcagcctgagccgggagcggggggagaaggccggggacagaggagaccggctggagaggtctgagcggggcggggacagaggagaccggctggaccgggcccggaccccagccaccaagaggagcttcagcaaggaggtggaggagaggagccgggagcggcccagccagcctgagggcctgaggaaggccgccagcctgacagaagatcgggaccggggcagagatgctgtgaagcgggaggccgccctgccccctgtgagccccctgaaggccgccctgtctgaggaggagctggagaagaagagcaaggccatcatcgaggagtacctgcacctgaatgacatgaaggaggccgtgcagtgtgtgcaggagctggccagccccagcctgctcttcatctttgtgagacatggagtggagagcaccctggagaggtctgccatcgcccgggagcacatgggccagctgctgcaccagctgctgtgtgccggccacctgagcacagcccagtactaccagggcctgtatgagatcctggagctggccgaggacatggagattgacatcccccacgtgtggctgtacctggccgagctggtgacccccatcctgcaggagggcggcgtgcccatgggagagctgttccgggagatcaccaagcccctgcggcccctgggcaaggccgccagcctgctgctggagatcctgggcctgctgtgcaagtccatgggccccaagaaggtgggcaccctgtggagggaggccggcctgtcctggaaggagttcctgcctgagggccaggacatcggggcctttgtggccgagcagaaggtggagtacaccctgggggaggagagcgaggcccctggccagagggccctgcccagcgaggagctgaaccggcagctggagaagctgctgaaggagggcagcagcaaccagagggtgtttgactggattgaggccaacctgtctgagcagcagatcgtgagcaacaccctggtgcgggccctgatgacagctgtgtgctacagcgccatcatctttgagacccccctgcgggtggatgtggccgtgctgaaggcccgggccaagctgctgcagaagtacctgtgtgatgagcagaaggagctgcaggccctgtatgccctgcaggccctggtggtgaccctggagcagccccccaacctgctgaggatgttctttgatgccctgtatgatgaagatgtggtgaaggaggatgccttctacagctgggagagcagcaaggaccctgctgagcagcagggcaagggcgtggccctgaagtctgtgacagccttcttcaagtggctgcgggaggccgaggaggagagtgaccacaactag

SEQ ID NO: 257248 - DNA, 4803 bp, Artificial Sequence
  derived and/or modified sequence
atgaacaaggccccccagagcaccggccccccccccgcccccagccctgggcttccccaacccgccttccctcctggccaaaccgccccagtggtgttttctaccccacaagccacccagatgaatacgccatcacaacctaggcaacacttctatccatctcgcgcccaacctcccagctcagccgcatcaagagtacagagcgctgcccccgcccgacctgggcctgccgcacatgtctaccccgccggaagccaggtgatgatgattccgagccagatcagttatcccgcatctcagggagcgtattacattcctggtcagggcagatccacatacgtagtgcccactcaacagtaccccgtccagcccggtgcccccggcttttatccaggtgctagcccaacggaatttggaacatatgccggtgcttactatcccgcgcagggagtccagcaatttcccaccggcgtggcaccaacccctgtgctgatgaatcagccacctcagatcgcaccaaagagggagcggaaaacaatccgaatccgggaccctaaccagggcgggaaagacattacagaggaaataatgtccggcgcccgaaccgcctcgacgccaacgccacctcaaaccggaggaggactcgagccccaagcgaatggggaaacgcctcaggtcgctgtaatcgttagacccgatgatcggagccagggagctatcatcgccgacagaccaggtctgccagggcctgaacattcacctagtgaatctcagccctcttcgcccagtcctaccccttctccaagccctgtccttgaacctgggagtgaaccgaacctggccgtactctctatccctggagatacgatgactactattcagatgtcagtggaggagagcactcccatttctagagagactggcgagccctatcggctgtctcctgaaccgacaccactagcggaacccattctcgaagtggaggttaccctgtcaaagccagtgccggagagtgagttctcatcctccccacttcaggcgcctacccctctcgccagccacacagtggaaattcacgagcctaacggcatggtgcctagcgaggacctggagcctgaggtcgagtcctcccccgaactagcccctccacctgcctgcccatctgaaagccccgtgcccatagcccctactgcccagccagaggagctgctgaacggggcaccttccccccctgcggtggacctgagccctgtaagcgagcctgaagaacaagccaaggaggtgacagcctcgatggcccccccaacaatccccagtgctacacctgctactgccccctcagcaacgtcaccagctcaggaagaggaaatggaggaagaggaggaggaagaggagggcgaggctggtgaagctggcgaagccgaatctgagaagggcggggaggagctattacctccagagagtacccccatccctgcgaatctgagccagaacctagaagctgccgcagccacacaggtggctgtgtccgtgccaaaaagacgccgcaaaattaaagagctgaacaagaaagaggcagtgggggacctgctagatgccttcaaagaggctaaccccgccgttccagaggtggagaatcaaccccccgcggggtccaaccccggtccagaaagcgaggggtccggtgtaccaccacgtcctgaggaagctgacgaaacatgggattcaaaggaagacaaaatacacaacgccgagaacatccaaccgggtgagcagaaatacgagtacaaatccgaccaatggaagccgttaaatctggaggagaaaaagagatacgacagggaattcttgctgggattccagttcatcttcgccagcatgcaaaaacccgagggactgccacacatcagcgatgtcgttctggacaaagccaacaagacacccctcaggcccctagacccaacccgcctgcagggtattaactgtggtcccgatttcacaccttctttcgcaaatctgggtcgcacaacattatctaccagaggacccccccgaggaggacccggaggcgagctgccaaggggaccccaggctggactaggacccagacgttcccagcagggccccaggaaagagcctcgaaagatcatagccaccgtgctcatgacagaggacatcaagttaaataaagccgagaaagcttggaagccctcgagcaaaaggacggccgcagataaagatcgtggcgaggaagatgccgacggttctaaaacccaagatctgtttcgacgtgtacgaagcattctcaacaagctgacaccgcagatgtttcagcagctgatgaagcaggttactcagctggccattgataccgaggagcggctgaagggagtgatcgacttaatttttgagaaggccatctctgaacccaacttctccgtggcttacgctaatatgtgtcgatgcttgatggcactgaaagtgccaactaccgaaaaacccacggtgacggtgaatttccggaaactactgcttaatcgatgccaaaaggaattcgaaaaagataaggatgatgatgaagtgttcgaaaaaaaacagaaagaaatggacgaagccgccaccgctgaggaacgagggagactgaaggaggaactagaggaggcccgggatattgctagacggaggtccctgggaaatattaagtttatcggcgaactctttaagctcaaaatgttaaccgaagccatcatgcacgattgcgtggtgaagctgctgaaaaatcacgacgaagagagccttgagtgtctttgtaggctgctgacgacaatcggcaaagacctagatttcgagaaggcaaaacctcggatggatcagtattttaatcagatggaaaagataataaaggaaaaaaaaacaagctcacggattagatttatgctacaggacgtgctcgatctgcggggttccaattgggttcctaggaggggtgatcagggccctaaaacaattgatcagattcacaaggaggctgaaatggaggagcaccgcgagcacatcaaagtgcagcagctgatggccaaaggctccgataaaaggcgtggaggacctcccggcccgccaatctctagagggttgccactggtggacgacggcggatggaacaccgtgccgattagcaaaggttctcggcccatcgacacatctcgtttgacaaaaatcacaaagcctggctctatcgatagtaacaaccaactgttcgcacccggtggccgtctcagttggggcaaagggtcctccggtggtagcggggcgaaaccatccgacgctgcatccgaggcggcgagacccgccactagcaccctcaaccggttttccgctttgcagcaggccgtgccgactgaaagcactgacaacaggagagtagtccaacgtagttctttaagcagggaaaggggagagaaagccggggatagaggggaccgcttggagcgatccgagcgcgggggggacaggggggaccgactggatcgtgctcgcacgcctgcaacaaagcgcagtttcagcaaagaagtggaggagcgttcaagagaaaggccatcccagcctgaaggattacgaaaggctgcctctctgaccgaggaccgagaccgcgggagggacgcagtgaaacgcgaagccgcgttgcccccagtgtcgccactgaaggccgcactcagcgaggaagagctggaaaagaaaagcaaggctattatcgaggaatacctccacctcaatgatatgaaggaggccgtccaatgcgttcaggagctcgcatctccatctctgctgtttatctttgtgcgacacggtgtggagtcaaccctggagcggagtgccatcgcccgggaacacatgggacagctgctgcatcagctattatgtgccggccatctatctactgctcaatattatcaagggctctatgaaatccttgagttggctgaggacatggagatagacatccctcatgtttggctatacctggctgaactcgttaccccgatcctgcaagaagggggtgtgcctatgggagagctgttcagagaaataacaaagccgttgcgtccactcgggaaggctgcctccctcctgctggagatcctggggctgctgtgcaagtctatggggcccaagaaagtcggaaccctgtggcgcgaggccggcctgtcatggaaagagttcctgcccgaggggcaggacataggagcatttgtcgctgagcagaaagtggagtacaccttaggggaggagagcgaggcccccggccagcgtgcattgccgagcgaggaactgaatcgccagcttgagaaactactgaaagagggctccagtaatcagagggtcttcgattggatcgaagccaatctgtccgagcagcaaatcgtgagcaacacactggtcagggctctgatgacagctgtgtgttacagcgcgattatctttgagactccgctgagggttgacgttgccgtcttgaaggcacgtgccaaactgctgcaaaaatatctgtgtgacgagcaaaaagaactccaagccctctatgcactgcaggcattagtcgtgaccttagagcaaccacccaatctacttcgaatgttcttcgatgccctgtacgacgaagatgttgtaaaagaggacgctttctattcttgggagagttctaaagaccctgctgaacagcaaggaaaaggggttgccttgaagtcagtcacagctttcttcaaatggcttagggaggccgaggaggaaagtgatcacaactag

SEQ ID NO: 257249 - DNA, 4683 bp, Artificial Sequence
  derived and/or modified sequence
atgaacacccccagccagccccggcagcacttctaccccagccgggctcaaccaccatcttccgccgcatctagggtgcagtccgctgctcccgcccggcctggtccagctgcccatgtttacccagccgggtcccaggtgatgatgattccttcccagatcagttaccccgcatcccaaggggcttactacattccaggccaagggcgcagtacttacgtagtgccgacacagcagtatcctgtgcagcctggagcccccggtttctacccaggggcgagtcccaccgagtttggaacctatgctggcgcatattaccctgctcagggagtacagcagtttcctaccggcgtcgcccccacccccgtgttaatgaatcaaccaccacaaattgctcccaaaagagagcggaaaacaattcgaattcgggatccaaaccaaggggggaaagacatcaccgaggaaattatgtccggggcaagaaccgccagtactcccacaccaccccagaccgggggaggactggagccgcaggcgaacggagagacccctcaggtggccgtgatagtcagacccgatgatagatcacagggtgctattattgccgaccggccgggccttccgggaccggagcactccccaagcgaaagccagccatcaagtccatcccctaccccaagtcctagcccggtgcttgaacctggctctgagcccaatctggcagtgctgtccataccaggcgacacaatgactacgattcagatgagcgtggaagaaagcactccaatcagcagggagactggtgaaccatacagactgtctcctgaaccaactccccttgctgaaccgatactggaagtagaagtgacactctctaaacctgtccctgaaagcgagttttcctcttccccactccaggcacccaccccactggcttctcacaccgtcgaaatacacgagccaaacggaatggtcccatccgaggacctggagcctgaagtggaatccagtccagaactcgcaccaccacccgcttgtccaagcgaatcccctgtccccatcgcccccactgcccagcctgaggagctattgaacggcgccccttctccacctgccgtagacctgagtcctgtctctgagcctgaggaacaggccaaggaagttacagctagtatggccccacctacgattccctctgccacccccgctactgcacccagtgctacaagccccgcccaggaggaagagatggaggaggaggaagaagaggaggagggggaagcgggggaggccggagaagcagagtctgaaaaaggaggcgaggagctgttgccgcccgagagcacccccatacccgccaatttaagccagaatctggaggccgcagctgcaacgcaagtggcagtgagcgttcctaaacggaggcggaaaatcaaggaactcaataagaaagaggcagtgggggatttgttagacgcatttaaggaagcaaaccctgccgtcccagaggttgaaaaccaaccgccagccggttcaaatcctggaccggagagcgagggatctggcgttcctccacgaccagaggaggcagacgagacctgggattctaaggaagacaagatacacaacgcagagaatattcagcccggcgaacagaagtatgagtacaaatccgatcagtggaagcctctaaatttggaagagaagaagcggtacgatcgagaattcctcctgggatttcagttcatttttgcctcaatgcagaagcctgaaggcttaccacacatctctgacgttgtgctcgataaggccaataaaactcccctgaggcctctggacccaacaaggctccagggcatcaattgtgggccggacttcacaccaagcttcgctaacttgggtaggactaccctcagtacacggggacctccacggggcggacccggcggagaactgcctcgtggtccccaagcggggcttggccctagacggagtcaacagggcccccggaaagagcctcggaaaatcattgcgaccgtgttgatgactgaggacatcaaactgaataaggctgagaaggcctggaagccctcctccaaaagaactgccgccgacaaagacaggggagaggaggatgccgacggcagcaagacccaggatctgtttagaagagtaaggtccatcctcaataaattgacccctcaaatgtttcagcagcttatgaaacaggtgacccagctggcgattgatactgaggaaaggttaaaaggcgttatcgatttaatttttgaaaaagcaatttcagagccaaatttcagcgtagcttacgcaaatatgtgtaggtgtctgatggccctgaaggtgccgacaaccgaaaagcccactgttacggtgaacttccggaaacttctgttgaacaggtgccagaaagagtttgagaaggacaaggacgatgatgaggtgtttgaaaaaaagcagaaggaaatggacgaagcagctacagccgaggaacgagggaggctgaaggaggagctggaagaagcgcgggacattgcgcgccggcgtagtctgggcaatataaagttcattggcgagttgtttaaactgaaaatgttaaccgaggccatcatgcacgattgtgttgtgaaattactcaaaaaccatgacgaagaaagtctggagtgcctctgcaggcttctcactaccatcggaaaagacctcgattttgagaaagcaaaacccagaatggaccagtatttcaaccagatggagaaaattatcaaagaaaagaagacttctagcagaatccgttttatgctgcaggacgtcctagacctgagaggatctaactgggtgcccagacgaggcgaccagggccccaagacgatcgatcaaatccataaagaagccgagatggaggagcacagagaacacattaaagtccagcagctcatggcaaaggggtctgataagcggcgtggagggccccccggacctccaattagtagaggcttgcccctagtggacgacggaggatggaacacagtgcccattagtaagggctctcgtcctatcgacacctctcggctcaccaagattacgaaacccggatccattgactctaataaccagctgtttgcgccgggaggacggctgagttggggtaaaggttcttcaggcgggtctggtgccaagccaagcgatgccgccagtgaagccgccagacccgcaacctctacattgaaccggttttccgccctgcagcaagcagttccaaccgaatcaaccgataataggagagtcgtgcagagaagtagcctctctagagaaaggggggagaaggcaggtgataggggggaccggcttgagcgcagcgagcgaggcggcgataggggggataggctcgatagagcccgcacacctgctaccaagaggagcttctcaaaagaagtcgaggagagatcacgggagcgcccgagtcagcctgagggactgcggaaggccgcgtccctgacggaggatagggaccgagggagggacgcggtcaagagagaggccgcactgccccccgtaagtccactcaaggctgccctgagcgaggaggagctcgagaaaaaatccaaggcaatcattgaagaatacctccatcttaacgatatgaaagaagcagtccaatgtgtacaagaactggcctcaccctcccttttattcatattcgtcagacatggagtcgagtcgacacttgagagatccgcgatcgccagggaacacatgggccaactgctgcaccagctcctctgcgcaggacatctctcaactgcccagtactaccaaggactttatgaaattcttgagctggcggaagacatggagatcgacataccgcacgtctggttatatttggctgaattggtgacccccattcttcaggaggggggagtgcctatgggagagctgtttagagagattacgaagcccctccggcctcttgggaaagccgccagcctcttattagagattctagggctgctgtgtaaatccatggggccaaaaaaggttggcactctgtggcgagaggcaggcttgagctggaaggagttccttcctgaggggcaggacattggtgcgttcgtagccgagcagaaagtggaatacaccctgggcgaagagtccgaggctccaggccaacgcgctctgcctagcgaagagctgaatcgacagctagaaaaactgctaaaggaggggtcctcaaaccagagggtgttcgactggattgaagctaatttatctgaacagcagattgtttccaatacactagttcgcgcactcatgacagcagtgtgctattccgccatcattttcgagaccccactgcgggtcgacgtggcggtcctgaaggctcgagctaagctactccagaagtacctgtgcgatgagcagaaggagttacaggccctgtatgctctgcaggccctggtggttaccctcgagcaaccccctaacctgttacgaatgtttttcgacgccctgtatgacgaagacgtggtcaaggaagatgccttttattcctgggagtctagtaaggacccagctgaacaacaagggaagggggtggccctgaaaagtgtaaccgcttttttcaagtggctgcgggaagctgaagaggagagtgatcacaattag

SEQ ID NO: 257250 - DNA, 4542 bp, Artificial Sequence
  derived and/or modified sequence
atgatgatccccagccagatcagctaccccgccagccagggcgcctactacatacccggccaggggaggtccacgtacgtggtcccgactcagcagtaccccgtgcagcccggcgccccaggattttaccctggcgcctcccccaccgagtttggaacgtacgcaggcgcatattatcctgctcagggcgtccagcagttcccaactggcgtggccccaacaccagtgctgatgaaccaaccacctcagattgcccctaaacgcgagcgaaaaactatccgcattcgagatcccaaccaaggcggcaaagatatcactgaggaaatcatgtcgggtgcccgtacggccagcaccccaacaccccctcagaccggaggagggctagaaccccaggccaacggcgaaaccccacaagtggccgtcatcgtgcggccggacgacagaagccagggtgctatcatagccgatcgccctggcctaccagggcctgaacatagtccaagtgagagtcagccaagcagccctagccctacccctagtccctcgcccgtactcgagccagggtccgaacccaacttggctgtgttatctattcccggggacacgatgaccactatccagatgtccgtggaggaatctactcctatctctcgagagacgggcgagccttatcggctgtcgccagaacctactcccctggccgagccaattcttgaggtggaagtcactcttagcaagcccgttccagagagcgaatttagcagttcaccgctgcaggcaccgaccccgctcgcaagccataccgtggaaatccacgagccgaatgggatggtgccgagcgaagatctggaacctgaggttgaatcatctccagagcttgccccccctcctgcttgccccagcgaatcccccgtccccatagcccctaccgcacagcccgaggaactcctgaacggcgctccgtcaccgcccgcggtggacctatcaccagtcagcgaaccagaagaacaggccaaagaggtgacagcatctatggcacctcccactataccctcagctacccccgctactgctccgtccgcaacctctccagcccaggaggaggagatggaagaagaggaagaagaggaagagggcgaggctggggaagctggggaggccgagtcagagaaggggggggaggaactcctcccgccggagtcgacaccaatcccagcaaatttgagtcagaatctggaagccgccgctgccactcaggtcgccgtgagcgtgcccaaacggcgcagaaagatcaaggagttgaacaaaaaagaagctgtaggagaccttctggacgcctttaaagaagcaaatcccgccgtgcccgaagtggagaaccagccacctgcaggctctaaccctgggccagaatctgaaggctccggtgtaccgcctcgacctgaagaggcggatgagacctgggactccaaagaggataagatccacaatgcagagaatatacagccaggagagcagaagtacgaatataagtcagaccagtggaagccgctgaacctagaggaaaaaaaacgatacgatagggaattcctgctgggctttcagttcattttcgctagtatgcaaaaacccgagggcctgccccatatctccgacgtcgtcctggacaaggcaaataagacccctctccgccccctggaccctacacgtttgcaggggattaattgcgggcctgatttcacaccttcattcgccaatctggggcggactaccctctctacccgcggacccccccgcgggggaccaggtggggaattgccccgaggtcctcaggccggcctcggacccagacgatctcagcagggtccgaggaaggaacccagaaaaatcatcgccacggtgctgatgaccgaggatattaagctgaacaaggctgagaaagcctggaagcctagtagtaagcggacagccgccgacaaagataggggcgaggaagatgcagatgggagtaaaactcaggatcttttccggcgggtgcggagcattctgaacaaacttactcctcagatgttccagcagttaatgaagcaagtgacgcagctggccatcgacacagaggaacgtctgaagggagtaatcgatctcattttcgagaaagctataagtgagccgaacttctcagtggcctacgcaaatatgtgtcggtgtctgatggctctcaaggttccaacaacagagaaaccaacagtgaccgtaaacttcagaaaactgctcctcaaccgctgtcaaaaggaattcgagaaggacaaggatgatgacgaggtgtttgaaaagaagcagaaagaaatggacgaggctgccactgctgaagaaagagggcgcctgaaggaggaattagaagaagcccgagacatcgctcgcaggagatcattagggaatataaagtttataggggagcttttcaagttaaaaatgctgacagaagcaatcatgcacgactgtgtagtcaagcttctgaagaatcatgacgaggagagcctggagtgtctgtgtaggttattgaccactatcgggaaggatctggactttgagaaagcaaagcctcgtatggaccagtactttaaccagatggaaaagatcatcaaggagaagaaaacaagctccagaattagattcatgctccaagatgtgctagatctccgggggagcaactgggtacctaggaggggagaccagggccccaagacgattgatcaaatacataaagaagcagagatggaagaacacagagaacacatcaaggttcaacaacttatggctaaaggttctgataagcgacgtggcggccctccaggacccccaatctcaaggggtcttcctctggtggatgacggtggctggaatacagtgccgatctcaaagggctctcgccctatcgacacatctagacttacgaagatcactaagcccggttcaatcgatagcaataaccagttatttgcacccggtgggcgcctcagttgggggaaaggaagttccggcggttccggggcaaagccaagcgacgcggcatctgaggccgccagacccgccacctcaaccctgaatcgattttccgccctccaacaggctgtacctactgagagcaccgataataggcgagtagtgcagaggtcatcactatctagggagaggggcgagaaagcaggcgatcgaggggacaggctggaacgatctgaaaggggaggagaccgcggggatcggctggaccgtgctcgaaccccggccaccaagagatctttctcaaaggaagtggaggaaagatctcgagagcggccttctcagccagaaggcctgcggaaggcggcctctcttactgaggatagagaccgtgggagggacgcggtgaaaagggaagcagccttgccacccgtgagtccattgaaggcagccctgagtgaggaggaactggaaaagaagtccaaggcaattatcgaagagtatcttcatctaaacgacatgaaggaagccgttcaatgcgtgcaggaactggccagtcctagtctgctgtttatcttcgtccggcatggcgtcgaatccacgctggagcggtctgctatagcgcgggaacacatgggccaactgctgcaccagctcttgtgtgcagggcacctttcaaccgcacaatattaccaaggcttatatgaaatccttgagctcgccgaagatatggagattgacattccacatgtttggttatacctggccgagttggtgacacccattctgcaagaaggtggcgtacccatgggcgagcttttccgcgaaatcactaaaccgctgcggcccctgggtaaggctgccagtctgctcttggaaatcctcggtctcctctgcaaaagtatgggccctaagaaggtggggactctgtggagggaggcaggcctaagctggaaggaattccttccagaaggccaggatatcggagcttttgtggcagagcagaaggtagaatacaccctgggggaagagagcgaggcacctggccagagggcgctccctagcgaagagctcaaccgccagttggaaaagctactgaaagaaggcagcagcaaccaaagggtctttgactggatagaagctaatctgagcgagcagcagatcgttagtaatactctagtgagggccctgatgacagccgtctgctactccgcaatcatttttgaaaccccccttagggtggatgtggccgtgctgaaggcccgggccaaactgctgcagaaatacctctgcgacgagcagaaggagctgcaggcgctgtatgccctccaagccctcgtcgtaactctcgaacagcctcctaacttgttaaggatgttcttcgatgctttatatgacgaagacgtcgtaaaggaggacgcgttctactcttgggagagcagcaaggatccagccgagcaacagggaaaaggtgtggctcttaaaagcgtcaccgcttttttcaaatggctcagggaggccgaggaagagagcgatcacaattag

SEQ ID NO: 257251 - DNA, 4311 bp, Artificial Sequence
  derived and/or modified sequence
atgaaccagcccccccagatcgcccccaagcgggagcggaagaccattaggattcgcgaccctaaccagggggggaaagatataaccgaggaaattatgtccggtgccaggacggcgtccacaccaacaccccctcagacggggggaggactggagccccaggcaaacggggagacccctcaggtggctgtgatcgtaagacctgacgaccgttctcagggtgcaattattgccgatcggccggggctgcctggaccggaacattccccttctgagagccagcctagctccccatcaccgactccaagcccatcccccgttctggagcccggatcagaacccaatctggcggtgctgtccatcccgggagataccatgaccacaatccagatgtccgtggaggaatccaccccgattagtcgcgaaaccggcgagccttataggcttagtccagagccgacaccccttgccgagcccatactggaagtagaggtcactctttcaaaaccagtgcccgagtccgagttcagttccagccccctacaggcacctactccgcttgcgtcccatactgtggaaattcatgagccgaacggaatggtacctagcgaggacctggagccagaggtggagagttcccctgaactggcccccccaccggcatgcccgagtgaatcacctgttcctatcgctcccactgcccaacccgaggagctgttgaatggggccccgtcacctccagctgtcgacctgagtcctgtctcggagcctgaagagcaggctaaggaagtcacagcctctatggcgccgcctactattccaagtgccactcccgccactgctccaagcgcaaccagcccagcccaagaagaggagatggaagaggaggaagaagaggaggaaggggaggccggggaggctggcgaagcagagagcgaaaaagggggcgaggagttgctcccacccgaatctacacccatccccgccaatcttagccagaacctcgaggccgctgcggcgacccaggtggccgtgagcgtgcctaaacggaggcggaagataaaggagttgaataaaaaggaggccgtgggggatctcttggatgccttcaaggaggcaaatccagccgttccagaagtcgagaatcagccccctgctggttcgaaccccggacccgagtcggaaggatccggggtcccgccgaggcctgaggaggctgacgagacatgggacagtaaagaagataagatccacaacgcagagaatatccaaccaggagaacagaaatatgagtataaaagcgaccagtggaaacctctgaaccttgaagaaaaaaagcgctatgatagagaattcttacttggttttcaattcatctttgcatcaatgcagaaacctgagggtctgcctcatatctcagatgtcgtgttggacaaagcgaataagactcctctgcggccactcgacccgacccggcttcaggggattaattgtggtcctgacttcaccccatccttcgcaaacctggggagaaccacactttcaacgcgcggtccaccaagaggcggtccgggaggcgagctgccccgggggccacaggctggcctaggaccacgccgatctcagcagggccctagaaaagagccgagaaagatcatcgcgacggtcctgatgacggaagacatcaaacttaataaggctgagaaagcctggaagccttcttccaagcgaacagcggcggacaaggacagaggggaggaggatgcagacggctctaaaacacaggatctgtttagaagagtgagaagcatactgaacaaactgacacctcagatgttccagcagctcatgaaacaagtgactcagctggctatcgataccgaagaacgtctgaagggagtgatcgacctgatcttcgagaaggccatcagtgagcctaacttctctgtggcatatgctaatatgtgtaggtgtctcatggccctgaaggtcccaacaaccgagaaacctacagtaaccgtaaactttagaaaactcttattgaacagatgtcaaaaagagtttgaaaaagataaggatgatgatgaagtcttcgagaagaagcaaaaagaaatggatgaagctgcgactgctgaagaaaggggccgcttaaaggaggaactggaggaggcacgtgacatagcaaggcgtcgcagcctgggcaatattaaattcataggagaattattcaagctgaaaatgctaactgaggcgataatgcacgattgcgtcgtgaaactcctaaagaatcatgatgaagaatccttggagtgcctgtgccgcctcctgacgactattggcaaagatcttgactttgagaaggctaaacctagaatggaccagtacttcaaccagatggaaaagataatcaaagaaaagaaaaccagctcgcgaattcggttcatgcttcaggacgttctagacctgcgaggtagcaactgggtgccccgtcggggagatcaaggaccaaagacaatcgatcagattcacaaagaagccgagatggaagaacacagagaacatatcaaggtccagcagctaatggccaaagggtctgacaaaagacggggcgggcctccgggaccccctatatcgcggggcctgcctctcgtcgacgacggtggatggaataccgttccaatctctaagggctcaaggcccatcgataccagtagactgacaaagatcacaaagcctggcagcattgacagtaataatcagctgttcgcccccgggggacggctcagttggggtaaaggctcctctgggggctccggggccaaaccttccgacgcagcaagcgaggcagcccggcccgccacctccactctgaaccggtttagtgcactgcaacaggcagtgcctacggaatccacagataaccggcgtgtggtgcaacgtagcagcctgagtagggagcgaggtgagaaagctggcgaccgtggagatagacttgaacgcagtgaaagaggaggagatcgcggcgataggctcgatcgcgctcgtactcccgctactaagagatctttcagcaaggaggtggaggagcgaagtagagagcgacctagtcagcctgagggcctgagaaaagctgcgagtctgactgaagaccgcgacaggggccgtgatgcggtgaaacgtgaggcagcattgccgccagtttcaccactcaaggccgccctctcagaagaggaactggaaaaaaaatccaaagcaatcatcgaggaatatctgcacctgaatgacatgaaggaagccgttcaatgtgtacaggaactggcctcacccagtctgttgttcatatttgtgcgacatggagtggagagtaccctagaacgatctgccattgctcgggaacatatgggccagctcctacatcagctgttgtgtgccggccacctgtctacagcacagtattaccaggggctttacgagatcttggagctggctgaggacatggaaatcgacatcccacatgtctggctctatttggccgaattggttacacccatcctccaagagggcggcgtgccgatgggggaactctttcgtgagatcacgaagcccttaaggccattgggaaaggccgcctctcttctgctggaaattctgggcctactttgtaagtctatgggaccaaaaaaggtggggacgctctggcgggaggccggtttgtcatggaaggagttcctgccggaaggccaggatataggagcattcgtggctgaacagaaggtcgaatatacactcggggaggaaagtgaagctccagggcagcgggccctccccagcgaggagctcaataggcagctggagaagctgctgaaagagggctcttctaatcagcgagtcttcgattggatcgaagctaacctgtccgaacagcagatcgtgtctaacactttagtaagggctttgatgaccgctgtgtgttatagcgccataatcttcgagacacccttacgggtcgatgtcgccgtgctgaaggcaagggcaaaactgctccagaaatacctgtgtgacgagcagaaggagctccaggccctgtatgcattgcaggctctggtggtgactctcgagcagccccctaatttgctccgaatgttcttcgatgctctgtacgacgaggacgtcgttaaggaggacgccttttactcctgggagtcctccaaggatccggccgagcagcaaggcaagggggtggctctcaagtcagtgaccgcatttttcaaatggcttcgcgaggctgaggaagagtcagaccataactag

SEQ ID NO: 257252 - DNA, 4803 bp, Artificial Sequence
  derived and/or modified sequence
atgaataaagcccctcagagcaccgggccaccccctgcaccatctccagggcttccccagcctgcgttcccacctgggcagacagcaccggtggtgttctccacaccacaggccactcagatgaacacaccgagccaacccagacagcatttttatcctagtcgggctcagcctccatccagtgctgcttcgagggtccagtctgccgctcctgcacggccaggccctgccgcacacgtgtatcctgcaggcagtcaggttatgatgattccttcacagatctcttatccggcatcccagggggcttattacatacccggacaggggagatccacttatgtggtaccgactcaacagtatcctgtgcagccaggggcaccagggttctatcctggcgcttctcccaccgagtttggtacttacgccggagcctactatccagcacaaggagtacagcaattccccacaggggtcgctcccacgcccgttctaatgaaccagcctcctcagatcgcacccaaacgcgaacggaaaacaattaggatacgtgaccccaatcagggcggtaaggatatcacagaagaaatcatgagcggcgcaagaacggcctccactcccacccctcctcagaccgggggtggattggaacctcaagccaatggggagacaccacaggtggccgtgattgtgcggccagatgaccgcagtcagggcgctatcattgccgacaggccaggattacctggacccgagcacagccctagcgaatctcagcccagctcccccagccctaccccttcaccctcccctgtgctcgaacccggtagcgagcctaatctggctgtgctctcaatccccggagacaccatgaccactatccaaatgagcgttgaggaatcaactcccatttcccgtgaaaccggtgaaccctatcgactctcgcctgagcccacacctttagctgagcctatcttagaagtggaagtgacccttagtaagcccgtacccgaaagtgagttctcatcatcccctctgcaggcccctacccctctcgcaagccacaccgtcgaaatccacgagccaaatgggatggtgccttctgaggatctagaaccagaagttgaatctagtccagagttggctccgcctccagcctgtccttcggaaagtcccgtcccaatagcacccaccgcccagcccgaggagctgctgaacggtgcccctagcccgccagcagtggacttatccccagtgagcgaacccgaagagcaagcaaaggaggtgaccgcgagtatggcacctcccactattccgtctgcaacgcctgctacagccccaagcgcgaccagccctgcccaagaagaagaaatggaggaagaagaggaggaagaggaaggagaagccggagaagccggagaggccgagtcagaaaagggcggtgaggaacttctgcctccggagtctactccgatcccggctaatttgtcgcagaacctcgaagctgccgcagcaacccaggtcgcagtgagtgtccccaagcgcaggcgcaaaattaaagagctcaataaaaaggaagctgtaggagacctgctcgacgcattcaaagaagcaaatcccgctgtacctgaagtggaaaaccaaccgccagccggatccaatcccggtcccgagtctgaaggctctggagtgcccccaaggcctgaagaagctgacgagacatgggactcgaaagaagataagattcacaacgctgagaacatccaacctggggaacagaagtatgaatacaagagtgatcaatggaaacccctcaacttggaggaaaagaaaaggtacgacagagaatttcttcttggcttccagttcatttttgcctcaatgcaaaagcccgagggactgcctcacattagcgatgtagtgctcgataaggccaacaaaaccccactgagaccgctagacccaactagactccagggaattaattgcgggcctgactttactccgtcattcgccaatcttggacgcactaccctcagcactaggggaccccctcgagggggaccaggaggggagctgcctcgtggcccacaagctggcctcggtcctaggcggtctcaacaggggccacgaaaggagcctcgcaagataatcgctaccgtcctaatgaccgaagacattaagctcaacaaagcagagaaggcgtggaaaccaagctcaaaaagaacagccgctgataaagatcggggtgaagaagacgcagacggttctaagacacaagaccttttccgcagggtccgctcaatcttgaacaaactcaccccacaaatgttccaacagttaatgaaacaggtgacccagcttgccatcgataccgaagagcgcctgaagggagtcatcgacttgatcttcgaaaaagctatctcagaacctaatttctccgtggcatacgctaatatgtgtagatgtctcatggcactcaaggtccccactactgaaaaacccaccgtcacggtgaatttcagaaaactattacttaataggtgtcaaaaggaatttgaaaaggacaaagacgacgacgaggtcttcgaaaagaagcagaaagaaatggacgaggccgctaccgctgaagaacgcggacgcctaaaggaagagctagaagaagcaagggacattgcaaggcgtagatcactggggaacattaagttcatcggcgagttgtttaagctcaaaatgctgactgaggccatcatgcacgattgtgttgtgaagctgttaaagaatcacgatgaggaaagcctggagtgtttgtgtcggctcctgaccactattggaaaggatctggactttgaaaaggcgaaacccaggatggaccagtatttcaaccagatggagaaaattattaaggagaaaaaaaccagctctaggattagatttatgttgcaggacgtcctggacctccgcggatcaaactgggttcctaggagaggcgaccagggacctaaaactattgaccaaatccataaggaagccgaaatggaagagcatagggagcatataaaggtacaacaactcatggcgaaaggaagcgacaaacgaagagggggtccacccggtcccccaatttctaggggcctcccacttgtagatgatggaggttggaatacagtgccgatttccaaagggtcccgacccatcgacacgagccgcctcacaaagattactaaaccagggtccatcgactctaacaaccaattgttcgcaccgggaggtcgcctctcatggggaaaagggtctagtggaggcagcggtgccaagccttcagacgctgctagcgaagccgctaggcccgctactagcaccctgaacagattcagtgctctgcaacaggccgtgcctactgagtcaacagacaacaggcgggtggtgcagagaagcagtctgtcccgagaacggggagagaaggccggagatcgcggagatagactggaaaggtctgagaggggcggagaccggggtgaccgcctggatagggcacggacccccgctacaaagcggtccttctctaaggaggtagaggagaggtccagggagcggccttcacagcccgaaggcctaagaaaggcggcttccttgactgaagaccgcgatcgcggtcgagatgccgtgaagagagaagccgctttaccacctgtgtctcctctgaaagctgccctgtcagaggaggagctcgaaaaaaagtccaaagctattatcgaggaatacctgcacctgaacgatatgaaagaggccgtgcagtgcgtacaggagctggcctccccaagtctgctttttatctttgttaggcatggggtggagtccactttagagagatccgccatagcacgtgagcacatggggcagctcctgcaccagctgctttgcgccggacacttgtcaactgcacaatattatcaaggactctacgagatcctggagttggccgaggatatggaaatcgacatcccacacgtatggttgtatctggccgaactagtgacacctattctgcaagaaggaggggtcccaatgggagagctgtttagagagatcaccaagccactcagacctcttgggaaagcagcttccctgcttctcgagattcttggcctgctgtgtaagtccatgggccctaaaaaggtcggtaccttgtggcgggaggccggtctcagctggaaagaatttttgccagaaggacaggacatcggcgctttcgttgctgagcagaaggtggaatatactttgggagaggaatccgaggccccaggtcaacgggctctgccaagcgaggaactgaatcgacaactggagaagctcctaaaggaaggatcaagcaatcagagggtcttcgactggattgaagccaatctgtccgaacaacaaattgtaagcaatacactcgtgagagctctcatgactgctgtatgctattccgcaatcattttcgagacacctctccgtgtggatgtggccgtgttaaaggcacgggctaagctgctgcagaaatacctctgcgatgaacagaaggaacttcaagccctgtatgcactgcaggctctcgtcgtgacactcgagcaaccgcctaatctcttgcgaatgttttttgatgccctatacgacgaagacgtggttaaggaggatgccttttacagttgggaatcctccaaagatcctgctgaacaacaaggtaagggggtcgccctaaaatccgtgaccgccttcttcaagtggctgagagaagccgaggaggagagtgaccacaactag

SEQ ID NO: 257253 - DNA, 4683 bp, Artificial Sequence
  derived and/or modified sequence
atgaacaccccttcccagccgcgacagcacttctacccatcgcgcgctcagccccctagttccgctgctagtcgcgtgcagtcagccgcacccgcacgcccaggcccagcagcacacgtgtacccagcgggttcccaggtgatgatgatcccctcccagatcagttatccagcatcacagggagcctattacattcccggacagggtcggtcaacatacgtagtacccacgcagcagtaccctgttcagcctggcgctccgggattttatccaggagctagccccactgagttcgggacttatgctggagcgtactatccagctcaaggggtgcagcaattccccaccggggttgccccaacccccgtcttgatgaatcagccccctcagatcgcacctaagagggaaagaaaaactatcaggatccgagatcccaatcagggcggaaaggacataactgaggaaatcatgagcggcgctcgaaccgcttctaccccaacgccaccacagacaggcggaggccttgaaccccaggctaacggcgagactccccaggtggccgtaatcgtgagacctgacgaccgttctcagggtgcaataatcgctgaccggcctggtctcccaggacccgaacactcaccaagtgagtcccagccctcctctccctcaccaaccccctccccatcgcccgtgctcgagcctggatctgaacccaatctggcggtactgtctattcctggggatacaatgacgaccattcaaatgagtgtcgaagaatccacccccattagcagagaaacgggggaaccctatcgactctccccagagccgaccccactagccgaacccatactggaagtggaagttaccctgtcaaaacctgttcctgagagcgaattttcttccagccctttgcaggcacctacacccctggcgtcccataccgtggagatccatgaaccaaatggaatggttccatcagaggacttagaacccgaggtcgaaagctctccagaactggctcccccaccggcttgtccatccgaatctcccgtgcctattgcaccgactgcgcagcctgaagagttgctgaacggggctccctcgccgcctgccgttgaccttagtccggtaagcgaacctgaggagcaggctaaggaagtcaccgcatcaatggctccaccaactatcccttccgcaacgccggcaaccgcacccagcgcgacaagcccagcccaggaagaagagatggaagaagaggaagaggaagaggagggtgaagctggtgaggcgggagaagcagaaagtgagaaggggggtgaggagcttctccctccagaatccacgcccatcccagcaaatcttagtcagaatctggaggccgctgctgcaacccaagttgccgtgtcagtgcctaagcggcgacgcaaaatcaaagagctcaacaaaaaggaggccgtgggtgatcttctggacgcatttaaggaagctaaccctgccgtgcccgaggtggaaaaccagcctcctgctggctctaaccctggccctgaatcagagggctctggggtacctccccgtccagaagaggccgatgaaacgtgggattctaaagaggataaaattcacaatgccgagaatatacagccaggcgagcagaagtacgaatacaagagcgatcaatggaagccactcaatctggaggaaaagaaaaggtacgatagggaattcctgctcggcttccagttcatcttcgccagcatgcagaaacccgaaggtctgccgcatatcagcgacgttgtgctagataaagccaataaaacaccactccgtccgctcgacccaacccgacttcaaggaatcaactgcggacctgatttcacccccagctttgcaaaccttgggcgaacgactttgtctacacggggtcctccccgtgggggacccggaggtgaactcccaaggggccctcaggccggtttgggtcctagaaggtcgcagcaggggcctcgtaaggaacctcggaaaatcattgctactgtacttatgacggaggacattaaattgaataaagccgagaaagcatggaagccttcctccaaacgcacggctgctgataaagatcgcggtgaggaggacgccgacggttccaaaacacaggatctgttcaggagagtacgatctatcttgaacaagctgacaccccagatgtttcagcagctgatgaagcaggttacccagcttgcaatagataccgaggaaagattaaagggggtaatcgatctcatatttgagaaggccatttccgaacccaatttctcagtcgcttacgcgaatatgtgcaggtgcctcatggccctcaaggtgcctactaccgaaaagcccaccgtgaccgttaatttcaggaagctactcctcaacaggtgtcagaaagagttcgaaaaagacaaggatgatgatgaggtctttgagaagaagcagaaggagatggacgaggcagcaactgccgaggagcggggaaggctgaaggaggaattggaagaagctagagatattgctcgaaggcggtccctaggcaatataaagttcataggagaactttttaagctaaagatgctaactgaggcgattatgcacgattgtgtcgttaagctgctgaagaaccacgatgaggaaagtttggagtgcctgtgccgcttgctgaccacaattgggaaagatctggattttgaaaaggctaaacccagaatggatcagtacttcaatcagatggaaaaaatcattaaggagaagaaaacttcgtcacgcatcaggtttatgctgcaagacgtgctcgatctgcggggttctaactgggtaccgagaagaggggaccagggcccaaagacaatcgatcagatacataaggaagctgaaatggaagagcaccgcgagcacataaaagtgcaacagctgatggctaaaggcagtgacaagcggcgtggcggacccccagggccacccatctcccgcggtctgcctctggtggatgatggtgggtggaataccgttcccatttccaaaggatctcggcctatagatacttctaggctgactaagattaccaaacctggctctatcgattctaataaccaacttttcgccccaggcggtaggttgtcttgggggaagggctcaagcggcggatccggagccaagccgtctgacgccgcatctgaggcggcacgccctgctacctcaacgcttaatcggttctccgcattacagcaagccgtgccaaccgagtctaccgataaccggagagtggtgcagagaagtagtctgtcacgcgagagaggagaaaaggcaggagatcgtggagaccgcctcgagcggtccgagcggggtggggatcgtggggataggttggacagagccaggacacccgcaaccaagagatccttctcaaaagaggtagaggagcgaagtcgcgaacgtcccagccaaccggaggggctccgaaaagccgcatccttaaccgaggatagagaccggggacgcgatgccgtcaagcgcgaggcagcattgcctcccgtttcccccttgaaggctgctctatcagaggaagaactggaaaagaagtcgaaggccatcatcgaagagtatctgcatctcaacgacatgaaggaagcagtacagtgcgtacaggaactagcatctcctagtctgctgttcatatttgtgcggcatggcgtggagtccaccctagagcggtctgctattgcacgtgagcacatgggccagctgctccaccagctgttgtgtgctggacatttgagtacagctcagtactaccagggactttacgagattttagagttagcagaagatatggagatcgatatcccacatgtgtggctttatctggctgagcttgtcaccccaattctccaggaaggaggggttcctatgggggaactgtttcgagagattactaagcctctgagacctctgggtaaagcggctagcctcctcctggaaattttgggcctgctgtgcaaaagtatgggacctaagaaggtcggcaccctgtggcgcgaagcgggtctctcatggaaggagttcctgccagagggtcaggacattggggctttcgttgcagagcagaaagtggagtacaccctgggtgaggaaagcgaggcacccggtcaacgcgcactccctagcgaagagctgaatagacagctggagaaactgctaaaggagggatccagcaatcagagggtgttcgactggattgaagccaatctgagcgagcagcagatcgtgagcaatactctggttagagcactgatgaccgcagtttgttacagcgcaataattttcgagactccccttagggtagacgtggctgtgctgaaggccagggctaaacttttacaaaagtatctgtgcgatgaacagaaagagctgcaagcgctctacgctctgcaggccctcgttgtgaccttggaacagccacctaacctgttgcggatgtttttcgacgccctttatgacgaggacgtggtgaaggaggatgctttttactcatgggagtccagtaaggatcccgctgagcagcaggggaagggggtcgctctgaagagcgtgactgctttcttcaagtggcttcgcgaggctgaggaagaatcagatcacaattag

SEQ ID NO: 257254 - DNA, 4542 bp, Artificial Sequence
  derived and/or modified sequence
atgatgatcccaagccaaatcagttatcctgcctctcagggggcttattacatacccggacagggcaggtccacctacgtggtacccacacagcagtaccccgtgcagcctggagcacccggtttctatcccggagcaagccccaccgagttcggaacatacgcgggagcctactatcccgctcaaggagtccagcaattcccaacgggcgtcgctcctacgcccgtcctgatgaaccagccgccacagatcgctccaaaacgggagagaaaaacgatccgtatccgggatcctaatcagggcggaaaggacatcacagaggagatcatgagtggcgctagaacagcttccacacccactcccccacagaccggcggagggctggaaccgcaagcaaacggcgaaaccccacaggtggctgtcatcgtaaggcctgacgaccgttcccagggggcaataatagcggatcggccaggtttgcctgggccagagcattctccaagtgagtctcagccttcaagcccctctccgaccccgtcccccagtccggttctggaaccgggaagcgagccgaacttagcagtgttatccatccctggtgacaccatgactactattcagatgagcgttgaggaatctacaccaatcagtcgggaaaccggtgaaccctacagactctccccagaacccactcccctggcggaacccatcctcgaggttgaggtgacactcagcaagcctgtgcctgaatctgagttttcgagctcacccctacaggccccaactcccctcgccagtcacacggtggagatacacgaacctaacggtatggttccctctgaggacctggagcctgaggtggaatctagcccagaactcgcccctccacccgcatgtccatctgaatccccagttcctatcgcgccaacggcccaacccgaggagctgctcaacggggctccctccccccctgccgtggacttgtctcctgtgagcgaacctgaggagcaggccaaagaggtgaccgcaagtatggccccacctaccatcccttcagctactcctgctaccgcacccagcgccacttcacctgcccaggaagaagagatggaggaggaggaagaggaagaggagggcgaagcgggtgaagccggagaggctgagtctgagaagggaggtgaggaactcttgcctccggaatcgactcccatccccgcaaacctgagccagaatttagaggcggcagcggctacacaagtggcagtgagcgtgcctaagcgcagacgaaagatcaaagagcttaacaagaaggaagcagtgggcgacctgctcgatgccttcaaggaggccaatccagcagtgccagaggtggagaatcaaccaccagccggatctaatcccggacccgagtctgaggggtccggagtcccacccaggcctgaggaagccgacgaaacatgggactctaaggaagacaaaatccacaatgccgaaaatattcagcccggagaacaaaaatatgagtacaagtcagaccagtggaagcctctgaatctggaggaaaagaaacgttacgatagggagttcctgttgggcttccaatttatctttgcctctatgcagaagcccgagggattgcctcacatttctgatgtggttctcgacaaagccaacaaaactccactgcgcccactggacccaactcggttgcaaggaatcaactgtgggccagattttaccccctccttcgcgaacctgggtaggaccacattatctactagagggccaccgagaggtggccctggcggtgaactgcctagagggcctcaggccggactggggcctagacgctcccagcaaggacctcgcaaagagcccagaaagattattgccactgtccttatgacagaagatattaagctgaacaaagccgagaaagcctggaagccatcttcaaaaaggacagctgcagacaaggacagaggagaggaggacgcagatggctctaagactcaagatctgtttcggagagtcaggagcatcctaaacaagctgacaccacaaatgttccagcaacttatgaagcaggtgacacaactggctattgacacagaggaacgcctaaaaggcgttatcgacctgatattcgagaaagctatcagtgagcccaatttctccgtggcctatgccaacatgtgccgatgtttgatggcccttaaggttccaacgaccgagaagccgacggttacagtgaattttagaaaattgttgctgaatcggtgccaaaaggagtttgagaaggacaaagacgatgatgaagttttcgagaagaagcaaaaggaaatggacgaagcagccacagcggaagaacgtggaaggcttaaggaagaactcgaggaggcaagggacatcgccagaaggaggtctcttgggaatataaagttcattggagagctattcaagcttaagatgctcaccgaagccattatgcatgattgtgtcgtaaagctcttgaaaaaccacgatgaagaatctctagaatgtttatgtcgtctgctgacaacaataggaaaagatctcgactttgaaaaggctaaacccaggatggatcagtacttcaaccagatggaaaaaataatcaaagaaaaaaaaacaagctcgaggatacggtttatgctgcaagatgtgctagacctgagggggtcaaattgggtccctaggagaggtgaccaaggacccaaaacgatagaccagatccacaaagaagcagaaatggaagaacaccgagaacacatcaaagtccagcagttaatggctaagggaagcgataaaagaaggggtggaccccctggtcccccaattagcagaggactcccgctcgtagacgacggcggatggaatactgtcccgataagcaaagggtcccggccaattgatacgagcagattaactaagatcactaaacctgggtccattgacagtaataatcaactgttcgctccaggaggcaggctgtcatggggaaaggggagttccggcggatcaggagctaagcccagtgatgctgcctcagaggctgcaaggccggctacctccactctcaatcgctttagcgccctgcagcaagccgttccaactgagtcaacagacaatagacgagtggtccagaggtcctcattatcccgggagcgtggggaaaaagccggtgatcgcggagataggctcgagagatccgaacgaggcggtgaccgcggtgatcggctggaccgagcacgtacgccggctaccaagcgctcattcagcaaggaggttgaggagagatctcgagagcgcccaagccagcctgagggtttgcggaaggccgcttcgcttacagaggatcgagacagaggaagagatgccgtcaagagggaggccgctctccctcccgtatctccacttaaggctgccctgtccgaggaggaactagagaagaagagcaaagcaatcatcgaggaatacctgcacttgaacgatatgaaggaagccgttcagtgtgtgcaggagctcgcttcaccatcgctcttgttcatcttcgtccgtcatggcgttgaatctaccctggaacgctctgctatagccagagaacatatggggcagttactgcaccagctgctttgtgccggacacctcagtacagcgcaatattaccaaggactgtatgagattctagaactggctgaagatatggagatagatatccctcacgtttggttatacctggctgaattagtcacgccaatccttcaggagggaggcgtgcccatgggtgagttgtttagggagatcacaaaaccgttgaggcccctgggcaaagcggcttctttgttactcgagatactgggcctgttgtgtaaaagcatgggcccaaagaaggtaggtacactgtggcgcgaggcaggactgtcgtggaaagaatttttgcccgaggggcaggacatcggggcatttgtggcagagcagaaggtcgaatacacactaggtgaagaatccgaggcccctgggcagcgagcactgccttccgaagaattaaaccggcagctcgagaaactgctcaaggaaggttctagtaaccaacgcgtttttgattggatcgaggcgaaccttagcgagcagcagattgtgtcaaacactctggtgcgggctctgatgacggctgtctgctactcagccattatcttcgagaccccgttgcgcgtggacgtcgccgtgctcaaggccagggctaaacttttgcaaaaatatctgtgtgatgaacaaaaggaactgcaggcgctatacgcattgcaggccttggtcgtgacactcgagcaacccccaaaccttcttagaatgtttttcgatgccctgtatgacgaggacgtggtgaaggaggacgccttctacagttgggaatcttcgaaggatccggctgagcaacagggtaaaggcgtggccctgaagtctgtcacggccttctttaagtggttgagggaggccgaagaggagtccgatcacaattag

SEQ ID NO: 257255 - DNA, 4311 bp, Artificial Sequence
  derived and/or modified sequence
atgaaccaaccgccacaaattgccccaaagcgggagaggaaaactatccgaatccgggaccctaatcagggtggtaaggatatcacggaggaaatcatgtcgggagccaggaccgcgtcaaccccaaccccgccacagactgggggtgggttggagccacaagcgaatggggagactcctcaggtggcagtgatcgtgcgtcccgatgatcgcagtcaaggcgctattatcgcagataggccaggtttgccagggccagagcattcccccagcgagagccagccctcttcaccctctcctacacccagcccctctccagttttagaacccggaagcgaaccaaatctggcagtgctgtccattcccggtgacacgatgaccactatccagatgtccgttgaagagtcaactccaatatctcgggaaacaggtgagccatatcgtctgagccccgagcctaccccactggccgagcccatccttgaggtagaggttacattgagtaaacccgtgccggagtccgagttttcatctagccctttgcaggctccgaccccattggcttctcataccgtggagatacacgagcccaatgggatggttccttcggaagacctggagcctgaggttgaatcgagtccggaacttgctccaccccctgcttgtcccagtgaatctccagtgcccatcgcacccacagcccagccggaggaattgctcaatggcgctccaagcccaccagctgtggacctgtcgccagtgagcgagcctgaagagcaggccaaagaggttacagcttcaatggcgccacctaccattcctagtgcaacccccgctaccgctccttccgctacctctcccgctcaggaggaagagatggaggaagaggaggaggaagaggagggggaagctggagaagccggagaggcagagagcgagaagggaggcgaggagctactgccccctgaatccacccccatccctgctaatctgagccagaatttggaggccgcagctgccacccaggtggcagtgtccgtgcccaagcgcaggcgaaagattaaagaattgaacaaaaaggaggcggttggcgatctgcttgacgctttcaaagaggccaatccggcagttcccgaggtagaaaatcaaccccctgccggttctaaccccggtcctgagtccgagggatcaggggtgccccctcgacctgaggaggctgatgaaacatgggacagcaaggaagacaagatccataatgctgaaaatattcagcctggcgaacagaaatatgagtataagagtgaccaatggaagcctttgaatcttgaagaaaagaagcggtatgacagagaatttttactcggcttccagtttattttcgcttccatgcagaaaccagagggtctgcctcacatatctgatgtggtattggataaggcaaacaagacaccactgaggcctctggatccaacccgccttcaaggcattaattgcgggcctgacttcacaccttccttcgccaaccttggcaggactactctatcaacaagaggccctcccagggggggtcctggaggggaattgccacgcggaccccaggccggactgggacctaggcggtcccaacaagggccacgtaaagaacccagaaagataattgctaccgtgctgatgactgaagatattaaactgaacaaggctgaaaaggcctggaagcctagcagtaagcggacagctgccgacaaggatcggggtgaggaagatgcggatggttctaaaacccaggacctttttagaagggtgagatccattctcaacaagctcacgccgcaaatgttccagcagctcatgaagcaggtgacccagcttgctatagacactgaggagagactaaagggcgtaatcgacctcatcttcgaaaaagctatctccgaaccaaacttctctgttgcctacgccaacatgtgtcggtgcttgatggccctgaaggtccccaccactgagaagccaaccgtgaccgtgaatttccggaagctcctgctgaacagatgccagaaggagttcgagaaggataaggacgacgacgaggtctttgaaaaaaaacaaaaagagatggacgaagcagcaaccgctgaagaacgtgggagactaaaggaggagcttgaagaagcgagagatatcgcgcgtcggcgtagccttggaaacatcaagtttatcggcgagctgtttaaactgaaaatgctgaccgaggctattatgcacgattgcgtggtgaagctcctgaagaaccacgatgaagagtctctcgagtgtctgtgtcgcctgctcacgacgataggtaaggacctcgattttgagaaagccaaaccccgtatggaccaatattttaaccagatggagaagatcataaaggagaaaaagaccagttcaagaatacgatttatgctgcaggacgtgctcgatcttcgcggaagcaattgggtgcctcgccgaggcgatcaggggcctaaaaccatcgatcaaattcataaagaggctgaaatggaagaacaccgcgaacatattaaggtgcaacaactgatggcaaagggatcagacaagcgcagagggggtccgccaggtccccctatttctcgtggcctacctctggtcgatgacggcggttggaacaccgtacccatctctaaggggtcacgcccaatcgacacttctagattgacgaagattactaagcccggaagcattgactctaataaccagctgtttgctcctggcggtcgactctcttggggcaaaggttcctctgggggtagcggagcaaagccctctgatgccgcttccgaggcagcaagacccgctacctcgacacttaaccgctttagtgcattgcagcaggccgtgcctacagaaagcacagacaataggcgggtcgtgcaacggagctctctttccagggaacgcggtgagaaggctggggacagaggggatcgtctggaacgatcggaacggggaggagaccggggagaccggctggaccgggctcggacaccagccacgaaaagatcattttctaaggaggtggaagagcggagcagagagcggccttctcaaccggagggtctgagaaaggccgcttcactgacagaggaccgagatcgcggtcgggacgcggtcaaacgcgaggccgcactaccccctgtgagccccctgaaggctgcgctctcggaggaagaattggagaaaaagagcaaggcaattatcgaggaatatctgcacctgaatgatatgaaggaagctgttcagtgcgtccaggagttagcttctccttctctactttttatatttgtcaggcatggcgttgagtccacactagaaagaagcgcgatcgccagagagcatatgggccagttattgcatcagctgctgtgcgctggccacctctcaacagctcagtactatcagggactctacgaaattctggagcttgcagaagatatggaaatagacattcctcacgtgtggctatatctcgctgagctcgttacacctattctccaggaaggcggagtgccgatgggggaacttttccgggagatcaccaagcctctccgccctctgggaaaagctgcctccctgctccttgagatcctgggcctgctatgcaaaagtatgggccctaaaaaggtgggaacattgtggcgcgaagccggacttagctggaaggagtttctgccagaaggccaggacatcggggcatttgtggctgaacagaaagtggaatacacattgggcgaagagtcagaagcccctggccaacgggcactcccatctgaggagttgaaccgacagctcgagaaactgctgaaggaagggagcagcaaccagcgagttttcgactggattgaggctaacctgtccgaacaacaaatcgtgtccaacaccctggtgcgggctctgatgactgccgtgtgctactctgctatcatcttcgagacccctctcagagtcgacgtggccgtgctgaaagccagagccaagttgttgcagaagtacttgtgcgatgaacagaaggagctgcaggctctgtacgccctccaggctttggtcgtcacattggagcagcctcccaatttgctgagaatgtttttcgatgccctgtacgacgaggacgtggtaaaagaggatgcattttattcttgggagagtagcaaagatccggctgaacagcagggcaaaggggtcgcactcaagtccgtcaccgccttttttaaatggttaagagaagcagaggaagaaagcgatcacaactag

SEQ ID NO: 257256 - protein, 479 aa, Artificial Sequence
  derived and/or modified sequence
MASTIKEALSVVSEDQSLFECAYGTPHLAKTEMTASSSSDYGQTSKMSPRVPQQDWLSQPPARVTIKMECNPSQVNGSRNSPDECSVAKGGKMVGSPDTVGMNYGSYMEEKHMPPPNMTTNERRVIVPADPTLWSTDHVRQWLEWAVKEYGLPDVNILLFQNIDGKELCKMTKDDFQRLTPSYNADILLSHLHYLRETPLPHLTSDDVDKALQNSPRLMHARNTGGAAFIFPNTSVYPEATQRITTRPDLPYEPPRRSAWTGHGHPTPQSKAAQPSPSTVPKTEDQRPQLDPYQILGPTSSRLANPGSGQIQLWQFLLELLSDSSNSSCITWEGTNGEFKMTDPDEVARRWGERKSKPNMNYDKLSRALRYYYDKNIMTKVHGKRYAYKFDFHGIAQALQPHPPESSLYKYPSDLPYMGSYHAHPQKMNFVAPHPPALPVTSSSFFAAPNPYWNSPTGGIYPNTRLPTSHMPSHLGTYY

SEQ ID NO: 257257 - protein, 171 aa, Artificial Sequence
  derived and/or modified sequence
MASTIKEALSVVSEDQSLFECAYGTPHLAKTEMTASSSSDYGQTSKMSPRVPQQDWLSQPPARVTIKMECNPSQVNGSRNSPDECSVAKGGKMVGSPDTVGMNYGSYMEEKHMPPPNMTTNERRVIVPADLPYEPPRRSAWTGHGHPTPQSKGTVLAPMTLSFMSQAVDDC

SEQ ID NO: 257258 - protein, 387 aa, Artificial Sequence
  derived and/or modified sequence
MVGSPDTVGMNYGSYMEEKHMPPPNMTTNERRVIVPADPTLWSTDHVRQWLEWAVKEYGLPDVNILLFQNIDGKELCKMTKDDFQRLTPSYNADILLSHLHYLRETPLPHLTSDDVDKALQNSPRLMHARNTGGAAFIFPNTSVYPEATQRITTRPDLPYEPPRRSAWTGHGHPTPQSKAAQPSPSTVPKTEDQRPQLDPYQILGPTSSRLANPGSGQIQLWQFLLELLSDSSNSSCITWEGTNGEFKMTDPDEVARRWGERKSKPNMNYDKLSRALRYYYDKNIMTKVHGKRYAYKFDFHGIAQALQPHPPESSLYKYPSDLPYMGSYHAHPQKMNFVAPHPPALPVTSSSFFAAPNPYWNSPTGGIYPNTRLPTSHMPSHLGTYY

SEQ ID NO: 257259 - DNA, 1440 bp, Artificial Sequence
  derived and/or modified sequence
atggccagcaccatcaaggaggccctgagcgtggtgagcgaggaccagagcctgttcgagtgcgcctacggcaccccccacctggccaagaccgagatgaccgccagcagcagcagcgactacggccagaccagcaagatgagccccagagtgccccagcaggactggctgagccagccccccgccagagtgaccatcaagatggagtgcaaccccagccaggtgaacggcagcagaaacagccccgacgagtgcagcgtggccaagggcggcaagatggtgggcagccccgacaccgtgggcatgaactacggcagctacatggaggagaagcacatgcccccccccaacatgaccaccaacgagagaagagtgatcgtgcccgccgaccccaccctgtggagcaccgaccacgtgagacagtggctggagtgggccgtgaaggagtacggcctgcccgacgtgaacatcctgctgttccagaacatcgacggcaaggagctgtgcaagatgaccaaggacgacttccagagactgacccccagctacaacgccgacatcctgctgagccacctgcactacctgagagagacccccctgccccacctgaccagcgacgacgtggacaaggccctgcagaacagccccagactgatgcacgccagaaacaccggcggcgccgccttcatcttccccaacaccagcgtgtaccccgaggccacccagagaatcaccaccagacccgacctgccctacgagccccccagaagaagcgcctggaccggccacggccaccccaccccccagagcaaggccgcccagcccagccccagcaccgtgcccaagaccgaggaccagagaccccagctggacccctaccagatcctgggccccaccagcagcagactggccaaccccggcagcggccagatccagctgtggcagttcctgctggagctgctgagcgacagcagcaacagcagctgcatcacctgggagggcaccaacggcgagttcaagatgaccgaccccgacgaggtggccagaagatggggcgagagaaagagcaagcccaacatgaactacgacaagctgagcagagccctgagatactactacgacaagaacatcatgaccaaggtgcacggcaagagatacgcctacaagttcgacttccacggcatcgcccaggccctgcagccccacccccccgagagcagcctgtacaagtaccccagcgacctgccctacatgggcagctaccacgcccacccccagaagatgaacttcgtggccccccacccccccgccctgcccgtgaccagcagcagcttcttcgccgcccccaacccctactggaacagccccaccggcggcatctaccccaacaccagactgcccaccagccacatgcccagccacctgggcacctactactag

SEQ ID NO: 257260 - DNA, 1440 bp, Artificial Sequence
  derived and/or modified sequence
atggcctcaacaataaaggaggccctctcagtggtgtccgaggatcagtccctcttcgagtgcgcttacgggacaccccacctagctaagactgaaatgaccgctagttcctcatcagactacggccagacttcaaagatgtcccccagggtcccccagcaggattggctgagccagcctcctgctagagtaaccatcaaaatggagtgcaatcctagtcaggtcaatggctctaggaatagcccggatgagtgctccgtggctaagggtggaaagatggtggggagtcctgataccgtgggtatgaactacgggtcctacatggaagaaaagcacatgcccccccccaatatgacaacgaacgagcgacgggtcattgtcccagccgacccaactctctggtccacagatcacgtccgacagtggctggaatgggccgtgaaggagtatggcttgccggatgtaaatatactgctattccagaacattgacggaaaggaactctgtaagatgaccaaggatgactttcagcggttgaccccatcctacaacgccgacatcttactctcccatctgcattacctaagggagaccccactgccccaccttactagcgatgacgtggacaaggctctgcagaacagtccacggttgatgcacgccagaaacactgggggcgcagcgttcatttttccaaatacatctgtctaccccgaggctacccaaagaattacgacccggccagatctgccttacgagccaccacggaggtccgcttggaccgggcacggtcaccccacccctcagagcaaggccgcccagccctccccatcaacagttcctaaaactgaagatcagaggcctcaactggacccctaccagatactcggccccacctcctccagactagctaacccgggatctgggcagatccagctgtggcagttcctcctggaactgctgagcgacagcagtaactcctcctgcatcacatgggaggggaccaatggcgagtttaaaatgacagacccagatgaggtcgctcgcaggtggggagagcgaaaatccaaaccaaacatgaattacgacaaattatctcgagcactccgatactactatgataagaacatcatgaccaaagtacatggcaagagatatgcgtacaagttcgattttcacggtatcgcgcaggcattgcaacctcacccaccagagtcatcattgtacaagtacccatcggatttaccctacatggggtcctaccatgcccatcctcagaagatgaattttgttgcaccccatccccccgctctccccgtgacgagctcgtcatttttcgccgcacccaacccatattggaacagtcctactggtggcatatacccaaacactcggctgcccacaagccatatgccatctcatcttggcacctattactag

SEQ ID NO: 257261 - DNA, 1440 bp, Artificial Sequence
  derived and/or modified sequence
atggccagcaccatcaaggaggccctgtctgtggtgtctgaggaccagagcctgtttgaatgtgcctacggcaccccccacctggccaagacagagatgacagccagcagcagcagtgactatggccagaccagcaagatgagcccccgggtgccccagcaggactggctgagccagcccccagcccgggtgaccatcaagatggagtgcaaccccagccaggtgaatggcagcaggaacagcccagatgagtgcagcgtggccaagggcggcaagatggtgggcagcccagacacagtgggcatgaactacggcagctacatggaggagaagcacatgcccccacccaacatgaccaccaatgaaagaagagtcatcgtgcctgctgaccccaccctgtggagcacagaccacgtgcggcagtggctggagtgggccgtgaaggagtatggcctgcctgatgtgaacatcctgctcttccagaacattgatggcaaggagctgtgcaagatgaccaaggatgacttccagaggctgacccccagctacaatgctgacatcctgctgagccacctgcactacctgcgggagacccccctgccccacctgaccagtgatgatgtggacaaggccctgcagaacagcccccggctgatgcacgccaggaacacaggaggagctgccttcatcttccccaacacctctgtgtacccagaggccacccagaggatcaccaccaggccagacctgccctatgagcccccccggcgcagcgcctggacaggccacggccaccccaccccccagagcaaggccgcccagcccagccccagcacagtgcccaagacagaggaccagaggccccagctggacccctaccagatcctgggccccaccagcagccggctggccaaccctggcagcggccagatccagctgtggcagttcctgctggagctgctgagtgacagcagcaacagcagctgcatcacctgggagggcaccaacggggagttcaagatgacagatcctgatgaggtggcccggcgctggggcgagaggaagagcaagcccaacatgaactatgacaagctgagccgggccctgcgctactactatgacaagaacatcatgaccaaggtgcacggcaagagatatgcctacaagtttgacttccatggaattgcccaggccctgcagccccaccccccagagagcagcctgtacaagtaccccagcgacctgccctacatgggcagctaccacgcccacccccagaagatgaactttgtggccccccaccccccagccctgcctgtgaccagcagcagcttctttgctgcccccaacccctactggaacagccccactggaggcatctaccccaacacccggctgcccaccagccacatgcccagccacctgggcacctactactag

SEQ ID NO: 257262 - DNA, 1440 bp, Artificial Sequence
  derived and/or modified sequence
atggccagcaccatcaaggaggccctgagcgtggtgagcgaggaccagtccctgtttgagtgtgcatatggaaccccacacctcgccaaaaccgagatgacagctagttcaagcagcgactatggacagacaagcaaaatgtccccacgtgtgccacagcaagactggctgagccaacctccggcaagagtgactatcaagatggagtgcaaccctagccaagtaaacggcagcagaaatagccctgatgagtgctctgtggcgaaaggcggcaaaatggtcgggagcccggacacagtggggatgaattacggcagctacatggaagagaaacacatgcctcctcccaatatgacaacgaatgagaggcgtgtcattgtacctgctgacccaacactgtggagcacagaccatgtcaggcagtggctcgagtgggcagtaaaagagtatggactgcctgatgtgaatattcttctctttcagaacatcgatgggaaggaactttgtaagatgacgaaggacgatttccagcggctcaccccatcttacaatgccgatatcttgttatcccatctgcattatcttcgtgagacacccctgccccacctcacctccgatgatgtggataaagcgttgcagaattcgccacgcctgatgcacgcccggaatactggaggtgcagcctttatcttcccgaacacatccgtgtatccggaagcaacgcagcggataaccacaaggcccgacctaccatatgagccaccacgaagaagcgcctggaccgggcatgggcatccaacccctcagagcaaagccgcgcaaccgagtccctccacggtaccaaagaccgaggaccaaaggccccagttggatccctatcagattctgggtccaacatcttctagactggccaatccggggagcgggcagatccagctttggcagtttctgttggaattattgagtgattcatcaaatagtagttgcattacttgggaaggcacgaacggagagtttaaaatgacagacccggacgaagtggctcgtcgctggggtgagagaaagtctaagcccaatatgaattacgataagcttagtcgggccctgagatactactacgacaagaatatcatgaccaaggtgcacggaaaaaggtacgcctacaagtttgactttcacgggatcgcccaggccctgcagcctcatcccccggaaagctccctatacaaataccctagcgacctcccctacatgggcagctaccacgctcatccccaaaaaatgaactttgtggcaccccatccaccagccctgcccgttacatcttcatcctttttcgcagcgcctaacccgtactggaacagcccaactggcgggatctatccaaatacccgcctgccaactagccacatgccatcccacctcggcacctattattag

SEQ ID NO: 257263 - DNA, 1440 bp, Artificial Sequence
  derived and/or modified sequence
atggcttcaaccatcaaggaggctctctcagtcgttagcgaggatcagtctctctttgagtgtgcctatggaactcctcacctggccaaaaccgaaatgacagcttccagctcatctgactatggccaaacctccaaaatgagtccccgagtgccccaacaggattggctgtcacagcctccagccagggtaacaatcaaaatggagtgcaatcctagccaggtcaacggttccagaaacagccctgatgagtgttcagtagccaaggggggaaagatggtgggaagtccagacactgtgggcatgaattatggctcttacatggaagagaaacatatgcctccccctaatatgacgactaatgaaagaagggtcatcgtgcctgctgatcctaccctctggtcaaccgatcacgtacgccagtggcttgagtgggccgtaaaagaatacggtttgcccgacgtgaacattttactatttcagaatatcgatggcaaagagttgtgtaagatgactaaggacgacttccagcggctcactccttcatacaacgccgacatcctgctatcacacctgcactacctcagggaaacgccactgcctcaccttacctctgacgatgtcgataaagccctgcaaaacagccctcggctgatgcacgcaaggaacacaggcggagccgcttttatcttccccaacacttctgtgtatcccgaggctacacagcgtatcactactaggcctgacctcccttatgaacctccgagaaggagtgcctggactggccatggccatcctacgccacagagtaaggcggctcaaccctctccctccactgtgccaaaaaccgaggaccagcggcctcagctggacccctatcaaatcttaggcccaacctccagcaggctggcaaatccagggtcgggacagatccagctgtggcagttcttacttgaactcctgtccgattccagcaacagctcttgcattacatgggagggcacaaatggcgagtttaaaatgacagaccccgacgaagtcgctcggcgatggggtgaaagaaagtccaagcccaatatgaattatgataagttgtcccgcgctctgagatactactacgacaagaacattatgacaaaggtgcatggaaaacggtatgcatataaattcgatttccacggcattgcccaagctcttcagccacatccaccggaaagctctctctataaatacccgagcgaccttccctacatgggctcataccatgcccatccacagaaaatgaacttcgtcgctcctcatcccccagccctgccagtcacctcttcctcatttttcgccgctcccaacccgtactggaactcccctactggcggtatctatcccaataccaggttacctacttctcacatgcctagtcatctcggcacttattactag

SEQ ID NO: 257264 - DNA, 4919 bp, Artificial Sequence
  derived and/or modified sequence
aatctcatccgctctaaacaacctcatcaaaactactttctggtcagagagaagcaataattattattaacatttattaacgatcaataaacttgatcgcattatggccagcactattaaggaagccttatcagttgtgagtgaggaccagtcgttgtttgagtgtgcctacggaacgccacacctggctaagacagagatgaccgcgtcctcctccagcgactatggacagacttccaagatgagcccacgcgtccctcagcaggattggctgtctcaacccccagccagggtcaccatcaaaatggaatgtaaccctagccaggtgaatggctcaaggaactctcctgatgaatgcagtgtggccaaaggcgggaagatggtgggcagcccagacaccgttgggatgaactacggcagctacatggaggagaagcacatgccacccccaaacatgaccacgaacgagcgcagagttatcgtgccagcagatcctacgctatggagtacagaccatgtgcggcagtggctggagtgggcggtgaaagaatatggccttccagacgtcaacatcttgttattccagaacatcgatgggaaggaactgtgcaagatgaccaaggacgacttccagaggctcacccccagctacaacgccgacatccttctctcacatctccactacctcagagagactcctcttccacatttgacttcagatgatgttgataaagccttacaaaactctccacggttaatgcatgctagaaacacagggggtgcagcttttattttcccaaatacttcagtatatcctgaagctacgcaaagaattacaactaggccagatttaccatatgagccccccaggagatcagcctggaccggtcacggccaccccacgccccagtcgaaagctgctcaaccatctccttccacagtgcccaaaactgaagaccagcgtcctcagttagatccttatcagattcttggaccaacaagtagccgccttgcaaatccaggcagtggccagatccagctttggcagttcctcctggagctcctgtcggacagctccaactccagctgcatcacctgggaaggcaccaacggggagttcaagatgacggatcccgacgaggtggcccggcgctggggagagcggaagagcaaacccaacatgaactacgataagctcagccgcgccctccgttactactatgacaagaacatcatgaccaaggtccatgggaagcgctacgcctacaagttcgacttccacgggatcgcccaggccctccagccccaccccccggagtcatctctgtacaagtacccctcagacctcccgtacatgggctcctatcacgcccacccacagaagatgaactttgtggcgccccaccctccagccctccccgtgacatcttccagtttttttgctgccccaaacccatactggaattcaccaactgggggtatataccccaacactaggctccccaccagccatatgccttctcatctgggcacttactactaaagacctggcggaggcttttcccatcagcgtgcattcaccagcccatcgccacaaactctatcggagaacatgaatcaaaagtgcctcaagaggaatgaaaaaagctttactggggctggggaaggaagccggggaagagatccaaagactcttgggagggagttactgaagtcttactacagaaatgaggaggatgctaaaaatgtcacgaatatggacatatcatctgtggactgaccttgtaaaagacagtgtatgtagaagcatgaagtcttaaggacaaagtgccaaagaaagtggtcttaagaaatgtataaactttagagtagagtttggaatcccactaatgcaaactgggatgaaactaaagcaatagaaacaacacagttttgacctaacataccgtttataatgccattttaaggaaaactacctgtatttaaaaatagaaacatatcaaaaacaagagaaaagacacgagagagactgtggcccatcaacagacgttgatatgcaactgcatggcatgtgctgttttggttgaaatcaaatacattccgtttgatggacagctgtcagctttctcaaactgtgaagatgacccaaagtttccaactcctttacagtattaccgggactatgaactaaaaggtgggactgaggatgtgtatagagtgagcgtgtgattgtagacagaggggtgaagaaggaggaggaagaggcagagaaggaggagaccagggctgggaaagaaacttctcaagcaatgaagactggactcaggacatttggggactgtgtacaatgagttatggagactcgagggttcatgcagtcagtgttataccaaacccagtgttaggagaaaggacacagcgtaatggagaaaggggaagtagtagaattcagaaacaaaaatgcgcatctctttctttgtttgtcaaatgaaaattttaactggaattgtctgatatttaagagaaacattcaggacctcatcattatgtgggggctttgttctccacagggtcaggtaagagatggccttcttggctgccacaatcagaaatcacgcaggcattttgggtaggcggcctccagttttcctttgagtcgcgaacgctgtgcgtttgtcagaatgaagtatacaagtcaatgtttttccccctttttatataataattatataacttatgcatttatacactacgagttgatctcggccagccaaagacacacgacaaaagagacaatcgatataatgtggccttgaattttaactctgtatgcttaatgtttacaatatgaagttattagttcttagaatgcagaatgtatgtaataaaataagcttggcctagcatggcaaatcagatttatacaggagtctgcatttgcactttttttagtgactaaagttgcttaatgaaaacatgtgctgaatgttgtggattttgtgttataatttactttgtccaggaacttgtgcaagggagagccaaggaaataggatgtttggcacccaaatggcgtcagcctctccaggtccttcttgcctcccctcctgtcttttatttctagccccttttggaacagaaggaccccgggtttcacattggagcctccatatttatgcctggaatggaaagaggcctatgaagctggggttgtcattgagaaattctagttcagcacctggtcacaaatcacccttaattcctgctatgattaaaatacatttgttgaacagtgaacaagctaccactcgtaaggcaaactgtattattactggcaaataaagcgtcatggatagctgcaatttctcactttacagaaacaagggataacgtctagatttgctgcggggtttctctttcaggagctctcactaggtagacagctttagtcctgctacatcagagttacctgggcactgtggcttgggattcactagccctgagcctgatgttgctggctatcccttgaagacaatgtttatttccataatctagagtcagtttccctgggcatcttttctttgaatcacaaatgctgccaaccttggtccaggtgaaggcaactcaaaaggtgaaaatacaaggtgaccgtgcgaaggcgctagccgaaacatcttagctgaataggtttctgaactggcccttttcatagctgtttcagggcctgtttttttcacgttgcagtccttttgctatgattatgtgaagttgccaaacctctgtgctgtggatgttttggcagtgggctttgaagtcggcaggacacgattaccaatgctcctgacaccccgtgtcatttggattagacggagcccaaccatccatcattttgcagcagcctgggaaggcccacaaagtgcccgtatctccttagggaaaataaataaatacaatcatgaaagctggcagttaggctgacccaaactgtgctaatggaaaagatcagtcatttttattttggaatgcaaagtcaagacacacctacattcttcatagaaatacacatttacttggataatcactcagttctctcttcaagactgtctcatgagcaagatcataaaaacaagacatgattatcatattcaattttaacagatgttttccattagatccctcaaccctccacccccagtccaggttattagcaagtcttatgagcaactgggataattttggataacatgataatactgagttccttcaaatacataattcttaaattgtttcaaaatggcattaactctctgttactgttgtaatctaattccaaagccccctccaggtcatattcataattgcatgaaccttttctctctgtttgtccctgtctcttggcttgccctgatgtatactcagactcctgtacaatcttactcctgctggcaagagatttgtcttcttttcttgtcttcaattggctttcgggccttgtatgtggtaaaatcaccaaatcacagtcaagactgtgtttttgttcctagtttgatgcccttatgtcccggaggggttcacaaagtgctttgtcaggactgctgcagttagaaggctcactgcttctcctaagccttctgcacagatgtggcacctgcaacccaggagcaggagccggaggagctgccctctgacagcaggtgcagcagagatggctacagctcaggagctgggaaggtgatggggcacagggaaagcacagatgttctgcagcgccccaaagtgacccattgcctggagaaagagaagaaaatattttttaaaaagctagtttatttagcttctcattaattcattcaaataaagtcgtgaggtgactaattagagaataaaaattactttggactactcaaaaatacaccaaa

SEQ ID NO: 257265 - DNA, 1595 bp, Artificial Sequence
  derived and/or modified sequence
tccgctctaaacaacctcatcaaaactactttctggtcagagagaagcaataattattattaacatttattaacgatcaataaacttgatcgcattatggccagcactattaaggaactctcctgatgaatgcagtgtggccaaaggcgggaagatggtgggcagcccagacaccgttgggatgaactacggcagctacatggaggagaagcacatgccacccccaaacatgaccacgaacgagcgcagagttatcgtgccagcagatcctacgctatggagtacagaccatgtgcggcagtggctggagtgggcggtgaaagaatatggccttccagacgtcaacatcttgttattccagaacatcgatgggaaggaactgtgcaagatgaccaaggacgacttccagaggctcacccccagctacaacgccgacatccttctctcacatctccactacctcagagagactcctcttccacatttgacttcagatgatgttgataaagccttacaaaactctccacggttaatgcatgctagaaacacagggggtgcagcttttattttcccaaatacttcagtatatcctgaagctacgcaaagaattacaactaggccagatttaccatatgagccccccaggagatcagcctggaccggtcacggccaccccacgccccagtcgaaagctgctcaaccatctccttccacagtgcccaaaactgaagaccagcgtcctcagttagatccttatcagattcttggaccaacaagtagccgccttgcaaatccaggcagtggccagatccagctttggcagttcctcctggagctcctgtcggacagctccaactccagctgcatcacctgggaaggcaccaacggggagttcaagatgacggatcccgacgaggtggcccggcgctggggagagcggaagagcaaacccaacatgaactacgataagctcagccgcgccctccgttactactatgacaagaacatcatgaccaaggtccatgggaagcgctacgcctacaagttcgacttccacgggatcgcccaggccctccagccccaccccccggagtcatctctgtacaagtacccctcagacctcccgtacatgggctcctatcacgcccacccacagaagatgaactttgtggcgccccaccctccagccctccccgtgacatcttccagtttttttgctgccccaaacccatactggaattcaccaactgggggtatataccccaacactaggctccccaccagccatatgccttctcatctgggcacttactactaaagacctggcggaggcttttcccatcagcgtgcattcaccagcccatcgccacaaactctatcggagaacatgaatcaaaagtgcctcaagaggaatgaaaaaagctttactggggctggggaaggaagccggggaagagatccaaagactcttgggagggagttactgaagtcttactacagaaatgaggaggatgctaaaaatgtcacgaatatggacatatcatctgtggactgaccttgtaaaagacagtgtatgtagaagcatgaagtcttaa

SEQ ID NO: 257266 - protein, 712 aa, Artificial Sequence
  derived and/or modified sequence
MACTGPSLPSAFDILGAAGQDKLLYLKHKLKTPRPGCQGQDLLHAMVLLKLGQETEARISLEALKADAVARLVARQWAGVDSTEDPEEPPDVSWAVARLYHLLAEEKLCPASLRDVAYQEAVRTLSSRDDHRLGELQDEARNRCGWDIAGDPGSIRTLQSNLGCLPPSSALPSGTRSLPRPIDGVSDWSQGCSLRSTGSPASLASNLEISQSPTMPFLSLHRSPHGPSKLCDDPQASLVPEPVPGGCQEPEEMSWPPSGEIASPPELPSSPPPGLPEVAPDATSTGLPDTPAAPETSTNYPVECTEGSAGPQSLPLPILEPVKNPCSVKDQTPLQLSVEDTTSPNTKPCPPTPTTPETSPPPPPPPPSSTPCSAHLTPSSLFPSSLESSSEQKFYNFVILHARADEHIALRVREKLEALGVPDGATFCEDFQVPGRGELSCLQDAIDHSAFIILLLTSNFDCRLSLHQVNQAMMSNLTRQGSPDCVIPFLPLESSPAQLSSDTASLLSGLVRLDEHSQIFARKVANTFKPHRLQARKAMWRKEQDTRALREQSQHLDGERMQAAALNAAYSAYLQSYLSYQAQMEQLQVAFGSHMSFGTGAPYGARMPFGGQVPLGAPPPFPTWPGCPQPPPLHAWQAGTPPPPSPQPAAFPQSLPFPQSPAFPTASPAPPQSPGLQPLIIHHAQMVQLGLNNHMWNQRGSQAPEDKTQEAE

SEQ ID NO: 257267 - DNA, 2139 bp, Artificial Sequence
  derived and/or modified sequence
atggcctgcaccggccccagcctgcccagcgccttcgacatcctgggcgccgccggccaggacaagctgctgtacctgaagcacaagctgaagacccccagacccggctgccagggccaggacctgctgcacgccatggtgctgctgaagctgggccaggagaccgaggccagaatcagcctggaggccctgaaggccgacgccgtggccagactggtggccagacagtgggccggcgtggacagcaccgaggaccccgaggagccccccgacgtgagctgggccgtggccagactgtaccacctgctggccgaggagaagctgtgccccgccagcctgagagacgtggcctaccaggaggccgtgagaaccctgagcagcagagacgaccacagactgggcgagctgcaggacgaggccagaaacagatgcggctgggacatcgccggcgaccccggcagcatcagaaccctgcagagcaacctgggctgcctgccccccagcagcgccctgcccagcggcaccagaagcctgcccagacccatcgacggcgtgagcgactggagccagggctgcagcctgagaagcaccggcagccccgccagcctggccagcaacctggagatcagccagagccccaccatgcccttcctgagcctgcacagaagcccccacggccccagcaagctgtgcgacgacccccaggccagcctggtgcccgagcccgtgcccggcggctgccaggagcccgaggagatgagctggccccccagcggcgagatcgccagcccccccgagctgcccagcagccccccccccggcctgcccgaggtggcccccgacgccaccagcaccggcctgcccgacacccccgccgcccccgagaccagcaccaactaccccgtggagtgcaccgagggcagcgccggcccccagagcctgcccctgcccatcctggagcccgtgaagaacccctgcagcgtgaaggaccagacccccctgcagctgagcgtggaggacaccaccagccccaacaccaagccctgcccccccacccccaccacccccgagaccagcccccccccccccccccccccccccagcagcaccccctgcagcgcccacctgacccccagcagcctgttccccagcagcctggagagcagcagcgagcagaagttctacaacttcgtgatcctgcacgccagagccgacgagcacatcgccctgagagtgagagagaagctggaggccctgggcgtgcccgacggcgccaccttctgcgaggacttccaggtgcccggcagaggcgagctgagctgcctgcaggacgccatcgaccacagcgccttcatcatcctgctgctgaccagcaacttcgactgcagactgagcctgcaccaggtgaaccaggccatgatgagcaacctgaccagacagggcagccccgactgcgtgatccccttcctgcccctggagagcagccccgcccagctgagcagcgacaccgccagcctgctgagcggcctggtgagactggacgagcacagccagatcttcgccagaaaggtggccaacaccttcaagccccacagactgcaggccagaaaggccatgtggagaaaggagcaggacaccagagccctgagagagcagagccagcacctggacggcgagagaatgcaggccgccgccctgaacgccgcctacagcgcctacctgcagagctacctgagctaccaggcccagatggagcagctgcaggtggccttcggcagccacatgagcttcggcaccggcgccccctacggcgccagaatgcccttcggcggccaggtgcccctgggcgcccccccccccttccccacctggcccggctgcccccagcccccccccctgcacgcctggcaggccggcaccccccccccccccagcccccagcccgccgccttcccccagagcctgcccttcccccagagccccgccttccccaccgccagccccgcccccccccagagccccggcctgcagcccctgatcatccaccacgcccagatggtgcagctgggcctgaacaaccacatgtggaaccagagaggcagccaggcccccgaggacaagacccaggaggccgagtag

SEQ ID NO: 257268 - DNA, 2139 bp, Artificial Sequence
  derived and/or modified sequence
atggcctgtactgggccgagtctgccttcagccttcgatattttgggtgccgcagggcaagacaagttgctttatcttaaacacaaactaaagactccaagacctggctgtcaaggccaggacctgttgcatgccatggttttgctgaagctgggtcaagagaccgaagccagaatctccctcgaggccctcaaggccgatgcagtcgcccgacttgtggcccgacagtgggctggagtggatagcaccgaagatccagaagagccgccagacgttagctgggcagtcgcgagactgtaccacctactggccgaggagaagctttgccccgcttctctccgtgacgtggcttatcaagaggcagtgaggaccttgagttcgcgcgacgatcacaggctgggagaactgcaggacgaggctcggaatcggtgcggttgggatattgcaggggatccaggatccatacgcactctccagagcaatctgggctgtctgccacccagttctgctttgccaagtggcaccagatcactgcctaggcccatagatggagtgtctgactggagtcaggggtgctccctgcgcagtacaggttctcccgcttccctcgcctccaatttggaaatttctcaatcaccaaccatgccctttctcagcctccaccgaagcccacatggcccgagcaaactctgcgatgaccctcaagccagcctggtgccggagcccgtcccgggagggtgtcaagagccggaagagatgagttggcctccctctggcgaaatcgctagtcctcccgaactccccagctcccccccccctggactccctgaggtggcccccgacgccacttcaacaggcttgcctgatacaccagccgcgcccgaaacaagcaccaactaccctgtggagtgcaccgaaggctctgccgggccgcagtctctgcctttgcctatactggaacctgtgaagaatccgtgcagtgtaaaagatcagacccctttacagctgtcagtcgaagacacaacaagccccaacacaaagccctgtccacctacccccactactcccgaaacctcaccaccccccccaccacctccaccttcatctactccctgctctgcccatctgacacctagctctctgttccctagtagcttggagtcttcttcagaacagaagttctataactttgtcatcctgcacgcgcgagctgatgaacatatcgcactgcgagtccgggagaagctcgaagcactgggggtgcccgacggcgccacattctgcgaggactttcaggtccctggccgaggggagctgagttgcctccaagacgcgattgaccacagtgctttcatcatcctgctgctcacgtccaactttgattgccgcctgagccttcaccaggtaaaccaagccatgatgtcgaacttgacgcgccaaggttcaccggattgcgtgattccattcttgccgttggaatcctcgcccgcccagctgtcaagcgatactgcatcactcttatccggtctggttagattagatgagcacagtcagattttcgcccgtaaggtcgctaatacgttcaagccgcatcgccttcaagcacggaaggcgatgtggaggaaggaacaggacacaagggccctcagagaacaaagccagcaccttgacggggaacggatgcaggccgctgcactcaatgcggcctattctgcgtacctacagagttaccttagctaccaggcgcagatggagcagttgcaggtggcatttggatcacacatgtcgttcgggactggagccccttacggcgctcggatgcccttcggcggtcaagtcccactgggagcacctcccccattccccacctggccagggtgtccacagccccctccactccacgcctggcaggccgggaccccaccacccccatctccacaacctgcggcctttccccagagcctacccttccctcagtccccagcattccctaccgcttcccccgcccctcctcaatccccagggctgcagccgcttataatccaccacgcccagatggtgcagctgggacttaataaccacatgtggaatcaaagagggtcacaggctcctgaggacaaaacccaagaggccgagtag

SEQ ID NO: 257269 - DNA, 66 bp, Artificial Sequence
  derived and/or modified sequence
atggaccggcccggctttgtggccgccctggtgctgctgcacttcctgagccccatgaacatgtag

SEQ ID NO: 257270 - DNA, 2139 bp, Artificial Sequence
  derived and/or modified sequence
atggcctgcaccggccccagcctgcccagcgcctttgacatcctgggcgccgccggccaggacaagctgctgtacctgaagcacaagctgaagacccccaggcctggctgccagggccaggacctgctgcacgccatggtgctgctgaagctgggccaggagacagaggcccgcatcagcctggaggccctgaaggcagatgctgtggcccggctggtggcccggcagtgggccggcgtggacagcacagaggaccctgaggagcccccagatgtgtcctgggccgtggcccggctgtaccacctgctggccgaggagaagctgtgcccagccagcctgagagatgtggcctaccaggaggccgtgaggaccctgagcagcagagatgaccaccggctgggggagctgcaggatgaggccaggaacagatgtggctgggacattgctggggaccccggcagcatccgcaccctgcagagcaacctgggctgcctgccccccagcagcgccctgcccagcggcaccaggagcctgccccggcccattgatggagtgtctgactggagccagggctgcagcctgcggagcacaggcagccctgccagcctggccagcaacctggagatcagccagagccccaccatgcccttcctgagcctgcacaggagcccccacggccccagcaagctgtgtgatgacccccaggccagcctggtgcctgagcctgtgcctgggggctgccaggagcctgaggagatgtcctggccacccagcggggagatcgccagccccccagagctgcccagcagccccccacctggcctgcctgaggtggccccagatgccaccagcacaggcctgcctgacaccccagctgcccctgagaccagcaccaactaccctgtggagtgcacagagggcagcgctggcccccagagcctgcccctgcccatcctggagcctgtgaagaacccctgcagcgtgaaggaccagacccccctgcagctgtctgtggaggacaccaccagccccaacaccaagccctgcccccccacccccaccaccccagagaccagccccccacctcctcctcctccacccagcagcaccccctgcagcgcccacctgacccccagcagcctcttccccagcagcctggagagcagcagcgagcagaagttctacaactttgtgatcctgcacgcccgggcagatgagcacatcgccctgcgggtgcgggagaagctggaggccctgggcgtgcctgatggagccaccttctgtgaggacttccaggtgcccggccgcggggagctgagctgcctgcaggatgccatcgaccacagcgccttcatcatcctgctgctgaccagcaactttgactgccgcctgagcctgcaccaggtgaaccaggccatgatgagcaacctgacccggcagggcagcccagactgtgtgatccccttcctgcccctggagagcagccctgcccagctgagcagtgacacagccagcctgctgagcggcctggtgcggctggatgagcacagccagatctttgccaggaaggtggccaacaccttcaagccccaccggctgcaggccaggaaggccatgtggaggaaggagcaggacacccgggccctgcgggagcagagccagcacctggatggagagaggatgcaggccgccgccctgaatgctgcctacagcgcctacctgcagagctacctgagctaccaggcccagatggagcagctgcaggtggccttcggcagccacatgagctttggaactggagccccctatggagccaggatgccctttggaggccaggtgcccctgggcgcccccccacccttccccacctggccaggctgcccccagcccccacccctgcacgcctggcaggccggcaccccacctccacccagcccccagcctgctgccttcccccagagcctgcccttcccccagagccctgccttccccacagccagccctgccccaccccagagccctggcctgcagcccctcatcatccaccacgcccagatggtgcagctgggcctgaacaaccacatgtggaaccagaggggcagccaggcccctgaggacaagacccaggaggccgagtag

SEQ ID NO: 257271 - DNA, 2139 bp, Artificial Sequence
  derived and/or modified sequence
atggcctgcaccggccccagcctgcccagcgccttcgacatcctgggggccgcaggacaggataaactgctttacttaaaacacaagttaaaaacccctcgccccggatgccagggacaggatctgctccacgctatggtgttactgaaactgggccaagagaccgaggccagaatatctctcgaagctctcaaagctgatgctgtggcaaggttggtggcccggcaatgggcgggcgtcgacagcacggaggatccagaagaacctcccgacgtctcctgggcagtggctagactttaccacctcctcgctgaagaaaaactgtgtccggcctcactccgagatgtggcctaccaggaggctgtaagaacactatcctcccgggacgaccaccgactcggggagctccaagatgaagctcgcaatagatgtgggtgggatattgccggcgatccgggtagcatcaggacgcttcaatctaacttggggtgcctccctccttccagcgctctgccatcaggcactcggagcctaccgagacctatcgacggcgtctctgactggtctcagggatgcagcctcaggagtacaggcagtccagcctctttggcctcgaacctggaaatctcacaatcaccgaccatgccattcctttccctccacaggagcccccacgggccttctaagctgtgtgatgatccccaagctagtttggtgccagagccagtaccaggcggctgtcaggagcccgaggagatgagctggcctccctccggcgaaattgccagccctccagaactgccatcaagcccaccccccggactgcccgaagtggcacccgacgcaacatctaccggcctccccgacacacccgcagctcctgagacttccaccaactatcctgttgaatgcaccgaaggcagtgcaggcccacagagcttgccactccccatcctggaaccagttaaaaatccatgtagcgtgaaagaccagactccgcttcagctgtcggtggaagacaccacttcacctaacacaaagccctgccctccaaccccaacaacccccgagactagcccacccccaccaccgcctcctcccagtagcaccccctgcagcgcacatctgaccccatcgtctctgttcccgtcatctctggagtcaagctccgaacagaagttttacaattttgtgattcttcacgctcgggctgacgagcacattgcgctaagggtgagagaaaagctcgaagccctgggggtacccgacggcgcaaccttctgtgaggactttcaggtgccggggagaggcgagttgtcatgcctccaggatgctatagatcatagtgcgttcatcatcctgctcctaacctctaactttgattgtagactgagtctgcatcaggtgaatcaggctatgatgtcgaatctgacacggcagggctcgccagactgtgtaatcccattcttgccgctggagtcttcacctgcccagttatcaagcgatactgcctctctgctaagcggcttggttcggctggacgagcactcccagatatttgcccggaaggtcgcaaacacctttaagcctcatagattgcaggccagaaaggccatgtggagaaaagagcaagataccagggccctcagagagcagagtcagcacctggatggagagcgtatgcaagcagcagcccttaatgcagcctacagcgcttacctgcagtcatacttgagctatcaagctcagatggagcaactgcaggtagcctttggaagccacatgtctttcgggaccggagcgccatatggtgcacgcatgccttttggaggccaagtgcctctgggcgccccaccccccttccctacttggcctgggtgcccacagccacctccactccatgcctggcaggctgggaccccgccacctcccagcccacagccagccgcgtttccacagtcattgcctttccctcagtctccagcgttccccaccgcctcacctgctccacctcaaagccccggtctccagcctttaattatccaccacgcacagatggttcagctgggcctcaataatcacatgtggaaccagcgagggtctcaggctcctgaggataagacacaagaggctgaatag

SEQ ID NO: 257272 - DNA, 2139 bp, Artificial Sequence
  derived and/or modified sequence
atggcatgcactggaccttcattgcccagtgccttcgatattttgggggcagcgggtcaggataagctgctctacctcaaacataagttaaagaccccacgacccggatgtcagggacaggacctgctgcacgctatggtgcttttaaagctggggcaagagactgaggcaaggatttccctcgaggcgctgaaggctgatgcggtcgctaggctcgtggcgcgacagtgggcgggagtggactctacggaagatccagaggaaccaccagacgtttcatgggctgtggcacggctctatcacctgctggcagaagagaagctctgtcccgcatcgctccgggacgtagcgtaccaggaggccgtgcggactctgagctctagagacgaccatagactgggggagctgcaggatgaggccaggaatcgctgcggctgggatatcgcgggagaccccggatccatcagaaccttacaaagtaacttgggctgtctccccccaagcagcgccctgccttcaggcacacggtctttacccagacctatcgatggtgtgtccgactggagccagggctgcagtttgaggtctacaggatctcccgctagcctcgcatcaaacttggaaatttcccagagtcccaccatgccgtttttgtcgttacaccggagcccccatgggccttctaaattatgtgatgaccctcaggcttccctggtccccgagcccgtgccaggtggttgccaagaaccggaagaaatgtcctggccaccctccggggaaattgcatcgccccctgagctcccctccagtccaccaccagggttgcccgaagtggcgcctgacgccacttccacaggactaccggacacccctgcggctcccgagactagcactaactatcctgtcgaatgcaccgagggctctgccggaccacaaagtctgcccctcccaattctagaaccagttaagaatccatgtagcgtgaaggatcagactcccctccagctgtctgtcgaagacacaacatcaccaaacaccaagccttgccctccaactcctacgaccccagagacttctccacctcctccaccaccccctcctagcagcaccccttgcagtgcgcatctcactcctagctcactgttccccagctctctggaatccagtagcgagcagaaattttataattttgtgattttgcatgcccgagctgacgagcatattgcccttagggtgcgcgagaagctggaggctctcggtgtccctgatggagctacgttttgcgaagatttccaggtccctgggaggggagagctcagctgcctgcaggacgccattgaccactccgcttttataatactgctactcacttccaacttcgactgccgcctgagcttacatcaggtgaatcaggccatgatgagcaatcttacaagacagggctcgcctgactgcgtgattcccttcttacctctagagagtagtcctgctcagctcagcagcgacactgcatcactgctatctggcttagtgagactggacgaacactcacagatctttgccaggaaggtggcgaatacatttaaacctcaccggctgcaggctcgcaaggcaatgtggcgtaaagaacaggatacacgggctcttcgggaacaatcccagcacctggatggcgagcgaatgcaggcggcagctctgaacgcagcctattctgcgtatctgcagtcttatctgtcctatcaggcccagatggagcagctgcaggtggccttcggctcacatatgtcctttggcaccggagccccttacggggctcgaatgcctttcgggggacaggtacccctgggggcacccccaccatttcccacctggcctggctgcccccagcccccacctctgcatgcatggcaagcgggtaccccaccccctccttccccacagcctgccgctttcccacagtctctcccatttccacagagtcccgcattcccaacagcaagccccgctccccctcagagccctggactgcagcccctcatcatacatcatgcccaaatggtccagctcggcctgaacaatcacatgtggaatcagcggggatctcaggctcctgaagacaagacccaggaagccgaatag

SEQ ID NO: 257273 - DNA, 2702 bp, Artificial Sequence
  derived and/or modified sequence
gcggggtggagccagcgccctcagcgcgctacggtccgcgggcaactccgcagaagccccagcccccaggaccccaggacccagtggcgcagccggcagccccggatccctgatctgcttgggcagctcctgcagaacctggaacagtgaatgggtaggggacactgggcgtgcagaaggcggggggcagtgtggaacatgccttcaccacctccagcttctgctgccggaggctgcacccacctgtgcccatggcctgcacaggcccatcacttcctagcgccttcgacattctaggtgcagcaggccaggacaagctcttgtatctgaagcacaaactgaagaccccacgcccaggctgccaggggcaggacctcctgcatgccatggttctcctgaagctgggccaggaaactgaggccaggatctctctagaggcattgaaggccgatgcggtggcccggctggtggcccgccagtgggctggcgtggacagcaccgaggacccagaggagcccccagatgtgtcctgggctgtggcccgcttgtaccacctgctggctgaggagaagctgtgccccgcctcgctgcgggacgtggcctaccaggaagccgtccgcaccctcagctccagggacgaccaccggctgggggaacttcaggatgaggcccgaaaccggtgtgggtgggacattgctggggatccagggagcatccggacgctccagtccaatctgggctgcctcccaccatcctcggctttgccctctgggaccaggagcctcccacgccccattgacggtgtttcggactggagccaagggtgctccctgcgatccactggcagccctgcctccctggccagcaacttggaaatcagccagtcccctaccatgcccttcctcagcctgcaccgcagcccacatgggcccagcaagctctgtgacgacccccaggccagcttggtgcccgagcctgtccccggtggctgccaggagcctgaggagatgagctggccgccatcgggggagattgccagcccaccagagctgccaagcagcccacctcctgggcttcccgaagtggccccagatgcaacctccactggcctccctgatacccccgcagctccagaaaccagcaccaactacccagtggagtgcaccgaggggtctgcaggcccccagtctctccccttgcctattctggagccggtcaaaaacccctgctctgtcaaagaccagacgccactccaactttctgtagaagataccacctctccaaataccaagccgtgcccacctactcccaccaccccagaaacatcccctcctcctcctcctcctcctccttcatctactccttgttcagctcacctgaccccctcctccctgttcccttcctccctggaatcatcatcggaacagaaattctataactttgtgatcctccacgccagggcagacgaacacatcgccctgcgggttcgggagaagctggaggcccttggcgtgcccgacggggccaccttctgcgaggatttccaggtgccggggcgcggggagctgagctgcctgcaggacgccatagaccactcagctttcatcatcctacttctcacctccaacttcgactgtcgcctgagcctgcaccaggtgaaccaagccatgatgagcaacctcacgcgacaggggtcgccagactgtgtcatccccttcctgcccctggagagctccccggcccagctcagctccgacacggccagcctgctctccgggctggtgcggctggacgaacactcccagatcttcgccaggaaggtggccaacaccttcaagccccacaggcttcaggcccgaaaggccatgtggaggaaggaacaggacacccgagccctgcgggaacagagccaacacctggacggtgagcggatgcaggcggcggcactgaacgcagcctactcagcctacctccagagctacttgtcctaccaggcacagatggagcagctccaggtggcttttgggagccacatgtcatttgggactggggcgccctatggggctcgaatgccctttgggggccaggtgcccctgggagccccgccaccctttcccacttggccggggtgcccgcagccgccacccctgcacgcatggcaggctggcacccccccaccgccctccccacagccagcagcctttccacagtcactgcccttcccgcagtccccagccttccctacggcctcacccgcaccccctcagagcccagggctgcaacccctcattatccaccacgcacagatggtacagctggggctgaacaaccacatgtggaaccagagagggtcccaggcgcccgaggacaagacgcaggaggcagaatgaccgcgtgtccttgcctgaccacctggggaacacccctggacccaggcatcggccaggaccccatagagcaccccggtctgccctgtgccctgtggacagtggaagatgaggtcatctgccactttcaggacattgtccgggagcccttcatttaggacaaaacgggcgcgatgatgccctggctttcagggtggtcagaactggatacggtgtttacaattccaatctctctatttctgggtgaagggtcttggtggtgggggtattgctacggtcttttaattataataaatatttattgaatgcttccgc

SEQ ID NO: 257274 - protein, 1935 aa, Artificial Sequence
  derived and/or modified sequence
MQFVSWATLLTLLVRDLAEMGSPDAAAAVRKDRLHPRQVKLLETLSEYEIVSPIRVNALGEPFPTNVHFKRTRRSINSATDPWPAFASSSSSSTSSQAHYRLSAFGQQFLFNLTANAGFIAPLFTVTLLGTPGVNQTKFYSEEEAELKHCFYKGYVNTNSEHTAVISLCSGMLGTFRSHDGDYFIEPLQSMDEQEDEEEQNKPHIIYRRSAPQREPSTGRHACDTSEHKNRHSKDKKKTRARKWGERINLAGDVAALNSGLATEAFSAYGNKTDNTREKRTHRRTKRFLSYPRFVEVLVVADNRMVSYHGENLQHYILTLMSIVASIYKDPSIGNLINIVIVNLIVIHNEQDGPSISFNAQTTLKNFCQWQHSKNSPGGIHHDTAVLLTRQDICRAHDKCDTLGLAELGTICDPYRSCSISEDSGLSTAFTIAHELGHVFNMPHDDNNKCKEEGVKSPQHVMAPTLNFYTNPWMWSKCSRKYITEFLDTGYGECLLNEPESRPYPLPVQLPGILYNVNKQCELIFGPGSQVCPYMMQCRRLWCNNVNGVHKGCRTQHTPWADGTECEPGKHCKYGFCVPKEMDVPVTDGSWGSWSPFGTCSRTCGGGIKTAIRECNRPEPKNGGKYCVGRRMKFKSCNTEPCLKQKRDFRDEQCAHFDGKHFNINGLLPNVRWVPKYSGILMKDRCKLFCRVAGNTAYYQLRDRVIDGTPCGQDTNDICVQGLCRQAGCDHVLNSKARRDKCGVCGGDNSSCKTVAGTFNTVHYGYNTVVRIPAGATNIDVRQHSFSGETDDDNYLALSSSKGEFLLNGNFVVTMAKREIRIGNAVVEYSGSETAVERINSTDRIEQELLLQVLSVGKLYNPDVRYSFNIPIEDKPQQFYWNSHGPWQACSKPCQGERKRKLVCTRESDQLTVSDQRCDRLPQPGHITEPCGTDCDLRWHVASRSECSAQCGLGYRTLDIYCAKYSRLDGKTEKVDDGFCSSHPKPSNREKCSGECNTGGWRYSAWTECSKSCDGGTQRRRAICVNTRNDVLDDSKCTHQEKVTIQRCSEFPCPQWKSGDWSECLVTCGKGHKHRQVWCQFGEDRLNDRMCDPETKPTSMQTCQQPECASWQAGPWGQCSVTCGQGYQLRAVKCIIGTYMSVVDDNDCNAATRPTDTQDCELPSCHPPPAAPETRRSTYSAPRTQWRFGSWTPCSATCGKGTRMRYVSCRDENGSVADESACATLPRPVAKEECSVTPCGQWKALDWSSCSVTCGQGRATRQVMCVNYSDHVIDRSECDQDYIPETDQDCSMSPCPQRTPDSGLAQHPFQNEDYRPRSASPSRTHVLGGNQWRTGPWGACSSTCAGGSQRRVVVCQDENGYTANDCVERIKPDEQRACESGPCPQWAYGNWGECTKLCGGGIRTRLVVCQRSNGERFPDLSCEILDKPPDREQCNTHACPHDAAWSTGPWSSCSVSCGRGHKQRNVYCMAKDGSHLESDYCKHLAKPHGHRKCRGGRCPKWKAGAWSQCSVSCGRGVQQRHVGCQIGTHKIARETECNPYTRPESERDCQGPRCPLYTWRAEEWQECTKTCGEGSRYRKVVCVDDNKNEVHGARCDVSKRPVDRESCSLQPCEYVWITGEWSECSVTCGKGYKQRLVSCSEIYTGKENYEYSYQTTINCPGTQPPSVHPCYLRDCPVSATWRVGNWGSCSVSCGVGVMQRSVQCLTNEDQPSHLCHTDLKPEERKTCRNVYNCELPQNCKEVKRLKGASEDGEYFLMIRGKLLKIFCAGMHSDHPKEYVTLVHGDSENFSEVYGHRLHNPTECPYNGSRRDDCQCRKDYTAAGFSSFQKIRIDLTSMQIITTDLQFARTSEGHPVPFATAGDCYSAAKCPQGRFSINLYGTGLSLTESARWISQGNYAVSDIKKSPDGTRVVGKCGGYCGKCTPSSGTGLEVRVL

SEQ ID NO: 257275 - DNA, 3168 bp, Artificial Sequence
  derived and/or modified sequence
gtgaatgtagtgcccagtgtggcttgggttaccgcacattggacatctactgtgccaaatatagcaggctggatgggaagactgagaaggttgatgatggtttttgcagcagccatcccaaaccaagcaaccgtgaaaaatgctcaggggaatgtaacacgggtggctggcgctattctgcctggactgaatgttcaaaaagctgtgacggtgggacccagaggagaagggctatttgtgtcaatacccgaaatgatgtactggatgacagcaaatgcacacatcaagagaaagttaccattcagaggtgcagtgagttcccttgtccacagtggaaatctggagactggtcagagtgcttggtcacctgtggaaaagggcataagcaccgccaggtctggtgtcagtttggtgaagatcgattaaatgatagaatgtgtgaccctgagaccaagccaacatctatgcagacttgtcagcagccggaatgtgcatcctggcaggcgggtccctggggacagtgcagtgtcacttgtggacagggataccagctaagagcagtgaaatgcatcattgggacttatatgtcagtggtagatgacaatgactgtaatgcagcaactagaccaactgatacccaggactgtgaattaccatcatgtcatcctcccccagctgccccggaaacgaggagaagcacatacagtgcaccaagaacccagtggcgatttgggtcttggaccccatgctcagccacttgtgggaaaggtacccggatgagatacgtcagctgccgagatgagaatggctctgtggctgacgagagtgcctgtgctaccctgcctagaccagtggcaaaggaagaatgttctgtgacaccctgtgggcaatggaaggccttggactggagctcttgctctgtgacctgtgggcaaggtagggcaacccggcaagtgatgtgtgtcaactacagtgaccacgtgatcgatcggagtgagtgtgaccaggattatatcccagaaactgaccaggactgttccatgtcaccatgccctcaaaggaccccagacagtggcttagctcagcaccccttccaaaatgaggactatcgtccccggagcgccagccccagccgcacccatgtgctcggtggaaaccagtggagaactggcccctggggagcatgttccagtacctgtgctggcggatcccagcggcgtgttgttgtatgtcaggatgaaaatggatacaccgcaaacgactgtgtggagagaataaaacctgatgagcaaagagcctgtgaatccggcccttgtcctcagtgggcttatggcaactggggagagtgcactaagctgtgtggtggaggcataagaacaagactggtggtctgtcagcggtccaacggtgaacggtttccagatttgagctgtgaaattcttgataaacctcccgatcgtgagcagtgtaacacacatgcttgtccacacgacgctgcatggagtactggcccttggagctcgtgttctgtctcttgtggtcgagggcataaacaacgaaatgtttactgcatggcaaaagatggaagccatttagaaagtgattactgtaagcacctggctaagccacatgggcacagaaagtgccgaggaggaagatgccccaaatggaaagctggcgcttggagtcagtgctctgtgtcctgtggccgaggcgtacagcagaggcatgtgggctgtcagatcggaacacacaaaatagccagagagaccgagtgcaacccatacaccagaccggagtcggaacgcgactgccaaggcccacggtgtcccctctacacttggagggcagaggaatggcaagaatgcaccaagacctgcggcgaaggctccaggtaccgcaaggtggtgtgtgtggatgacaacaaaaacgaggtgcatggggcacgctgtgacgtgagcaagcggccggtggaccgtgaaagctgtagtttgcaaccctgcgagtatgtctggatcacaggagaatggtcagagtgctcagtgacctgtggaaaaggctacaaacaaaggcttgtctcgtgcagcgagatttacaccgggaaggagaattatgaatacagctaccaaaccaccatcaactgcccaggcacgcagccccccagtgttcacccctgttacctgagggactgccctgtctcggccacctggagagttggcaactgggggagctgctcagtgtcttgtggtgttggagtgatgcagagatctgtgcaatgtttaaccaatgaggaccaacccagccacttatgccacactgatctgaagccagaagaacgaaaaacctgccgtaatgtctataactgtgagttaccccagaattgcaaggaggtaaaaagacttaaaggtgccagtgaagatggtgaatatttcctgatgattagaggaaagcttctgaagatattctgtgcggggatgcactctgaccaccccaaagagtacgtgacactggtgcatggagactctgagaatttctccgaggtttatgggcacaggttacacaacccaacagaatgtccctataacgggagccggcgcgatgactgccaatgtcggaaggattacacggccgctgggttttccagttttcagaaaatcagaatagacctgaccagcatgcagataatcaccactgacttacagtttgcaaggacaagcgaaggacatcccgtcccttttgccacagccggggattgctacagcgctgccaagtgcccacagggtcgttttagcatcaacctttatggaaccggcttgtctttaactgaatctgccagatggatatcacaagggaattatgctgtctctgacatcaagaagtcgccggatggtacccgagtcgtagggaaatgcggtggttactgtggaaaatgcactccatcctctggtactggcctggaggtgcgagttttatagctaaggaaaattgcctccagctgcatccatattgctgcaaaggacatgatttcattattttttatggctgcatagtatttcatcatgtatacagaccacatttttaaaatccagtccaccattaatcggtacctaggttgattccacgtttgctattgtgaatagtgctgcaataaacatgtgagtgcaggtg

SEQ ID NO: 257276 - DNA, 7464 bp, Artificial Sequence
  derived and/or modified sequence
acagggcgcccggcgcgcctcggagcgcaagttcctcgccttctcctgcccgctcgctgggcattatgcggccaagcagccgagccccagtcctcctcctcctcctgctcctccggctcctcctgcggcccgagcggctcagctctcggcaggcggcggcgttgctcagccgagcgcagacgggaccctcgcagcgagacctcagcgactcctaaagtcaaaagttggcggcgggcgccgggctccgcgcgctctccacggccgctgcctcgcgtcgccgccgcagccaaggagggcaggagggaggggggtgggggcagcggagggaggggtgggaagcaccatgcagtttgtatcctgggccacactgctaacgctcctggtgcgggacctggccgagatggggagcccagacgccgcggcggccgtgcgcaaggacaggctgcacccgaggcaagtgaaattattagagaccctgagcgaatacgaaatcgtgtctcccatccgagtgaacgctctcggagaaccctttcccacgaacgtccacttcaaaagaacgcgacggagcattaactctgccactgacccctggcctgccttcgcctcctcctcttcctcctctacctcctcccaggcgcattaccgcctctctgccttcggccagcagtttctatttaatctcaccgccaatgccggatttatcgctccactgttcactgtcaccctcctcgggacgcccggggtgaatcagaccaagttttattccgaagaggaagcggaactcaagcactgtttctacaaaggctatgtcaataccaactccgagcacacggccgtcatcagcctctgctcaggaatgctgggcacattccggtctcatgatggggattattttattgaaccactacagtctatggatgaacaagaagatgaagaggaacaaaacaaaccccacatcatttataggcgcagcgccccccagagagagccctcaacaggaaggcatgcatgtgacacctcagaacacaaaaataggcacagtaaagacaagaagaaaaccagagcaagaaaatggggagaaaggattaacctggctggtgacgtagcagcattaaacagcggcttagcaacagaggcattttctgcttatggtaataagacggacaacacaagagaaaagaggacccacagaaggacaaaacgttttttatcctatccacggtttgtagaagtcttggtggtggcagacaacagaatggtttcataccatggagaaaaccttcaacactatattttaactttaatgtcaattgtagcctctatctataaagacccaagtattggaaatttaattaatattgttattgtgaacttaattgtgattcataatgaacaggatgggccttccatatcttttaatgctcagacaacattaaaaaacttttgccagtggcagcattcgaagaacagtccaggtggaatccatcatgatactgctgttctcttaacaagacaggatatctgcagagctcacgacaaatgtgataccttaggcctggctgaactgggaaccatttgtgatccctatagaagctgttctattagtgaagatagtggattgagtacagcttttacgatcgcccatgagctgggccatgtgtttaacatgcctcatgatgacaacaacaaatgtaaagaagaaggagttaagagtccccagcatgtcatggctccaacactgaacttctacaccaacccctggatgtggtcaaagtgtagtcgaaaatatatcactgagtttttagacactggttatggcgagtgtttgcttaacgaacctgaatccagaccctaccctttgcctgtccaactgccaggcatcctttacaacgtgaataaacaatgtgaattgatttttggaccaggttctcaggtgtgcccatatatgatgcagtgcagacggctctggtgcaataacgtcaatggagtacacaaaggctgccggactcagcacacaccctgggccgatgggacggagtgcgagcctggaaagcactgcaagtatggattttgtgttcccaaagaaatggatgtccccgtgacagatggatcctggggaagttggagtccctttggaacctgctccagaacatgtggagggggcatcaaaacagccattcgagagtgcaacagaccagaaccaaaaaatggtggaaaatactgtgtaggacgtagaatgaaatttaagtcctgcaacacggagccatgtctcaagcagaagcgagacttccgagatgaacagtgtgctcactttgacgggaagcattttaacatcaacggtctgcttcccaatgtgcgctgggtccctaaatacagtggaattctgatgaaggaccggtgcaagttgttctgcagagtggcagggaacacagcctactatcagcttcgagacagagtgatagatggaactccttgtggccaggacacaaatgatatctgtgtccagggcctttgccggcaagctggatgcgatcatgttttaaactcaaaagcccggagagataaatgtggggtttgtggtggcgataattcttcatgcaaaacagtggcaggaacatttaatacagtacattatggttacaatactgtggtccgaattccagctggtgctaccaatattgatgtgcggcagcacagtttctcaggggaaacagacgatgacaactacttagctttatcaagcagtaaaggtgaattcttgctaaatggaaactttgttgtcacaatggccaaaagggaaattcgcattgggaatgctgtggtagagtacagtgggtccgagactgccgtagaaagaattaactcaacagatcgcattgagcaagaacttttgcttcaggttttgtcggtgggaaagttgtacaaccccgatgtacgctattctttcaatattccaattgaagataaacctcagcagttttactggaacagtcatgggccatggcaagcatgcagtaaaccctgccaaggggaacggaaacgaaaacttgtttgcaccagggaatctgatcagcttactgtttctgatcaaagatgcgatcggctgccccagcctggacacattactgaaccctgtggtacagactgtgacctgaggtggcatgttgccagcaggagtgaatgtagtgcccagtgtggcttgggttaccgcacattggacatctactgtgccaaatatagcaggctggatgggaagactgagaaggttgatgatggtttttgcagcagccatcccaaaccaagcaaccgtgaaaaatgctcaggggaatgtaacacgggtggctggcgctattctgcctggactgaatgttcaaaaagctgtgacggtgggacccagaggagaagggctatttgtgtcaatacccgaaatgatgtactggatgacagcaaatgcacacatcaagagaaagttaccattcagaggtgcagtgagttcccttgtccacagtggaaatctggagactggtcagagtgcttggtcacctgtggaaaagggcataagcaccgccaggtctggtgtcagtttggtgaagatcgattaaatgatagaatgtgtgaccctgagaccaagccaacatctatgcagacttgtcagcagccggaatgtgcatcctggcaggcgggtccctggggacagtgcagtgtcacttgtggacagggataccagctaagagcagtgaaatgcatcattgggacttatatgtcagtggtagatgacaatgactgtaatgcagcaactagaccaactgatacccaggactgtgaattaccatcatgtcatcctcccccagctgccccggaaacgaggagaagcacatacagtgcaccaagaacccagtggcgatttgggtcttggaccccatgctcagccacttgtgggaaaggtacccggatgagatacgtcagctgccgagatgagaatggctctgtggctgacgagagtgcctgtgctaccctgcctagaccagtggcaaaggaagaatgttctgtgacaccctgtgggcaatggaaggccttggactggagctcttgctctgtgacctgtgggcaaggtagggcaacccggcaagtgatgtgtgtcaactacagtgaccacgtgatcgatcggagtgagtgtgaccaggattatatcccagaaactgaccaggactgttccatgtcaccatgccctcaaaggaccccagacagtggcttagctcagcaccccttccaaaatgaggactatcgtccccggagcgccagccccagccgcacccatgtgctcggtggaaaccagtggagaactggcccctggggagcatgttccagtacctgtgctggcggatcccagcggcgtgttgttgtatgtcaggatgaaaatggatacaccgcaaacgactgtgtggagagaataaaacctgatgagcaaagagcctgtgaatccggcccttgtcctcagtgggcttatggcaactggggagagtgcactaagctgtgtggtggaggcataagaacaagactggtggtctgtcagcggtccaacggtgaacggtttccagatttgagctgtgaaattcttgataaacctcccgatcgtgagcagtgtaacacacatgcttgtccacacgacgctgcatggagtactggcccttggagctcgtgttctgtctcttgtggtcgagggcataaacaacgaaatgtttactgcatggcaaaagatggaagccatttagaaagtgattactgtaagcacctggctaagccacatgggcacagaaagtgccgaggaggaagatgccccaaatggaaagctggcgcttggagtcagtgctctgtgtcctgtggccgaggcgtacagcagaggcatgtgggctgtcagatcggaacacacaaaatagccagagagaccgagtgcaacccatacaccagaccggagtcggaacgcgactgccaaggcccacggtgtcccctctacacttggagggcagaggaatggcaagaatgcaccaagacctgcggcgaaggctccaggtaccgcaaggtggtgtgtgtggatgacaacaaaaacgaggtgcatggggcacgctgtgacgtgagcaagcggccggtggaccgtgaaagctgtagtttgcaaccctgcgagtatgtctggatcacaggagaatggtcagagtgctcagtgacctgtggaaaaggctacaaacaaaggcttgtctcgtgcagcgagatttacaccgggaaggagaattatgaatacagctaccaaaccaccatcaactgcccaggcacgcagccccccagtgttcacccctgttacctgagggactgccctgtctcggccacctggagagttggcaactgggggagctgctcagtgtcttgtggtgttggagtgatgcagagatctgtgcaatgtttaaccaatgaggaccaacccagccacttatgccacactgatctgaagccagaagaacgaaaaacctgccgtaatgtctataactgtgagttaccccagaattgcaaggaggtaaaaagacttaaaggtgccagtgaagatggtgaatatttcctgatgattagaggaaagcttctgaagatattctgtgcggggatgcactctgaccaccccaaagagtacgtgacactggtgcatggagactctgagaatttctccgaggtttatgggcacaggttacacaacccaacagaatgtccctataacgggagccggcgcgatgactgccaatgtcggaaggattacacggccgctgggttttccagttttcagaaaatcagaatagacctgaccagcatgcagataatcaccactgacttacagtttgcaaggacaagcgaaggacatcccgtcccttttgccacagccggggattgctacagcgctgccaagtgcccacagggtcgttttagcatcaacctttatggaaccggcttgtctttaactgaatctgccagatggatatcacaagggaattatgctgtctctgacatcaagaagtcgccggatggtacccgagtcgtagggaaatgcggtggttactgtggaaaatgcactccatcctctggtactggcctggaggtgcgagttttatagctaaggtgctttgaagaggaagccattatggatggatgaaggatagtaatgcaatacctccaccttaatttgggtgcatgtgtatgtgtgtgtgtgtttgtgtgtgacttgtatgcttgtgtgtgtaaatgtgtgtacatatacatatatacatatctacacatacatatatacacatatatgtgtgtatgtagatatgtagactatcctaatgatgtaaagtttaatatttatgtttgaaattatttattgtgatgtaatatttttgtacgtaaaatgattctattatgactgcctttgcatgtagtaatatgacaaagtgatccttcattatcacggtacactattgtttacttttcatctgtaaatgttttattgttacttttttaaaatgaatttttttaaaacaatctagccatcatcaaggtgctataagagttgtataaaagatatttttggcatttctaggcaagtatcagccaataagtatgttagtgatatcacagattgtaccaactattaactatgttaaataagtattcagtttcatgtgatctctgggaaaaaaatatgctgccttggtgctaatattgtatgtatttaaatgatcatccgactcagaaatataaacacttttaatgaaagggaggaacggaaggacaatttccagtgcacagaatcacttggatgaaataagaccagctctttacccttatttttggatatgccttttttggaagagacttagactttatccttattgttgttagtgttgttaatattcgttgcttcagcccacggtgccttggtctctccacaatcaaatggaggatcccccaagcagcttcattacagagtgatattgggaaagtgagatcctctcaccattttgccaagatactctaaaatgacatccaagtttaccagtagaaagacacaggatgcacagaatgggcatgaccttcagctcacgagcacacctggagaaattcagaaccaggttctgaatcatcacgattgccttttgcatgaaaacatcggctggtgatgtgacttctcttcaggccatgagcctaacaccctgccggttttcatgcccgctgcagtaatggacgtttgtgtgaagaaatgaactgtggagtacaaaatgctttgagtctttccgattgctcattaattcacttttttgttacttctttccaaaatggaagtgctgaagccatggtctttctgcccctccaagctgatgaagggaagcctttgccaatggcccatggaagacacttggtttgagaaaccctgcccacttccaa

SEQ ID NO: 257277 - DNA, 2976 bp, Artificial Sequence
  derived and/or modified sequence
tgagaatgtagtgcccagtgcgggcttggctaccgcactttagatatctattgcgccaagtactcaagactggacgggaaaacagaaaaggtggacgatggcttctgctctagccatcccaagccgtctaatcgagaaaaatgctccggggagtgcaacacggggggctggaggtacagcgcttggaccgaatgttcgaagtcctgcgatgggggaacgcagaggagacgagcgatctgtgttaatactcgcaacgacgtgcttgatgactccaaatgtactcaccaagagaaggtcactattcagaggtgctccgaattcccatgtccacagtggaagtccggggactggtccgagtgtttagttacatgcggaaagggacataaacacaggcaggtttggtgccaattcggcgaggaccggctaaacgatcgcatgtgtgaccctgaaactaagcctacatctatgcaaacctgccagcagcccgaatgcgctagctggcaggcgggaccgtggggacagtgttcagtgacatgtggccaaggttaccaattgcgcgcagttaaatgtatcatcgggacctacatgtcagtggtggacgacaacgattgcaacgcagcgactaggcccaccgatacacaggactgcgagctgcctagctgccacccaccccccgctgcgcctgagacccggcggtccacatactcggcccctaggacccaatggagattcggcagttggaccccatgcagtgccacttgcggcaaggggactcggatgcgttacgtcagttgcagggatgaaaatggaagtgtggcggacgaatcagcctgtgcaactctgccgaggccggttgccaaagaggagtgcagcgtgaccccttgcgggcaatggaaggcactggattggtcctcatgcagtgtgacatgcggccagggtcgtgcgacgaggcaggtgatgtgtgttaactactctgatcacgtgattgacagatctgaatgtgaccaggactacattccagaaacagatcaggattgttccatgagtccgtgtcctcagcgcacgcctgattctggactcgctcagcatcctttccagaacgaagactatcgaccacggagcgcatctccctcgagaacccacgtgctgggtggaaatcagtggaggaccggcccttggggagcctgctcatctacctgtgctggcggtagccaacgcagggtcgtagtgtgtcaggacgagaatggctatactgccaacgattgcgtagaacgcattaaacccgatgaacagagagcttgtgagagcggcccttgccctcagtgggcctacggcaattggggcgagtgtaccaaactatgcggcggagggatccggacccggttagtcgtttgccagagatccaacggcgaaaggtttcctgacctgtcttgtgaaattttggataagcctcctgatcgtgaacaatgcaacacccatgcctgtccacacgacgcggcctggtcaacaggtccgtggagcagctgttccgttagttgcggcagaggccacaaacagcgtaacgtctactgtatggctaaagacgggagccacctggagagcgactactgcaagcacctggccaaaccccatggccatcgcaagtgtcgcgggggaagatgtcctaagtggaaagctggggcgtggtcacagtgctcagttagctgtggcaggggggtccaacagcgccatgtagggtgccagatcgggacacacaagatagctcgcgagacggagtgcaatccatataccagaccggaatctgagcgtgactgccagggtcccagatgtccgctgtatacatggagagccgaggaatggcaggagtgcacgaagacttgtggagaaggcagccggtatcgcaaagttgtctgtgtggacgacaataagaacgaggttcacggcgccaggtgcgacgtgagtaagaggcctgtggaccgtgaatcatgcagcctgcagccatgcgaatacgtgtggatcactggagaatggtccgaatgctccgtaacatgcggtaaaggatataaacagcgcctggtgagttgttctgaaatctacacaggaaaagagaactacgaatacagctatcagaccactatcaactgccctgggacacagccaccttccgtccatccgtgttacttgagggactgcccagtgagcgctacctggcgcgtgggaaactggggcagctgtagcgtgtcctgtggcgttggggtcatgcagcgttcggtccagtgccttaccaatgaggatcaaccatcgcacctctgtcatacagacttaaagccagaagaaaggaagacctgcaggaacgtgtacaactgcgagcttccccagaattgcaaagaagtgaaaagactgaagggcgcgtctgaggatggcgaatactttttgatgattagaggaaaactactgaagatcttctgtgcgggaatgcactctgaccatccgaaagagtacgtgacccttgtccacggagattccgagaatttttctgaagtttacggtcatcggctgcacaatcccacggagtgtccatacaacgggagtcgcagggacgactgtcaatgccgaaaggattatactgccgcgggtttctcctccttccagaagatcaggatcgatctcacaagtatgcaaattatcacaacagacctgcagttcgccagaacatccgaaggacatcccgtgcctttcgctaccgccggggattgttactcagccgcgaagtgtcctcaaggacgcttctccataaacctatacggaacagggttgagcctgaccgagtccgcccgatggatcagtcaaggtaactacgccgtatccgacatcaagaagtcaccagatggcacacgcgtggtcgggaaatgcggtggatactgtggtaagtgtactccttcaagcgggaccggcttggaggttcgggttctctag

SEQ ID NO: 257278 - DNA, 5808 bp, Artificial Sequence
  derived and/or modified sequence
atgcagtttgtgtcttgggccacgctgctgactctcctggtgcgggaccttgctgagatgggctccccagacgctgctgccgctgtaaggaaagacagactgcacccacgccaggtgaaattgcttgagacattgtctgagtacgaaatcgtgtctccaatcagggtgaacgcgttaggggaaccattccccacaaacgtccactttaaaagaactcgcagaagtataaactccgctactgacccctggccggctttcgccagctcctctagttctagtacttcaagccaggcccattatcgcctgagtgcctttgggcaacagtttctgtttaatcttacggccaacgctggctttatcgccccattgtttacggtcacgttacttggaacaccaggagtgaaccagaccaaattttactccgaggaagaagccgagctgaaacactgtttctataaaggctacgtaaataccaactccgagcatacagccgtgatatctctctgctcgggcatgctgggtacatttagatcccacgacggcgattactttatcgaaccacttcagtcgatggacgaacaggaggacgaagaggagcagaataagccccatatcatttaccggcgcagtgccccccagcgggaaccctcaacggggcggcacgcttgtgacaccagcgagcacaagaacaggcatagtaaggacaaaaagaagactagggccagaaaatggggagaaagaattaatttggccggggacgtggccgccctgaactcgggcctcgctacagaggcatttagcgcctatggcaacaaaactgacaacactagagaaaagagaacccaccgccggacgaagcggttccttagttacccgagatttgttgaagtgctggtggtggccgacaacaggatggtttcgtaccatggagagaatctgcagcactatattctgacgttgatgtctatcgtcgctagtatttataaggatccgtccatcggcaatttgatcaatatcgtgattgttaacttgatcgtcatccataacgaacaagacggcccaagcattagtttcaacgcccaaaccactcttaaaaacttctgccaatggcaacatagcaagaacagtcccggcggcatacaccatgataccgctgttctgctaactaggcaagatatctgtagggctcacgacaagtgcgacactttgggactggctgaactcggaacgatatgcgatccataccgctcttgcagtatctcagaggattctgggctgtcaaccgcgtttactatcgctcacgagctcgggcacgtcttcaatatgccgcacgacgataataataaatgtaaagaagaaggagtgaagagccctcagcatgtgatggctccaacactgaatttctatacaaacccatggatgtggtcaaagtgttcgagaaaatacatcaccgaatttctagatacaggatatggcgaatgtcttctcaatgagcccgagagccgaccttatcccctgcccgtccaattaccgggcatcctatataatgtgaacaaacagtgtgagctaatctttggtcctggctcacaggtgtgcccttacatgatgcaatgtcgcagactgtggtgcaacaatgtgaatggggtgcacaagggttgcaggacccagcacactccgtgggctgacggaactgagtgtgaacccggcaaacactgcaagtatggtttctgtgtgcctaaagagatggacgtgccagtcacagacggttcatgggggtcttggtctccctttgggacttgctcccggacatgtggcggtggcattaaaaccgcaattcgtgaatgtaaccggcccgagcctaagaatggcggaaagtattgtgtaggaaggaggatgaaatttaagagttgcaacaccgaaccctgtcttaagcagaaacgagattttagggacgaacagtgtgcacattttgacgggaaacactttaacattaatggactgctacctaacgtgcggtgggtacccaagtattctgggatcttgatgaaggatcgctgcaagctgttttgtcgagtagctggaaataccgcatactaccagcttagggatcgcgtgatagatggtaccccatgcggccaggacacaaatgacatctgcgtgcaagggctgtgccgacaggccggctgtgatcatgtccttaattccaaggcacgcagagataagtgtggcgtgtgcggaggggataactctagttgtaagacggtggccggcacctttaatactgtgcattatggctacaatactgtggtccgcattcctgccggagcaaccaatatcgacgttcgacagcatagcttctctggcgaaacagatgatgacaactatctcgccctgtcttcctctaaaggagagtttttgcttaacggaaacttcgtcgtcaccatggccaagagggaaattaggatcggcaatgcggtcgtggaatactcgggatccgagacagccgttgagcgcatcaattccaccgatcggatcgagcaggaacttctccttcaagttttgtcggttgggaaactttataatccagacgtgagatactcattcaatattcctatcgaggacaagccacagcagttctattggaacagccacggaccttggcaggcatgctcaaaaccttgccagggtgagaggaagaggaagttggtctgcacgcgcgagtctgatcagttaaccgtctccgatcaacggtgtgaccgcctgccacagccgggccacattaccgaaccctgtggaaccgactgcgatctccgctggcacgtggcatcccgtagcgagtgctctgcacagtgcggcctcggatatcgcacactcgacatctattgcgccaagtacagccgcctggatgggaagacagagaaagtggatgacgggttctgcagctctcatccgaagccgtcaaaccgagagaaatgctcgggggagtgcaataccggcggctggcgttattcagcctggactgagtgttccaagtcatgcgatggcggaactcagcggaggcgggccatctgtgttaatacacgtaacgacgttcttgacgacagtaaatgtacacaccaggagaaggttactatccagcggtgcagtgagttcccgtgtccacagtggaagagcggcgactggagcgagtgcctggtcacgtgcgggaaaggccacaaacacagacaagtgtggtgtcagtttggtgaagaccgccttaatgatcggatgtgtgatcctgaaaccaaacctacctccatgcagacttgccaacagcctgagtgcgcctcttggcaagcgggtccatggggccagtgctctgtgacctgtggtcagggctaccaactccgagctgtgaaatgcatcatcggaacctatatgagtgtggtcgacgacaatgattgtaatgcagctacccgtcccaccgatacgcaggactgtgagctgccctcttgtcatcccccacctgctgcgcccgagactaggcggagcacttatagcgccccaaggacccagtggcgtttcggctcctggactccttgctctgccacctgtggaaaaggtacacggatgcgctacgtgtcctgtagggatgagaatggaagcgtggcagatgaaagcgcatgcgctacgttaccccgaccagtcgccaaggaggaatgcagcgtgactccctgtggacaatggaaggcactggactggtccagctgttcagtcacctgtggacagggacgagcaactagacaagtgatgtgtgttaactactctgaccacgttatcgaccgcagcgaatgtgatcaggattacatcccagagaccgaccaggattgttccatgtccccttgtcctcagaggacccccgacagcggtttggcccagcaccctttccagaacgaggattacagaccgaggtcagcttcaccctccagaacccatgttctgggcgggaatcagtggcgcaccggaccatggggcgcatgttcttccacatgcgccggcgggtcacagcggagagtggtcgtttgccaagacgaaaacggatacacagccaatgactgcgtagaacgtataaagcccgatgagcaacgcgcatgcgagagcgggccttgcccccagtgggcctatggcaactggggagaatgtaccaagctgtgtgggggaggcattagaacacgactggtcgtatgccagcgaagtaacggcgagcggtttccagatctgtcctgtgagattctcgataagccacctgatcgggaacagtgtaacacgcatgcttgtccgcacgatgcagcatggagcacaggcccctggtccagttgtagtgtcagctgtggacgagggcacaagcagagaaatgtgtactgtatggctaaggacgggagtcacctggagagtgattattgcaaacaccttgctaaaccacacggccatcgaaagtgcaggggcggcagatgccccaagtggaaagctggcgcttggtcacagtgttccgtgagctgcggcaggggggtccaacagaggcatgttgggtgtcagatcggcacacacaaaatcgcaagggagacagagtgcaacccctatacccgacccgaaagtgaacgcgactgccagggtccgcggtgccccctgtacacgtggagggctgaggaatggcaggagtgcacaaaaacctgtggcgagggatcaagatacagaaaggtggtctgcgttgacgataataaaaacgaagttcacggtgcgaggtgtgacgtcagcaaacgtcctgttgatagagagagttgctctctgcagccttgtgagtatgtctggatcacaggggagtggagtgaatgcagtgtgacgtgtgggaagggatacaaacagagattggtgtcctgcagcgaaatttataccgggaaggaaaactacgaatatagctaccagaccacaataaactgcccaggcacccaaccacccagtgttcatccttgctatctaagggactgccccgtatcagctacatggcgggttggtaattgggggagctgcagcgtttcatgcggcgtgggtgtaatgcagcgatccgtgcagtgcttgacaaatgaagatcaacccagtcacctctgccacaccgacctcaaaccagaggaaaggaaaacgtgtagaaatgtgtacaactgcgagcttcctcagaactgcaaagaagtgaagagattgaagggagcctcggaagacggtgaatactttctgatgatcaggggcaagttgctcaagatcttttgcgcagggatgcacagcgatcaccctaaggagtacgtaactcttgtgcacggagactcagaaaattttagcgaggtctatggacacagactgcacaatccaaccgagtgcccatacaatgggtctagaagggacgattgtcagtgtagaaaggactatacagcggccggtttcagttcattccagaaaatcaggatcgaccttacctcaatgcaaattattaccactgatctccagttcgcacgcacctcagaaggacacccagtgcccttcgcaacagcaggagattgctatagtgccgccaagtgtccccagggaagattctccatcaatctctacggcaccggactgagtttaaccgagtccgccaggtggatctctcagggaaattatgcagtctcggatatcaaaaagtcccctgatggaacccgtgtggtgggaaagtgcggtgggtactgtgggaaatgcacaccatcctctggaacgggattggaggtaagagttctgtag

SEQ ID NO: 257279 - DNA, 2976 bp, Artificial Sequence
  derived and/or modified sequence
tgagaatgttctgcccagtgtggcctgggctaccgcaccctggacatctactgtgccaagtacagccggctggatggcaagacagagaaggtggatgatggcttctgcagcagccaccccaagcccagcaaccgggagaagtgcagcggggagtgcaacacaggaggctggagatacagcgcctggacagagtgcagcaagagctgtgatggcggcacccagaggcggcgggccatctgtgtgaacaccagaaatgatgtgctggatgacagcaagtgcacccaccaggagaaggtgaccatccagcgctgcagcgagttcccctgcccccagtggaagagcggggactggagcgaatgtctggtgacctgtgggaagggccacaagcaccggcaggtgtggtgccagtttggagaagatcggctgaatgacaggatgtgtgaccctgagaccaagcccacctccatgcagacctgccagcagccagaatgtgcctcctggcaggccggcccctggggccagtgcagcgtgacctgtggccagggctaccagctgcgggctgtgaagtgcatcatcggcacctacatgtctgtggtggatgacaatgactgcaatgctgccacccggcccacagacacccaggactgtgagctgcccagctgccaccccccacctgctgcccctgagaccaggaggagcacctacagcgcccccaggacccagtggaggtttggctcctggaccccctgcagcgccacctgtgggaagggcaccaggatgagatatgtgtcctgcagagatgaaaatggatctgtggctgatgagagcgcctgtgccaccctgcccaggcctgtggccaaggaggagtgcagcgtgaccccctgtggccagtggaaggccctggactggagcagctgcagcgtgacctgtggccagggccgggccacccggcaggtgatgtgtgtgaactacagcgaccacgtgattgacagaagtgaatgtgaccaggactacatccctgagacagaccaggactgcagcatgagcccctgcccccagaggaccccagacagcggcctggcccagcaccccttccagaatgaagactaccggcccaggtctgccagccccagcaggacccacgtgctgggcggcaaccagtggaggacaggcccctggggcgcctgcagcagcacctgtgccggcggcagccagaggagagtggtggtgtgccaggatgaaaatggctacacagccaatgactgtgtggagcgcatcaagccagatgagcagagggcctgtgagagcggcccctgcccccagtgggcctacggcaactggggagaatgtaccaagctgtgtggcggcggcatccgcacccggctggtggtgtgccagaggagcaatggagagcgcttcccagacctgagctgtgagatcctggacaagcccccagaccgggagcagtgcaacacccacgcctgcccccatgatgctgcctggagcacaggcccctggagcagctgcagcgtgtcctgtggccggggccacaagcagagaaatgtgtactgcatggccaaggatggcagccacctggagagtgactactgcaagcacctggccaagccccacggccacaggaagtgccggggcggccgctgccccaagtggaaggccggggcctggagccagtgcagcgtgtcctgtggccggggcgtgcagcagagacatgtgggctgccagatcggcacccacaagatcgcccgggagacagagtgcaacccctacaccaggcctgagagcgagcgggactgccagggcccccgctgccccctgtacacctggagggctgaggagtggcaggagtgcaccaagacctgtggggagggcagccgctacaggaaggtggtgtgtgtggatgacaacaagaatgaggtgcatggagcccgctgtgatgtgtccaagaggcctgtggaccgggagagctgcagcctgcagccctgtgaatatgtgtggatcaccggggagtggagcgaatgttctgtgacctgtgggaagggctacaagcagaggctggtgtcctgcagcgagatctacaccgggaaggaaaattatgagtacagctaccagaccaccatcaactgccccggcacccagccccccagcgtgcacccctgctacctgcgggactgccctgtgtctgccacctggagggtgggcaactggggcagctgcagcgtgtcctgtggggtgggcgtgatgcagaggtctgtgcagtgcctgaccaatgaagaccagcccagccacctgtgccacacagacctgaagccagaggagaggaagacctgcagaaatgtgtacaactgtgagctgccccagaactgcaaggaggtgaagaggctgaagggggcctctgaagatggagagtacttcctgatgatccggggcaagctgctgaagatcttctgtgccggcatgcacagcgaccaccccaaggagtatgtgaccctggtgcatggagacagcgagaacttcagcgaggtgtatggccaccggctgcacaaccccacagagtgcccctacaacggcagcagaagagatgactgccagtgcaggaaggactacacagctgctggcttcagcagcttccagaagatcagaattgacctgacctccatgcagatcatcaccacagacctgcagtttgcccggaccagcgagggccaccctgtgccctttgccacagctggggactgctacagcgctgccaagtgcccccagggccgcttcagcatcaacctgtatggaacaggcctgagcctgacagagagcgcccgctggatcagccagggcaactatgctgtgtctgacatcaagaagagcccagatggcaccagggtggtgggcaaatgtggcggctactgtgggaagtgcacccccagcagcggcaccggcctggaggtgcgggtgctgtag

SEQ ID NO: 257280 - DNA, 5808 bp, Artificial Sequence
  derived and/or modified sequence
atgcagtttgtgtcctgggccaccctgctgaccctgctggtgcgggacctggccgagatgggcagcccagatgctgctgctgctgtgaggaaggaccggctgcacccccggcaggtgaagctgctggagaccctgtctgaatatgagatcgtgagccccatccgggtgaatgccctgggggagcccttccccaccaacgtgcacttcaagaggaccaggaggagcatcaacagcgccacagacccctggccagcctttgccagcagcagcagcagcagcaccagcagccaggcccactaccgcctgagcgccttcggccagcagttcctgttcaacctgacagccaatgccggcttcatcgcccccctcttcaccgtgaccctgctgggcaccccaggagtgaaccagaccaagttctacagcgaggaggaggccgagctgaagcactgcttctacaagggctacgtgaacaccaacagcgagcacacagctgtgatcagcctgtgcagcggcatgctgggcaccttccgcagccatgatggagactacttcatcgagcccctgcagagcatggatgagcaggaggatgaggaggagcagaacaagccccacatcatctaccgccgcagcgccccccagcgggagcccagcactggaagacatgcctgtgacaccagcgagcacaagaacagacacagcaaggacaagaagaagacccgggccaggaagtggggcgagcgcatcaacctggccggagatgtggccgccctgaacagcggcctggccacagaggccttcagcgcctacggcaacaagacagacaacacccgggagaagaggacccacaggaggaccaagcgcttcctgagctaccccaggtttgtggaggtgctggtggtggccgacaacaggatggtgtcctaccatggagagaacctgcagcactacatcctgaccctgatgagcatcgtggccagcatctacaaggaccccagcatcggcaacctgatcaacatcgtgattgtgaacctgattgtcatccacaatgagcaggacggccccagcatctccttcaatgcccagaccaccctgaagaacttctgccagtggcagcacagcaagaacagccctgggggcatccaccacgacacagctgtgctgctgacccggcaggacatctgccgggcccatgacaagtgtgacaccctgggcctggccgagctgggcaccatctgtgacccctaccgcagctgcagcatcagcgaggacagcggcctgagcacagccttcaccatcgcccacgagctgggccacgtgttcaacatgcctcatgatgacaacaacaagtgcaaggaggagggcgtgaagagcccccagcacgtgatggcccccaccctgaacttctacaccaacccctggatgtggagcaagtgcagcaggaagtacatcacagagttcctggacaccggctatggagaatgtctgctgaatgaacctgagagccggccctaccccctgcctgtgcagctgcccggcatcctgtacaacgtgaacaagcagtgtgagctgatctttggacctggcagccaggtgtgcccctacatgatgcagtgccggcggctgtggtgcaacaacgtgaatggagtgcacaagggctgcaggacccagcacaccccctgggcagatggaacagaatgtgagcccgggaagcactgcaagtatggcttctgtgtgcccaaggagatggatgtgcctgtgacagatggctcctggggctcctggagccccttcggcacctgcagcaggacctgtggcggcggcatcaagacagccatccgggagtgcaacagacctgagcccaagaatggaggcaagtactgtgtgggccgcaggatgaagttcaagagctgcaacacagagccctgcctgaagcagaagagggacttcagagatgagcagtgtgcccactttgatggcaagcacttcaacatcaatggcctgctgcccaacgtgcgctgggtgcccaagtacagcggcatcctgatgaaggaccgctgcaagctgttctgccgggtggccggcaacacagcctactaccagctgcgggacagagtgattgatggcaccccctgtggccaggacaccaatgacatctgtgtgcagggcctgtgccggcaggccggctgtgaccacgtgctgaacagcaaggcccggcgggacaagtgtggggtgtgtggcggggacaacagcagctgcaagacagtggccggcaccttcaacacagtgcactacggctacaacacagtggtgcgcatcccagctggggccaccaacattgatgtgcggcagcacagcttctctggagaaacagatgatgacaactacctggccctgagcagcagcaagggggagttcctgctgaatggaaactttgtggtgaccatggccaagcgggagatcagaattggaaatgctgtggtggagtacagcggcagcgagacagctgtggagcgcatcaacagcacagacagaattgagcaggagctgctgctgcaggtgctgtctgtgggcaagctgtacaacccagatgtgcgctacagcttcaacatccccatcgaggacaagccccagcagttctactggaacagccacggcccctggcaggcctgcagcaagccctgccagggcgagaggaagaggaagctggtgtgcacccgggagagtgaccagctgactgtgtctgaccagagatgtgaccggctgccccagcccggccacatcacagagccctgtggcacagactgtgacctgcgctggcacgtggccagccgctctgagtgcagcgcccagtgtggcctgggctaccgcaccctggacatctactgtgccaagtacagccggctggatggcaagacagagaaggtggatgatggcttctgcagcagccaccccaagcccagcaaccgggagaagtgcagcggggagtgcaacacaggaggctggagatacagcgcctggacagagtgcagcaagagctgtgatggcggcacccagaggcggcgggccatctgtgtgaacaccagaaatgatgtgctggatgacagcaagtgcacccaccaggagaaggtgaccatccagcgctgcagcgagttcccctgcccccagtggaagagcggggactggagcgaatgtctggtgacctgtgggaagggccacaagcaccggcaggtgtggtgccagtttggagaagatcggctgaatgacaggatgtgtgaccctgagaccaagcccacctccatgcagacctgccagcagccagaatgtgcctcctggcaggccggcccctggggccagtgcagcgtgacctgtggccagggctaccagctgcgggctgtgaagtgcatcatcggcacctacatgtctgtggtggatgacaatgactgcaatgctgccacccggcccacagacacccaggactgtgagctgcccagctgccaccccccacctgctgcccctgagaccaggaggagcacctacagcgcccccaggacccagtggaggtttggctcctggaccccctgcagcgccacctgtgggaagggcaccaggatgagatatgtgtcctgcagagatgaaaatggatctgtggctgatgagagcgcctgtgccaccctgcccaggcctgtggccaaggaggagtgcagcgtgaccccctgtggccagtggaaggccctggactggagcagctgcagcgtgacctgtggccagggccgggccacccggcaggtgatgtgtgtgaactacagcgaccacgtgattgacagaagtgaatgtgaccaggactacatccctgagacagaccaggactgcagcatgagcccctgcccccagaggaccccagacagcggcctggcccagcaccccttccagaatgaagactaccggcccaggtctgccagccccagcaggacccacgtgctgggcggcaaccagtggaggacaggcccctggggcgcctgcagcagcacctgtgccggcggcagccagaggagagtggtggtgtgccaggatgaaaatggctacacagccaatgactgtgtggagcgcatcaagccagatgagcagagggcctgtgagagcggcccctgcccccagtgggcctacggcaactggggagaatgtaccaagctgtgtggcggcggcatccgcacccggctggtggtgtgccagaggagcaatggagagcgcttcccagacctgagctgtgagatcctggacaagcccccagaccgggagcagtgcaacacccacgcctgcccccatgatgctgcctggagcacaggcccctggagcagctgcagcgtgtcctgtggccggggccacaagcagagaaatgtgtactgcatggccaaggatggcagccacctggagagtgactactgcaagcacctggccaagccccacggccacaggaagtgccggggcggccgctgccccaagtggaaggccggggcctggagccagtgcagcgtgtcctgtggccggggcgtgcagcagagacatgtgggctgccagatcggcacccacaagatcgcccgggagacagagtgcaacccctacaccaggcctgagagcgagcgggactgccagggcccccgctgccccctgtacacctggagggctgaggagtggcaggagtgcaccaagacctgtggggagggcagccgctacaggaaggtggtgtgtgtggatgacaacaagaatgaggtgcatggagcccgctgtgatgtgtccaagaggcctgtggaccgggagagctgcagcctgcagccctgtgaatatgtgtggatcaccggggagtggagcgaatgttctgtgacctgtgggaagggctacaagcagaggctggtgtcctgcagcgagatctacaccgggaaggaaaattatgagtacagctaccagaccaccatcaactgccccggcacccagccccccagcgtgcacccctgctacctgcgggactgccctgtgtctgccacctggagggtgggcaactggggcagctgcagcgtgtcctgtggggtgggcgtgatgcagaggtctgtgcagtgcctgaccaatgaagaccagcccagccacctgtgccacacagacctgaagccagaggagaggaagacctgcagaaatgtgtacaactgtgagctgccccagaactgcaaggaggtgaagaggctgaagggggcctctgaagatggagagtacttcctgatgatccggggcaagctgctgaagatcttctgtgccggcatgcacagcgaccaccccaaggagtatgtgaccctggtgcatggagacagcgagaacttcagcgaggtgtatggccaccggctgcacaaccccacagagtgcccctacaacggcagcagaagagatgactgccagtgcaggaaggactacacagctgctggcttcagcagcttccagaagatcagaattgacctgacctccatgcagatcatcaccacagacctgcagtttgcccggaccagcgagggccaccctgtgccctttgccacagctggggactgctacagcgctgccaagtgcccccagggccgcttcagcatcaacctgtatggaacaggcctgagcctgacagagagcgcccgctggatcagccagggcaactatgctgtgtctgacatcaagaagagcccagatggcaccagggtggtgggcaaatgtggcggctactgtgggaagtgcacccccagcagcggcaccggcctggaggtgcgggtgctgtag

SEQ ID NO: 257281 - DNA, 2976 bp, Artificial Sequence
  derived and/or modified sequence
tgagagtgcagcgcccagtgcggcctgggctaccggaccctggacatatattgtgcaaagtactccagacttgatgggaagaccgaaaaggtggatgacggcttttgcagcagtcacccaaagccaagtaatagagaaaaatgttccggcgagtgtaatacaggcgggtggcgctattcagcctggaccgagtgcagtaagagctgtgatggcggcacacaaagaagacgagctatatgtgtgaatacacgaaacgatgtgttggacgacagtaaatgtactcaccaggagaaggtgaccatccagcggtgcagcgaatttccctgccctcagtggaagtctggggactggagcgagtgtttggtaacatgtggtaagggtcacaagcaccggcaggtgtggtgccaatttggagaggatcggcttaacgatcggatgtgtgatcctgaaaccaagcctacatctatgcaaacatgtcagcaaccggagtgtgcatcatggcaagcgggtccctggggacagtgctccgtcacatgtggtcagggataccagctgagagctgtgaagtgcattatcggcacgtacatgagtgtcgtggacgacaatgactgcaatgcagctactagaccaaccgacacgcaggattgcgagctcccgtcgtgtcacccgccaccggccgctccagagacgaggcgctctacttatagcgcacctcggacgcagtggcggtttggtagttggaccccgtgctccgctacctgcggtaagggcactcgaatgagatatgtcagctgcagagacgagaacggatctgttgccgacgagagtgcttgcgcgactcttcccagacctgtggctaaagaggaatgttctgttactccctgtggacagtggaaagcattggattggtctagttgtagtgtgacatgtggccagggacgcgctactcggcaggtaatgtgtgtgaactactcagaccacgtcatagataggtcagagtgtgaccaagactacatccccgagaccgaccaggactgcagcatgtctccttgcccacagcgaactcctgatagtggacttgctcaacacccttttcagaacgaagactatcgccccagaagcgcaagtcctagcaggacacacgtgctaggtgggaaccagtggcgcacaggaccctggggagcctgctcgtcaacgtgcgctggcgggtcacagaggcgggtggtggtgtgccaggacgagaacgggtataccgccaacgactgtgtggagagaatcaagcctgatgagcagcgcgcctgtgagagcgggccctgtccgcagtgggcttacgggaactggggcgagtgtaccaagctgtgtgggggcggaatcaggactcggctggtggtgtgccaacggtcaaatggtgagagattccccgatctgagttgcgagatcctggataaacctcccgatcgagagcaatgtaatacccacgcttgcccacatgacgcagcgtggagcaccgggccctggtcttcttgtagcgtttcctgcggcagaggacataaacagcggaatgtgtactgcatggcaaaggatgggtcccatctggaaagtgactattgcaaacacctcgccaaaccgcacggacaccggaaatgtcgagggggacgatgcccgaagtggaaggccggtgcctggagtcagtgtagtgtcagctgtggcaggggtgttcagcagcgacacgtgggctgccagatcggcacacacaagatagcaagagagacagagtgcaatccttatacacgccccgaatcagagcgtgattgtcaaggcccacggtgccctctttacacctggcgagctgaggagtggcaggagtgcaccaagacatgcggggagggtagccgctatcggaaagttgtgtgcgtggacgataacaaaaatgaggtgcacggggccagatgcgatgtttcgaagcgccccgtggaccgagaatcctgcagtctccagccatgtgagtacgtgtggatcactggggagtggagtgagtgtagcgtcacttgtgggaaaggttataaacaacgcctcgtaagttgctctgagatatataccggcaaagaaaactatgaatatagctaccagaccacaatcaactgccctggtacccagccgccctctgtgcacccatgttatctgcgcgattgccccgtcagtgccacatggcgtgtgggcaactggggctcatgtagtgtgagctgcggagtaggagtgatgcagagatcagttcagtgcctgactaatgaagatcaacccagtcacttatgccataccgaccttaagccagaagaacggaagacatgccgcaatgtgtacaactgtgagctgccccagaactgcaaggaggtgaaaaggctcaaaggagcctcagaggatggtgaatacttcctgatgattcgcgggaagctgttgaaaatcttctgtgccggtatgcactcggaccaccctaaggagtatgtaactcttgtccatggggacagtgagaacttcagtgaagtatacggtcaccgactccacaaccctaccgaatgcccctacaacggtagtaggagggacgactgccagtgcagaaaggattacactgctgctggcttcagcagtttccagaagattcgtatcgacttgacgtcaatgcagattatcaccacagatttacagttcgccaggacttctgaaggccaccccgtacctttcgcaactgcaggggattgctatagcgccgcaaaatgtccccagggcagattttccattaacctgtacgggaccggcttgtcgctgactgagagcgccagatggattagccaaggcaactacgcagtcagtgacattaagaaaagcccagatggcacccgggtggtgggtaagtgtggtggatattgcggaaagtgtacgccatcctctggtacagggctcgaagtcagagtgttatag

SEQ ID NO: 257282 - DNA, 5808 bp, Artificial Sequence
  derived and/or modified sequence
atgcagttcgtgagctgggccaccctgctgaccctgctggtgcgggatctagcggaaatgggcagccctgacgcggcggccgcggttcggaaagaccggctccaccctagacaagtgaaattattggagaccttatcagagtacgaaattgtgtcccctattagggtgaatgctctgggagagcccttcccaacgaatgtccacttcaaaagaactaggcggagtattaatagtgcaaccgatccatggccggccttcgcgtcttcctcctcctcaagcacatcctctcaggcacattatcgactgtcagcgtttgggcagcagttcctgttcaacttgacagccaacgcgggtttcatcgctcctctgtttacagtgactctgcttggaaccccaggggtaaaccagaccaagttttattctgaagaggaggcggagctgaaacactgtttctataagggatatgtgaacacaaactccgagcacaccgccgtgattagcctgtgctccggcatgttgggcacctttagatctcatgacggcgactacttcatcgagcctttacagtccatggatgaacaggaagatgaagaagaacagaataagccacatattatctaccgacgctctgctccccagcgagaaccttcaaccgggcgtcatgcctgcgatacctcagaacataagaacagacattcaaaagacaagaagaaaacccgcgccaggaaatggggcgagcggataaatctggccggggatgtggcagcccttaactccgggctggcgactgaggcattcagcgcctatggtaataagactgacaacaccagagagaaacggacccaccgtcggactaaaaggttcctgtcctatcccagatttgttgaagtgctggttgtggctgataaccgaatggtttcataccatggtgagaatctgcaacactatatcctgactctgatgtccatcgtcgcttcaatttataaagaccctagtattggaaacctgattaacattgttattgttaatctgatagtcattcacaatgaacaggacgggccatccatctccttcaacgcccagactaccctgaagaacttttgccagtggcagcacagtaaaaactccccaggtggaatccaccatgatacggctgtcctcctcaccaggcaggatatatgccgcgcccatgataaatgtgacacgttaggactggccgaactgggcaccatttgtgatccctaccgctcttgtagtatcagtgaagactctgggttgagtacggcttttacaatcgcacatgagctgggacatgtgttcaacatgccacatgatgataacaataaatgtaaggaagagggcgtgaagtctccccagcatgtgatggcgcccacactgaacttctacacaaacccctggatgtggtctaagtgcagccgaaaatatatcaccgagttcctggacaccggctatggagaatgtttgctgaacgagcctgaaagccggccctaccctctgccagtgcaattgccaggtatcctgtataatgtgaataaacaatgcgagttgatttttggacccgggtcacaggtttgcccatacatgatgcaatgccgacgcctgtggtgtaataatgtcaatggggtccacaaaggatgccgaacacagcacacaccgtgggcagacggcactgagtgtgaaccgggcaagcattgtaagtacggcttttgtgttccgaaagagatggatgtccctgttaccgatgggtcctggggctcatggagccctttcggaacttgctcgcggacctgcggaggaggcataaagactgctatacgcgagtgtaacaggcccgagccaaaaaatggcggcaagtattgtgttggccggagaatgaagttcaagtcctgtaacacagaaccatgcctgaaacagaagcgcgatttcagggacgaacagtgcgcccattttgacggcaaacattttaacatcaatggcctgctccctaatgtgcggtgggtgcccaagtactctggcattctgatgaaggaccggtgtaagctgttctgccgggtggccgggaataccgcttactatcagctgagagacagagtgattgatgggacaccctgcggacaggacactaacgacatctgcgtgcagggtctttgtcgccaggccggctgcgaccacgtcctgaactccaaggcacgacgcgataaatgtggcgtgtgtggtggggataactcctcatgtaagacagttgctggcaccttcaatacagtccactacgggtataatactgttgtcagaattcccgctggggccacgaatatcgatgtgcgccaacactcattctccggtgaaacagatgatgataattacttagccctgtctagctcaaagggcgaatttctgttgaacggaaatttcgtggtaaccatggccaaacgagagatccgcatcgggaacgctgtggtggagtactccggaagcgaaaccgccgtcgagagaattaacagcaccgaccggattgagcaggaactgctactgcaggtactgtccgtgggaaaactgtataaccctgatgtccggtacagctttaacatcccaattgaagacaaacctcaacaattttattggaactctcacggcccctggcaggcgtgctccaaaccgtgccaaggcgaaaggaagcggaagttggtgtgtactcgggagtcggaccagttaacagtgtccgaccagaggtgcgatcgactgccacaaccaggacacattacagagccctgcggcaccgattgtgacctccgttggcacgtagctagtcgaagcgagtgctctgcccagtgtgggcttggctatcgtactcttgatatatactgcgctaagtattcccgtctcgacggcaagactgaaaaggtggatgacggtttttgctcaagtcaccctaaaccaagtaaccgcgagaagtgctctggcgagtgcaacacagggggctggagatattcggcttggaccgaatgcagcaaatcttgtgatggaggcactcaaagacggagggccatttgcgttaacaccaggaacgacgttctcgatgattccaagtgtacccaccaggaaaaagtaacaatccagcgatgctccgaattcccttgtccccagtggaagtctggtgattggagcgaatgtttggtgacctgcggaaagggtcacaagcaccgccaggtgtggtgccagtttggcgaggaccggttaaacgaccgcatgtgtgacccagagaccaaacccacaagtatgcagacttgccagcagccagagtgcgcgtcctggcaggccgggccatggggtcagtgtagcgtaacatgtgggcagggttaccagctaagggccgtcaaatgtatcataggaacctacatgtctgtcgtcgacgacaacgactgcaatgccgctacaaggcctacggacactcaggattgtgagctaccctcatgccacccgcctcccgcggctcccgagacacgccgatctacctacagcgctcccaggacccagtggaggtttgggagctggacgccttgtagcgctacctgtggtaaggggacaaggatgcggtacgtgagttgtagagatgaaaacggcagcgtggccgacgaatctgcttgcgccacactccccaggcctgtggccaaggaagagtgctccgtcacgccttgtggccagtggaaggccctggactggtcatcgtgtagtgtgacttgcggacaagggcgggccactcgtcaagtcatgtgtgttaattatagtgatcatgtaatagatcggtccgaatgcgaccaagattatattccagagaccgaccaggactgttccatgagtccgtgtccccagagaactccggacagcgggctggcccagcacccatttcagaacgaagactacagacccaggagtgcttccccctcacggactcatgtgcttggcggcaatcagtggcgcacaggaccctggggtgcttgttcttccacttgcgctggagggagccagcgtagagttgtcgtctgccaggatgagaacgggtataccgcaaacgactgcgtagagcgtatcaaaccagatgaacagcgggcttgcgaaagtggtccttgcccacagtgggcttatggcaattggggtgagtgcacgaaactgtgtggcggggggattagaacacggctcgttgtgtgtcagaggagtaacggggaaaggttccccgacctcagttgcgagatactggataaacctcccgaccgagagcaatgcaatactcatgcctgtccacacgatgcagcctggtcgacggggccgtggtcttcctgcagtgtttcttgtggcaggggccacaaacagcgaaatgtgtactgtatggcgaaggatggctctcacctggagtccgactattgcaagcaccttgccaaacctcatggccacagaaagtgtagaggcggaagatgtcccaaatggaaggcgggggcttggtcccagtgctcagtctcctgtggacggggcgtgcagcagcgacacgtgggttgtcagattggcacccacaaaatagctagagaaactgagtgcaatccgtacaccaggccggagtcagaacgggactgtcagggaccccggtgtccactatatacctggcgcgcagaggaatggcaggagtgtaccaaaacctgcggggaaggctctcgctatcgcaaagtggtctgcgtggacgataataaaaacgaagtgcacggcgccaggtgcgacgtaagcaagagaccagtggatcgcgagagttgtagcctgcagccatgtgagtacgtttggattactggcgaatggagcgagtgctccgtgacctgtgggaagggctataaacagagactcgtttcttgcagtgaaatttacactggcaaagaaaactatgagtattcatatcaaaccactatcaattgtccaggcacccagcctccatcggtacacccttgctacctgcgtgattgccccgtgtctgctacctggcgagtcgggaactggggatcttgctctgtatcctgtggcgttggagtgatgcagcgatccgtgcaatgcttaactaacgaggaccagccctctcatttgtgtcatactgacctcaagcctgaagagcgcaagacatgtcgcaatgtatacaattgtgaactgccccagaattgtaaggaggttaaacgattaaagggtgcttccgaggatggcgagtactttttgatgatccggggcaagcttttaaagatattctgcgctggcatgcatagcgatcacccaaaggagtacgtgacgctcgtccatggggattctgaaaacttttcagaggtctatggacacaggctgcataatccaaccgaatgcccttacaacgggagtcgtcgcgatgattgccagtgccgaaaagactacacggcagctggatttagtagttttcaaaagattcggatagatctgacgtctatgcagatcattactacagacttgcagtttgcaaggaccagcgagggacatccagtacccttcgcaacagctggcgattgctacagcgcagcaaagtgtccacagggtcgcttctccattaatttatacggaactggactaagtcttacggagtccgccaggtggatctcccaagggaactacgctgtcagtgacatcaagaagtcgcctgacggtacaagagtggttgggaaatgtgggggctattgcggaaaatgcacgccttcgtcagggacaggactcgaagtgcgggtgctctag

SEQ ID NO: 257283 - DNA, 2976 bp, Artificial Sequence
  derived and/or modified sequence
taggaatgttctgcacaatgcgggttgggctatcgaactctcgatatatattgcgccaagtactcccggctggacggtaagacggagaaggtggacgatggcttctgctcatctcatccaaagccatctaacagagaaaagtgttccggggaatgtaacacaggcggatggaggtacagtgcctggactgagtgctctaaatcttgcgacggagggactcagagaaggagggccatatgcgtgaatactagaaatgatgtgctcgacgattccaagtgtacccaccaggagaaggtgaccattcaaagatgctcagaattcccttgcccacagtggaaatcaggtgattggagtgaatgtctagttacgtgcgggaaaggacacaaacacaggcaggtatggtgtcagttcggagaagaccgcctgaacgataggatgtgcgatcctgaaactaagccaacctcgatgcagacgtgccagcagcctgaatgcgcaagttggcaggccggaccatggggccagtgttctgtcacttgcgggcagggttaccagcttagggccgtcaaatgtatcattggtacgtacatgtcggtggttgatgataacgattgcaacgctgccactaggcctacagacacccaggattgcgagctgccttcatgccatccgccacccgctgcccctgaaacccgcagaagtacctacagcgcaccccgaacacagtggaggttcggtagttggacaccttgctctgccacttgtggcaagggcactcgcatgcgatatgtctcttgccgagacgagaatgggagtgtcgctgatgagtccgcttgtgcgacactccctaggcctgtggctaaggaggaatgttcggtcactccttgcggacagtggaaggcgttagattggagctcatgtagcgtgacgtgcggccaaggccgtgctacacgccaggtaatgtgcgtgaactatagtgatcacgttatcgaccgttctgaatgcgatcaagactatattcccgagaccgaccaagactgtagcatgagcccgtgtcctcagcgtacccctgattcaggattggctcagcatccctttcagaacgaagattacagaccgagaagcgcttcaccttcaagaacacacgtgttaggcggaaatcagtggcgaacaggcccatggggcgcatgtagctcgacttgtgccggtggttcacagcggagggtggttgtctgtcaggatgaaaacggttataccgccaatgattgcgtggaacggataaagcccgacgagcagcgagcgtgcgaatctgggccttgccctcagtgggcgtacgggaactggggggaatgtaccaaactgtgcggtggaggtattcggacccgacttgtggtgtgtcagcgatcaaatggtgaaaggttccctgatctgtcctgtgagatccttgataagcccccagaccgcgagcagtgcaacacccatgcctgccctcacgatgctgcttggtctaccggtccttggtcttcttgcagcgtgtcttgcggcagaggccacaaacagaggaacgtctactgcatggctaaggatgggagccacctggaatccgattattgtaagcacttggctaagcctcatgggcacagaaaatgtagaggaggtcgatgtccaaaatggaaggcaggtgcatggtctcaatgtagtgtgagttgcggtcgaggcgtccagcagcggcatgttggatgtcagatcggaacacataaaatcgcacgcgagactgagtgcaacccctatacccggcctgagagtgagagagactgtcagggacctcggtgccccctctatacctggagggcagaggagtggcaggaatgtacaaaaacctgtggcgagggatcaaggtataggaaggtagtttgtgtggatgacaacaaaaacgaagtgcacggggcaagatgcgacgtctctaaacgccctgtggaccgcgaaagctgtagtcttcaaccttgtgaatatgtgtggattaccggagaatggtccgagtgttccgtcacctgtggtaagggttacaaacagagactcgtcagctgctccgaaatctataccgggaaggaaaattatgaatactcatatcagactacaatcaattgccccggaacccaaccacccagtgtgcatccttgttatctaagggattgccctgtgagcgccacatggcgcgtaggtaactggggcagttgttcagtatcatgtggagtgggcgttatgcagaggtccgttcaatgtctcaccaatgaagaccaaccctctcacctgtgccacacagaccttaagcccgaggagagaaagacatgtcggaacgtctataattgtgaactccctcagaactgtaaggaagtcaagaggttgaaaggcgcttcagaggatggtgaatattttctaatgattcggggaaaactcctaaaaatattttgcgccggtatgcatagtgaccatccaaaagagtatgtaactctggttcacggcgacagcgagaacttcagcgaggtctacggccataggctgcataaccctacggaatgcccctacaacggatcacgcagggatgactgtcagtgccggaaggactacacagcagctggatttagctctttccagaagattagaattgacctgactagtatgcagattataacaacagaccttcagttcgctaggaccagcgagggccaccccgtgccttttgccacagctggggactgctattcagccgctaaatgcccccagggaaggttttctatcaacctttatgggacaggcctgtctctcacagagtcagctcgctggattagtcaaggcaattacgcggtaagcgacatcaaaaagtcccccgacggaacaagggtagttggcaaatgcgggggatactgtggcaaatgcacgccaagcagcggtacaggtctcgaggtccgcgtcttgtag

SEQ ID NO: 257284 - DNA, 5807 bp, Artificial Sequence
  derived and/or modified sequence
atgcaattcgtcagctgggccacgctgctgacactcctggtgagggatctggcagagatgggctcccctgacgcagctgctgcagtgaggaaagatcgactgcacccgcgtcaagtgaaactcctggagactctgagtgaatacgagatcgtgagccctattcgagtgaatgccctgggagaaccctttcctactaatgtccatttcaagcggaccaggaggtctatcaacagtgctaccgatccatggccggctttcgctagcagttcatcaagttctactagttcccaggcacactacaggttaagcgcctttggacagcagttcctattcaatctcacggccaatgctggtttcattgccccactgtttaccgtaacgctgttgggcactccgggagtcaaccagactaagttttattcggaggaagaggccgagctgaagcattgtttctataaagggtatgtcaataccaactccgaacacactgcagtgatatccctctgcagcggcatgctgggcactttccgctctcatgatggcgattattttatagaacctctgcaatcaatggatgaacaggaggacgaagaggaacagaataaaccacacatcatttatagacggtccgctccccagagagagccaagcactgggagacacgcgtgcgatacctccgaacacaaaaatcgccactctaaggacaagaaaaagacacgagcgcgaaagtggggagagaggattaaccttgccggagacgtcgcagctttgaattctggcctggccacagaggcatttagtgcctacggtaacaagaccgacaatacgagggagaagagaacccaccggagaaccaagaggttcctgagttatcccaggttcgtggaagtgctggtagttgctgacaaccggatggtgagttaccacggagagaacctgcagcattatattttgaccttaatgagcattgtggcctcaatttacaaggacccttccataggcaacttaatcaatatcgttattgtgaacctgattgtcattcacaacgaacaggacgggccttccatatccttcaacgcacaaaccacacttaagaacttctgccaatggcagcatagcaaaaatagccccggaggcatccaccatgacaccgctgtgttgctaacccggcaagatatttgtagggcccacgataagtgtgacactctgggactcgccgaacttgggaccatctgcgacccttacaggtcttgttcgatcagcgaagactccggactcagcactgcatttaccatcgctcatgagctgggccatgtgttcaatatgccccatgacgacaataacaagtgtaaggaggaaggtgtgaaatcaccacagcacgtcatggctccaactctcaatttttatactaatccctggatgtggtcaaagtgctcacggaagtatattacagagttcctcgacactggctatggagaatgtctcctcaatgagccggaaagcaggccctatccacttccagtgcagctcccaggaattctctacaacgtgaacaaacagtgcgaactgatatttggccctggctctcaggtgtgcccttacatgatgcaatgtcgcagattatggtgtaacaacgtcaatggcgtccacaaagggtgtagaactcagcacaccccttgggctgacggcactgaatgcgagcctggaaagcactgcaagtacggcttttgtgtccctaaggagatggacgtacccgtgaccgatggcagctgggggagctggagtccatttggtacttgttccaggacatgcggagggggaattaagacagccattcgcgaatgtaatcgacctgagcctaagaacggaggaaaatactgcgttggtcgtcgcatgaagtttaaaagctgcaatactgagccatgtctcaagcagaagagagactttcgcgacgaacagtgtgcccattttgacgggaagcatttcaacatcaacggcctgctgccaaatgtgcgatgggtgccaaaatactccgggatcctcatgaaagatcggtgcaagctgttttgtagagtggccggtaacaccgcctattaccagctcagagacagagttatcgatggtactccctgtggtcaagacacgaacgacatctgcgtccaaggtctctgtcgccaagccggttgcgaccatgtgttgaatagcaaagccaggagagataagtgcggtgtctgtgggggtgacaattcaagctgcaagactgttgcaggaactttcaatacagtgcactacggctataacaccgttgttagaattcctgctggcgcaacaaatattgatgtccgccagcacagcttcagtggggagaccgacgacgataattatctggccctctcatcatccaagggagagttcttacttaatgggaattttgtggttaccatggcaaagcgggaaattcggatcggaaacgccgtggtcgagtattccggatccgagaccgccgtggagagaattaattccactgacagaatagagcaggaattattgcttcaggtcctgtccgtgggcaaactgtacaaccctgatgtgcgctacagcttcaacattcccatcgaagataaaccgcagcagttttactggaattcacacgggccttggcaggcgtgcagcaagccttgccaaggggagaggaagcgtaagctcgtctgtacaagggagtcagaccagctcactgtgtctgatcagagatgtgataggctgccccagcctggccacatcacagagccatgtggaacagactgtgacctcaggtggcacgtggcttccaggagcgagtgttcagcccaatgtggccttggttaccgcaccctggatatctactgtgcaaagtacagcaggcttgacggcaaaactgaaaaagtcgacgatgggttttgcagtagccacccgaaacctagcaacagagagaaatgttcaggggaatgcaatacaggcggatggaggtactcagcctggactgaatgtagcaagtcctgcgatgggggtacgcagcggcgtcgagccatatgcgtgaacacccggaacgacgtccttgacgatagcaagtgcactcatcaagagaaagtcactattcaacgctgctccgagttcccgtgcccacagtggaagagcggagattggagtgaatgtttggtgacctgcggaaagggacacaaacatcggcaggtatggtgccagttcggagaggatcgcctaaatgacaggatgtgtgacccagagaccaagccaacatctatgcagacgtgtcagcagcccgagtgcgcgagctggcaggccggaccttggggccagtgctctgtgacttgcggacaggggtaccagcttagagctgtcaaatgtataataggcacttatatgtctgtcgttgacgataatgattgcaacgccgcaacgcgtcccacagatacacaggactgcgaattaccttcctgtcaccctcctcctgcagcccctgaaacacgacgctctacctacagtgctccgagaacgcagtggagattcgggtcatggactccatgctccgccacctgtggcaagggaacaagaatgcgctacgtatcttgcagagacgagaatggctcagttgccgatgaaagcgcttgcgctaccctgccaaggccagtggccaaggaagaatgtagcgtaacaccttgcggccagtggaaagctctggattggtcgagttgttctgtcacttgtggtcaagggagggccacccgccaagtcatgtgtgtgaactacagcgatcatgtgatcgaccggtctgagtgtgatcaggactatatcccagaaaccgaccaagactgctccatgagcccctgcccgcagcggacaccagactctggactggcccagcacccctttcagaacgaggattatcgacctcgcagtgcctccccaagtcgcacccatgtcctgggaggcaaccagtggcgcaccggaccgtggggagcctgttcatccacttgcgcaggcggtagtcagcggagagtggtggtgtgtcaagatgagaacgggtatacagcaaatgactgcgtggagcggatcaaaccagatgagcaacgcgcatgcgagtctggaccatgcccccagtgggcttatggaaactggggggaatgcactaagctgtgtgggggtggaatacggaccaggctggtggtgtgccagcggtctaacggagagcggttccccgacttgagttgcgagattctcgacaagccgccagatcgcgagcagtgtaatactcatgcttgccctcacgacgcggcttggagtacaggcccttggtcttcttgttccgtttcttgcggcaggggccacaaacaacgtaatgtgtactgcatggccaaagatggttcccatctcgagagcgactactgcaagcacctcgcaaaaccacatgggcacaggaagtgccggggtggaagatgccctaagtggaaggcaggtgcgtggagccaatgcagcgtctcatgcggacgtggtgttcagcagcgtcacgtgggctgtcagattggtactcacaaaatcgcgagagagaccgaatgcaacccctacactcgcccagaaagtgagagggactgccaaggccctagatgtcccctgtacacttggagggcggaggagtggcaagaatgtactaaaacatgtggcgaaggcagtcggtacagaaaagttgtctgcgtggacgataataaaaacgaagtgcacggggcaagatgtgacgtgtcgaagcgccctgtggaccgagagagttgtagtcttcagccgtgcgagtatgtgtggatcactggcgagtggagtgagtgctcagtgacgtgtggcaagggctacaagcagcgcctggtgtcatgctctgaaatttatactggtaaggagaactatgagtacagttatcaaaccactataaactgtcccggtacccagcctccaagcgttcacccttgttatctgagagattgccccgtaagtgcgacatggcgtgtgggtaattggggcagctgcagcgtgagctgcggagtcggggtgatgcagcgctccgtacagtgtttaaccaatgaggaccagccatctcacctgtgtcatacagatttaaagcctgaagagagaaagacgtgtcgtaatgtctacaattgcgagctcccccagaattgcaaggaagtgaaaaggctgaaaggcgcatctgaggatggggagtactttctcatgatcaggggaaagctccttaagatcttctgtgcgggaatgcatagcgaccatccaaaagagtacgtgacgctagtgcatggcgatagcgagaacttttccgaggtgtacgggcaccggctacataaccctactgaatgcccgtacaacggaagccggcgagatgactgtcaatgcaggaaggactatacggcagctggcttttcgtcattccaaaaaattagaatcgatctgacatctatgcagatcattacgactgatctgcaattcgccaggacctctgaaggacaccctgtcccatttgcaaccgcgggagattgctattcagctgccaaatgccctcaggggaggttcagtattaacctctatggcaccggcttgtccctcaccgagtcagcaaggtggatctctcagggtaattatgccgtctccgacataaagaagtccccagacggaaccagagtcgtagggaagtgcggaggttattgcggcaagtgcactccgagcagtggtactgggctggaagtcagagtactata

SEQ ID NO: 257285 - DNA, 2976 bp, Artificial Sequence
  derived and/or modified sequence
taagagtgctccgctcagtgcggcctgggctaccgaaccctcgacatctactgcgcaaaatacagtaggctggacgggaaaacagaaaaagtagatgacgggttctgttcgtctcatccaaagccttctaatagggagaagtgcagcggcgagtgcaatacaggtggatggaggtattctgcttggaccgaatgttccaaatcttgcgatggtggcactcagagaaggagggccatttgcgtgaacacgaggaatgacgtcctcgacgactcgaaatgtacccaccaggagaaagtaactatccagcgttgtagtgagtttccctgcccccaatggaagagtggagattggtccgagtgtctcgtcacctgcgggaaaggtcataaacaccgccaggtgtggtgccagttcggtgaggatcgcctgaacgatcgcatgtgtgaccccgaaaccaaacccacgagcatgcaaacatgtcagcagcctgaatgcgcttcttggcaggccggaccttggggacagtgttctgtgacctgtggacagggctatcagctgcgcgcggtcaagtgtataatcggaacgtacatgtcagtggtcgatgataatgactgcaacgcggccaccaggcctacagatacacaggattgtgaattgccttcttgtcacccaccaccagcagcaccggagacccgcaggagcacgtactccgcacctaggacacagtggcggtttggttcttggactccgtgtagcgccacctgcggtaaaggaacaaggatgcgatacgtgagttgtcgagatgagaatggttccgtggccgatgagtctgcctgcgccacactgcctcggcccgtggctaaggaggagtgttctgtcaccccttgcggccagtggaaagcactagattggagtagctgttcagtaacatgtggccagggcagagcgaccagacaggtgatgtgtgtcaactattcagatcatgtaatcgaccggagtgagtgtgatcaggactatatccctgaaaccgatcaggattgttcaatgtccccctgcccccagcggaccccagactctggcctggcccagcacccattccagaatgaggattatagaccgaggtccgcaagcccaagtcggacgcacgtactggggggtaatcagtggcggactggtccttggggcgcctgctccagcacctgcgccggcgggtcccagcgtagagtcgtggtctgccaagatgagaatggctacacggctaatgactgcgtagaaaggattaagcctgacgagcagcgggcttgcgaaagcggtccctgtccccagtgggcctatgggaactggggcgaatgcaccaaactgtgcggcggcggaattcgaactcgactggtggtatgccagagatcaaatggggagcgtttccctgatctttcttgtgaaatccttgataaacctcctgacagggaacagtgtaatacacatgcctgtcctcacgatgccgcgtggtccaccggtccatggagttcatgctctgtatcttgcggacgcggccacaaacaaagaaacgtctattgtatggcaaaggatggttcacaccttgagtccgattactgcaagcatttagctaaacctcatggacacaggaaatgccggggagggaggtgcccgaaatggaaggctggtgcatggagccagtgttccgtgagttgtggacgcggcgtgcagcagcggcacgtaggttgtcagatcggcacacacaagatcgctagggagaccgagtgcaacccctatacaaggcctgagtcggaacgtgactgtcagggacccagatgccccttgtacacatggcgagctgaagagtggcaggagtgcacaaaaacctgcggggagggatcaagatacagaaaggtggtatgcgtagacgataacaaaaacgaagtccacggagcccgctgcgatgtgtctaagcggcctgtggatagggaatcttgtagcttgcagccttgtgaatacgtctggatcacgggcgaatggtcagagtgtagcgtcacctgcggtaaaggttacaagcagaggctcgtgtcatgcagcgaaatatacaccggcaaggagaattacgaatactcatatcaaactactataaactgtccaggcactcagccaccatcagtccacccttgttacctacgcgactgtccagtctcggccacctggcgtgtggggaactgggggagctgcagtgtgagttgcggagtgggagtgatgcagcgcagtgtgcagtgcctgaccaacgaggatcagcctagccatctgtgccataccgatttgaagccagaagaacggaagacttgtcgtaacgtctacaattgcgaacttccccagaattgtaaagaagtgaaaagattgaagggggcaagtgaggatggagaatatttcctgatgattcgtggtaagctgctcaaaattttttgcgccggcatgcactccgaccatcccaaagaatatgtcactctagtgcacggtgactctgagaacttctctgaagtctacgggcaccgactccataaccccactgaatgcccctataacggatctaggcgagatgattgccagtgcagaaaagactataccgccgccggcttctcctcttttcaaaagatccgcattgatctaactagcatgcagatcataacaactgacctccagtttgcccggaccagcgaaggacaccccgttcctttcgcaactgcaggcgattgctactcggctgccaagtgtcctcagggtcgctttagcattaatctttacggaacaggtttatccctaactgagagcgcgcgctggatttcccagggaaactacgctgtgtctgacataaagaaaagccccgacggaactcgcgtggttggcaaatgcggaggatattgtggcaagtgtacaccaagcagtggtacaggattagaagtgcgcgtgctgtag

SEQ ID NO: 257286 - DNA, 5808 bp, Artificial Sequence
  derived and/or modified sequence
atgcagtttgtgtcgtgggccacactcttgacattactggtacgggaccttgcagagatgggaagcccggacgctgcggcagcagtaaggaaggatagactacatccacgacaggtgaaattgctggagaccctcagcgaatatgaaattgtttcgccaatacgggtaaatgctctgggcgaaccttttcccacaaatgtgcacttcaagcggacacggcgttcaatcaatagcgctaccgacccttggcccgccttcgcctcctcgtcaagctccagtacttcgtctcaggcgcattatcgtctttctgcatttggacagcagtttttattcaacctgacagccaatgccggtttcattgcgcccctcttcactgtgacactcttgggcacccctggtgtgaaccaaactaaattttacagcgaggaagaggcagaactgaaacactgcttctacaagggttacgtaaacaccaacagcgagcacaccgcagtgatttccctttgttcaggtatgcttggaacttttcggagccatgatggagactactttattgagccactacagtccatggacgagcaggaggatgaggaagagcagaataagccccatattatttaccgcaggtccgcaccacaacgcgaaccctcaacaggaagacacgcctgtgatactagcgaacataagaacaggcactctaaggacaagaaaaagacaagggcgcgcaaatggggagagcgcataaatctcgcaggggacgtggctgcacttaacagtggactggctactgaggcgttctctgcctatgggaataaaaccgacaataccagagaaaagcggacccaccgtcggactaagcgctttttatcttacccacgattcgtcgaggtgctagtcgtagcggacaataggatggtaagctatcacggtgaaaaccttcagcactacatcctcactctgatgtctatcgttgcgtcgatctacaaggatccctccatcggcaaccttatcaacattgtgattgttaacctcatcgtcattcataatgaacaggacggaccctccatatcgtttaacgctcagaccacactgaagaacttctgccagtggcagcatagcaagaattcgcccggaggaatccaccacgacacagccgtgctcctcacccgacaggacatttgtcgggcacacgacaagtgtgataccctgggactcgctgagcttgggaccatctgcgatccatatcgttcctgctccatcagcgaagatagtggcttgagcaccgcgtttaccatagcacatgagctgggccatgtgtttaatatgccacatgacgataacaataaatgtaaggaagaaggagtgaaatccccccagcacgtaatggcccctaccctcaacttctacacaaacccctggatgtggtctaagtgctcccgaaagtatatcaccgaattcctggacacgggttatggggagtgtcttctcaatgagccagaatcccgcccataccccctgccagtgcagcttcccggtattctgtataatgtgaacaagcaatgtgaactaatattcggccccggaagccaggtctgcccctacatgatgcagtgcaggaggctttggtgtaataatgttaatggtgttcataagggttgtcggacgcagcacacgccctgggctgacggcacagagtgtgaacctggcaagcattgcaagtacggattttgcgtgccgaaagaaatggacgtgcccgttacagacggcagctggggctcatggagcccttttggcacttgctcccggacttgcggagggggaatcaaaaccgccattagagaatgtaaccgccctgaacccaagaatggaggaaagtactgcgtaggcaggcgcatgaaattcaaatcatgtaatacggagccatgtctgaaacagaagcgagacttccgagacgagcagtgcgcccacttcgacggcaagcactttaacatcaatgggctgctgccaaacgtgcggtgggtgcctaagtatagcgggatactgatgaaggatcggtgtaagctgttctgtagggtcgccgggaatacggcatattatcagcttagggatcgcgtcatcgatgggacaccctgcggtcaggataccaacgacatttgcgtgcagggcctttgtaggcaagcggggtgcgatcacgtcctgaacagcaaagccaggagggacaaatgcggcgtctgtgggggtgataactcttcctgtaaaaccgtggccggaactttcaacaccgtccactatggctacaatacagtcgtaaggattcctgccggggccaccaacatcgacgtgcgacagcactcgttttcaggtgagacagacgacgacaactacttagcattgtccagttccaagggagaatttctactgaatggaaacttcgtggtaacaatggccaaaagggaaatccggatcgggaacgcagtagtggagtacagcggcagcgagacagccgttgagcgcatcaattcgaccgatcgaattgagcaggaactgttgctgcaggttctctctgtcgggaagctttacaaccccgacgttaggtatagcttcaatatccctatcgaggataaaccacagcagttctactggaattctcacggcccttggcaggcgtgctctaaaccgtgccagggggaacgcaaaagaaaactcgtgtgtactagagaatcagaccaactgaccgtaagcgatcaaaggtgtgacaggctgccgcaaccgggacatataacagagccatgtggcactgattgtgacctaagatggcacgtggcctcccgaagcgagtgcagcgcccagtgtggactcgggtatagaaccctagatatttactgcgcaaagtactcacgcctggacggaaagaccgagaaggtcgacgatggtttttgctcctcccatcctaagccttccaaccgcgagaaatgttctggagagtgcaacactggaggatggcgctactcagcctggaccgaatgttcaaagtcgtgtgatggaggaacacagcgccggcgagccatctgcgtgaacacccggaacgatgtcctggatgacagcaaatgcacacatcaggaaaaggtcacaatccaacggtgcagtgagtttccttgtccccagtggaaatccggtgactggagtgagtgccttgtcacctgtggtaagggtcacaagcacaggcaagtgtggtgccaatttggagaagatcggctgaatgaccgcatgtgtgaccctgagactaagcctacttctatgcagacgtgccagcaacccgaatgcgcctcttggcaagctggcccatggggccaatgcagtgttacttgtggccaagggtaccagctaagagcggttaaatgtattattggaacctatatgtcagtggtggatgataatgactgtaatgcggctactcggccaaccgacactcaggattgcgagttaccctcttgtcaccccccgcccgcagctcctgaaacaagaagaagcacttatagcgcaccacggacacagtggaggtttggctcctggacaccatgttctgccacatgtgggaaagggacacggatgaggtacgtctcttgcagagatgagaatggcagcgttgccgacgagagtgcctgcgccaccttgccaagacctgtggccaaggaagagtgtagtgttacgccctgtggtcaatggaaagcgcttgattggtcttcttgctctgtgacctgcgggcagggccgggcaacccgtcaggttatgtgcgttaactattctgaccatgtgatcgaccggtccgagtgcgaccaggattatatccccgagacagatcaggactgcagtatgtccccatgcccacagagaacccctgattccggccttgctcagcatccatttcagaacgaggattatcggcctaggtcggcaagccccagccgcactcatgtactgggtgggaatcaatggcgaaccggtccttggggggcctgctcctccacatgtgcaggggggtctcaacgccgggtggtggtgtgtcaggacgagaatgggtacacggcgaacgactgtgtggaacggatcaagccagatgagcaacgtgcatgtgagtccgggccatgtccacagtgggcatacgggaactggggagaatgcacaaaattgtgcggaggaggaatacggacccggctggttgtttgtcagcgatccaatggtgaacggttccccgacctgtcctgcgaaattcttgacaagccccccgatcgcgaacaatgtaacactcatgcatgcccccatgacgctgcatggtcaaccggcccttggtcttcctgtagtgtgtcgtgcggtcgcggccacaagcagcgtaatgtttactgcatggctaaagatggatctcacttggaaagcgactactgtaagcacctggctaaaccccatggccatagaaagtgccgtggaggtcggtgccctaagtggaaagccggtgcttggagccaatgctccgtgtcctgtgggcgaggcgtgcagcagaggcacgtaggatgtcagatcggaactcataaaatagctcgcgagacggaatgtaacccttacacccgcccggaatccgagcgcgactgtcagggccctcggtgcccactgtacacatggagggctgaggagtggcaggagtgtaccaaaacttgtggagaaggatctaggtaccggaaggtcgtgtgcgtggacgataacaagaacgaagttcatggagccaggtgcgacgttagtaagagaccagttgaccgggagtcttgcagcctgcaaccctgcgagtatgtgtggatcactggtgagtggagcgagtgctcggtgacatgtggcaaaggctacaagcagcgactggtctcctgttctgagatttacactggcaaagagaactacgaatactcctatcagaccactatcaattgtcccggtacgcagcccccgtcagtgcatccctgttatctgagggactgtcctgtgagcgctacttggcgggtaggaaactggggatcttgtagtgttagctgtggagtaggtgtgatgcagcgaagcgtgcagtgtctcaccaacgaagatcagccaagccacctctgtcacactgatcttaaacctgaagagagaaagacttgtcggaatgtctacaactgtgaactgccacagaattgcaaagaggtgaagaggctcaaaggggctagcgaggacggggagtactttttgatgatacgtggaaagctgctgaaaatcttttgcgcagggatgcactccgatcatcctaaagagtacgtcactctggtccacggggacagcgagaactttagtgaggtctatggtcatcggctccacaacccgactgaatgtccctacaatggctcacgtcgggatgactgccagtgccgcaaagactatactgccgcaggattctcatccttccagaaaatcagaatcgacctgacatcaatgcagattatcaccacggacctccagtttgcccggacctctgaaggtcatcccgtaccctttgcgacagccggcgactgctactccgctgccaagtgtcctcaggggaggttctccatcaacctgtatggcaccggcttatccctcaccgagtcagctagatggatcagccagggtaactacgctgtttctgacattaagaaatcaccagatggcactcgcgtagttggcaaatgcggtggctattgtggcaagtgcacaccaagcagtggcactggtctggaggttagggtattgtag

SEQ ID NO: 257287 - DNA, 2976 bp, Artificial Sequence
  derived and/or modified sequence
tgagagtgcagtgctcagtgcgggttgggatacagaacgcttgacatctattgcgccaaatatagtaggcttgatggtaagacagaaaaggtggatgacggtttttgctcctcgcatccgaagcctagcaatcgggaaaaatgcagtggagaatgcaacaccgggggttggaggtacagtgcttggacagaatgttctaagtcttgcgacggtgggacacagaggcgacgtgcaatatgtgtgaacactcgcaacgacgttttagatgattcgaagtgcactcaccaggaaaaagtgaccatccaaagatgttccgaattcccatgtccacagtggaaaagcggcgattggtcagagtgtctggtgacatgtgggaaaggtcacaagcatagacaggtatggtgccaatttggcgaggaccgattgaatgaccggatgtgtgatcctgaaacaaaacccacctcgatgcaaacctgtcagcaaccggagtgcgcgtcctggcaggctggaccatgggggcagtgtagcgtgacttgcggacagggctaccaactcagagcagtaaaatgtattattgggacctatatgtctgtggtcgacgataacgattgtaacgccgcgactaggcctacggatactcaggattgcgagcttccttcctgtcacccaccacccgctgcaccagagacgagacggagcacctacagcgccccccggacacagtggaggtttgggagttggacaccatgcagcgcaacctgcggaaaggggacgaggatgagatacgtttcatgtcgggatgagaacggcagtgttgctgatgagagtgcttgtgcgaccctccccagacctgtagcaaaagaagaatgttccgtcaccccctgcggtcaatggaaggcactagattggagttcctgcagcgtgacgtgtggtcaaggcagggccactcggcaggtgatgtgtgtcaactattccgaccatgttatagaccgcagcgagtgtgaccaagattacatccccgaaaccgatcaagattgtagcatgagtccatgtccccaaaggacccccgactctggtctcgctcaacatccgttccagaacgaagactaccgaccaagaagtgctagccccagccgtactcacgtgctcggaggtaatcagtggagaaccgggccttggggcgcgtgtagttcaacctgcgccggcggctctcagcgccgtgttgtggtgtgtcaggacgagaatggttacactgctaatgattgtgtagaacgaattaagccagatgagcagcgtgcatgtgaatcagggccgtgtcctcaatgggcctatggtaattggggggaatgcaccaagttatgtggaggcggtattagaacaagactcgtcgtgtgtcaaagatccaatggagaacggttcccagatctttcttgcgaaatactggacaagccaccggatagggaacagtgtaacactcacgcctgtccacatgatgccgcatggagcactggaccttggagctcttgtagcgtgtcctgcggaaggggtcataagcagcgcaacgtttactgtatggcgaaagatggttcccacctggaaagcgactactgtaaacacctggccaaacctcatggacaccgcaaatgtagaggagggaggtgtccaaagtggaaagcaggcgcctggagtcagtgtagtgtctcctgcggtcggggcgttcaacaaaggcacgttggttgtcagatcggcacacacaagatcgcaagagaaacagagtgtaatccttataccagacccgagagtgagagagattgccaggggcccagatgcccgctttacacgtggagagctgaagaatggcaagaatgtaccaagacctgtggtgagggcagtagatacagaaaggtggtctgcgtagacgacaacaaaaatgaagtccacggagccaggtgtgacgtctccaaacgcccagtagacagagagtcctgctcccttcagccttgcgaatatgtttggatcaccggagaatggagtgaatgctccgtgacctgtggcaaaggttataaacaacgattagttagctgtagcgaaatttatactggaaaagaaaattacgagtacagttatcagactacaatcaattgtcccggaacacaaccacccagtgtccacccgtgttatctgagagactgcccagtgagcgcaacgtggcgtgtcggcaattgggggtcctgcagcgtctcatgcggtgttggagtcatgcagaggtccgtacagtgtttgaccaatgaggatcaacccagccacctgtgtcatacagatctgaagcccgaagagaggaaaacatgcagaaatgtctacaattgcgaacttccgcaaaattgtaaggaggtgaagcggctgaagggggcaagtgaggacggtgaatatttcctgatgatcagaggtaagctgcttaagatattctgcgccgggatgcactccgaccatccaaaagagtatgttaccctcgtacacggtgattctgaaaactttagcgaagtgtatgggcataggttgcacaatcctactgaatgcccttataacggatcgcgacgagacgattgccagtgccgcaaagattataccgctgctggatttagttcattccagaaaattcgtattgatctaacaagtatgcaaatcatcactaccgatcttcagtttgcaaggaccagcgaaggacatccagtcccctttgctaccgcgggcgattgttactccgccgctaaatgcccacagggacgattttctatcaacctgtatggcaccggtctctctctaactgaatctgcccgttggatctctcaaggcaattacgctgtttctgacataaagaagtctcctgacggtacaagagttgtcggcaagtgtggaggctattgtggtaaatgcaccccttcatctggcacagggctggaagttcgcgtcttatag

SEQ ID NO: 257288 - DNA, 5808 bp, Artificial Sequence
  derived and/or modified sequence
atgcagtttgtctcatgggccacactccttacactcttggtgcgggacctggctgaaatgggctctccagatgccgctgctgccgtgaggaaagaccgcctgcaccctcgccaggtgaagctcctggaaaccctctctgagtacgaaatcgtatccccaatccgtgtcaatgcgctgggggagcccttcccaactaacgtgcactttaaaagaacccgacgatccattaattctgctactgacccctggcctgctttcgcaagttcctcttcatcctcgacatcatcccaggcacattatcgcttgtccgcgttcggccaacaattcctttttaatcttacggcaaatgcaggattcatagcaccccttttcactgtgaccttgttggggacacccggagttaaccagacgaaattttattcagaggaagaggccgagttgaagcactgtttctataagggctatgtaaatactaactcagagcataccgctgttattagtctctgttcagggatgctcggcacctttagaagccatgatggtgattattttattgagccgctacagtccatggacgaacaggaagacgaggaggaacagaataaaccgcatattatctatagacgaagcgcaccccaaagggagccaagcaccggacggcatgcatgcgatacatctgagcacaagaaccgccacagcaaagacaagaaaaaaacacgagctagaaaatggggggagagaattaatctggcgggggatgtggccgctttgaactctggtctagccactgaggcatttagtgcctatggcaacaaaacagacaacacacgtgagaaaagaactcaccgaagaacaaagagatttctgagttatcctcggttcgtagaggttctggtagttgcagacaaccgaatggtttcatatcatggagagaaccttcaacattacatactgaccctgatgagtattgtcgcctccatctataaagatccttcaatcggaaatctcattaacatcgtgatcgttaatttaattgttatccataacgagcaggacgggcccagcatttcgtttaatgcccagacaactctgaaaaacttttgccaatggcaacattctaaaaattctccaggtggtattcatcatgacactgctgttctgctcactagacaggacatatgcagggctcacgacaaatgtgataccctgggactggccgaactgggaacaatttgtgatccctatcgatcttgcagcatttcggaagactcaggcctctctaccgcttttacaatagcacacgagcttggccacgtgtttaacatgccacatgatgacaacaacaagtgcaaggaggaaggggttaaatctccccagcacgtgatggcacctacccttaatttttacacaaatccatggatgtggtctaagtgcagtcgaaagtatatcaccgagttcctcgacacaggttacggagaatgcttgctaaacgaacccgagtcccgcccttacccccttcctgtacagctgccggggattttatacaacgtgaataagcagtgcgaactcatcttcgggcctggctcccaggtatgcccctatatgatgcagtgccgacgcctgtggtgcaacaatgtcaatggagttcacaaaggctgcagaacacagcataccccttgggctgatggcaccgaatgcgagcctggaaagcactgtaagtatggattttgcgtccccaaagagatggatgtgcccgtgactgatggatcttggggaagctggtcccctttcggaacttgcagccggacatgcggcgggggcatcaaaactgccattagagagtgtaacaggcctgaacctaaaaatggaggaaagtactgcgttggaagaagaatgaagttcaaatcttgtaacacggaaccttgcttgaagcaaaaaagggacttccgagacgaacagtgtgcccactttgacggtaaacatttcaatatcaatggccttctgcctaatgtccgatgggtcccaaagtactctggtatcctcatgaaagaccggtgtaaactgttttgtcgggtcgcaggaaatacagcctattaccaactgcgtgacagggtgatcgacggaactccctgtggtcaagataccaacgacatttgcgtccagggcctctgtagacaagcaggatgcgatcacgtgctgaattctaaggctcgtcgagataaatgcggggtttgtggcggagataattcctcctgcaaaactgtcgccggcacatttaacacagtgcactacgggtacaatacggttgtgaggataccagcaggggccacaaacattgatgtacgtcagcactccttctccggggaaacggacgacgacaactatctggctctatctagttcaaagggagagtttcttctgaacggaaacttcgttgtgaccatggccaagcgggagatcagaatcggtaatgctgtcgtagaatactctggatccgagactgccgtggaacgaataaatagtacagatagaattgagcaggagctcttgctgcaggttcttagtgtcggtaaactgtacaaccccgatgtccgatactcttttaacatccctattgaagacaaaccccagcagttctactggaactcacacggtccatggcaagcctgttcaaagccatgtcagggtgagcgcaagcgcaaactggtatgcacacgcgagtctgatcagttgacagtgagtgaccagagatgtgatagactcccccagccaggccatatcactgaaccgtgcgggactgactgcgaccttcgctggcacgtcgcaagccgctcagaatgttcagcgcagtgtgggttaggatataggaccttagacatttactgcgccaagtactctcgactggacggcaagaccgagaaagttgacgatggcttttgctcttcacacccaaagccttccaaccgtgagaaatgctccggtgaatgtaatacaggcggatggcggtatagtgcgtggacggaatgctccaagtcctgcgacggcggtacgcaaagaagacgggccatatgtgtcaatacgcggaacgatgtactggatgactccaagtgcacccaccaagagaaagtcactattcagagatgctcagaatttccctgccctcagtggaagagcggagattggtcagaatgtcttgttacatgcggaaaaggtcacaaacataggcaagtctggtgtcagttcggagaggacaggctcaatgatcggatgtgcgacccagaaaccaaacctacttctatgcaaacatgtcaacagcctgagtgtgcatcttggcaggccggcccgtggggccaatgttcagtgacctgcggccagggataccagctccgagccgtcaaatgcatcataggcacctacatgtctgttgtcgacgataatgactgcaacgcagctaccagacctaccgacacgcaagattgtgaacttccctcttgccaccctccacctgcagcacctgagaccaggaggtcaacctactccgcccctaggacccagtggcgctttgggtcgtggactccatgttcagctacatgcggtaagggaactcgtatgagatatgtttcctgccgggacgagaatggatcggttgccgatgagagtgcttgtgctacactaccccgccccgtggctaaagaggaatgttcagtgaccccatgcggacagtggaaagctttggactggtcttcctgctctgtcacatgcgggcaagggagggccacccgtcaagtcatgtgcgtgaactacagcgaccacgtaatcgacaggtccgaatgcgaccaggattacatccccgagacagaccaggattgcagcatgagcccctgtccccaacggacacccgactccgggctcgcgcagcatccctttcagaacgaagattaccggccaaggtcagctagcccttctagaacacatgtgctgggaggtaatcaatggagaacaggaccatggggcgcatgttcctcaacttgcgctggtgggagtcagagacgtgtcgtcgtttgccaggacgaaaacggctatactgctaatgactgcgtggaacgaatcaaacccgatgagcagcgtgcgtgtgaatcaggtccttgtccgcagtgggcatacggaaactggggcgagtgcaccaaattgtgcggtggaggaatcagaacacggcttgtggtatgtcagcgatctaatggcgagagatttccagacctgtcatgtgaaatactggataaaccgccagatagagaacaatgcaacactcacgcatgcccccacgatgctgcttggagtaccggcccatggtccagttgtagtgtgtcttgcgggcgaggccataaacagcggaacgtatactgtatggccaaggacggaagccacctcgaaagtgattactgtaagcacctggcaaaacctcacggacatcggaaatgccgcggaggtagatgccctaagtggaaagctggagcttggagccagtgtagcgtctcctgtggcagaggcgtccaacaacgccacgtaggttgtcagatagggacccacaagatagcaagagaaacagaatgcaacccctatactagaccagaatcagagagagactgccaggggccccgttgccccctgtatacttggcgtgctgaggagtggcaagaatgtacaaagacctgcggtgagggaagtagatacaggaaggtggtatgtgtggacgataataagaatgaagtacatggggcacgatgcgacgttagtaaacggcctgtagaccgagaatcctgttcccttcagccttgtgaatacgtgtggataactggtgaatggtcagaatgtagtgtgacatgcggcaaaggctataagcagcgccttgtatcgtgctcagaaatctatacaggaaaggagaattatgaatattcataccagacaaccatcaactgtcccggaacacaacctccgagcgtgcacccttgttatctcagagattgccctgtttctgctacatggcgggttggtaattggggatcatgctcagtttcttgtggtgtaggtgtgatgcaacggtccgttcagtgtctcaccaatgaagatcaacctagccacctgtgtcataccgatcttaaaccagaggaacggaaaacctgtaggaacgtttacaactgcgaactgccccaaaactgcaaagaggtgaaaagacttaaaggggcctccgaggatggggagtacttccttatgatacggggtaagcttctcaagatattttgcgctggcatgcattccgaccaccccaaggaatacgtaactctcgtacatggcgactccgaaaactttagtgaagtgtatggccatagattacataatcctactgagtgcccctataacggatcccgaagggatgattgtcagtgccgcaaagactatacagccgctggattctccagttttcaaaagataaggatagatcttactagcatgcagataataactacagatctgcaatttgccaggacatcagagggtcatcccgttccctttgccactgctggagattgctattctgccgccaaatgcccccaaggtcgattttctattaatttgtatgggacgggacttagccttaccgaaagtgcaaggtggatatcacagggcaactacgccgtctcagacatcaagaaaagccctgatggcacacgggtagtggggaagtgtggaggatattgtggtaagtgcaccccgagtagcggcaccggcttagaagtcagagtcctatag

SEQ ID NO: 257289 - DNA, 2976 bp, Artificial Sequence
  derived and/or modified sequence
tgagagtgcagcgcccagtgcggcctgggctacagaaccctggacatctactgcgccaagtacagcagactggacggcaagaccgagaaggtggacgacggcttctgcagcagccaccccaagcccagcaacagagagaagtgcagcggcgagtgcaacaccggcggctggagatacagcgcctggaccgagtgcagcaagagctgcgacggcggcacccagagaagaagagccatctgcgtgaacaccagaaacgacgtgctggacgacagcaagtgcacccaccaggagaaggtgaccatccagagatgcagcgagttcccctgcccccagtggaagagcggcgactggagcgagtgcctggtgacctgcggcaagggccacaagcacagacaggtgtggtgccagttcggcgaggacagactgaacgacagaatgtgcgaccccgagaccaagcccaccagcatgcagacctgccagcagcccgagtgcgccagctggcaggccggcccctggggccagtgcagcgtgacctgcggccagggctaccagctgagagccgtgaagtgcatcatcggcacctacatgagcgtggtggacgacaacgactgcaacgccgccaccagacccaccgacacccaggactgcgagctgcccagctgccaccccccccccgccgcccccgagaccagaagaagcacctacagcgcccccagaacccagtggagattcggcagctggaccccctgcagcgccacctgcggcaagggcaccagaatgagatacgtgagctgcagagacgagaacggcagcgtggccgacgagagcgcctgcgccaccctgcccagacccgtggccaaggaggagtgcagcgtgaccccctgcggccagtggaaggccctggactggagcagctgcagcgtgacctgcggccagggcagagccaccagacaggtgatgtgcgtgaactacagcgaccacgtgatcgacagaagcgagtgcgaccaggactacatccccgagaccgaccaggactgcagcatgagcccctgcccccagagaacccccgacagcggcctggcccagcaccccttccagaacgaggactacagacccagaagcgccagccccagcagaacccacgtgctgggcggcaaccagtggagaaccggcccctggggcgcctgcagcagcacctgcgccggcggcagccagagaagagtggtggtgtgccaggacgagaacggctacaccgccaacgactgcgtggagagaatcaagcccgacgagcagagagcctgcgagagcggcccctgcccccagtgggcctacggcaactggggcgagtgcaccaagctgtgcggcggcggcatcagaaccagactggtggtgtgccagagaagcaacggcgagagattccccgacctgagctgcgagatcctggacaagccccccgacagagagcagtgcaacacccacgcctgcccccacgacgccgcctggagcaccggcccctggagcagctgcagcgtgagctgcggcagaggccacaagcagagaaacgtgtactgcatggccaaggacggcagccacctggagagcgactactgcaagcacctggccaagccccacggccacagaaagtgcagaggcggcagatgccccaagtggaaggccggcgcctggagccagtgcagcgtgagctgcggcagaggcgtgcagcagagacacgtgggctgccagatcggcacccacaagatcgccagagagaccgagtgcaacccctacaccagacccgagagcgagagagactgccagggccccagatgccccctgtacacctggagagccgaggagtggcaggagtgcaccaagacctgcggcgagggcagcagatacagaaaggtggtgtgcgtggacgacaacaagaacgaggtgcacggcgccagatgcgacgtgagcaagagacccgtggacagagagagctgcagcctgcagccctgcgagtacgtgtggatcaccggcgagtggagcgagtgcagcgtgacctgcggcaagggctacaagcagagactggtgagctgcagcgagatctacaccggcaaggagaactacgagtacagctaccagaccaccatcaactgccccggcacccagccccccagcgtgcacccctgctacctgagagactgccccgtgagcgccacctggagagtgggcaactggggcagctgcagcgtgagctgcggcgtgggcgtgatgcagagaagcgtgcagtgcctgaccaacgaggaccagcccagccacctgtgccacaccgacctgaagcccgaggagagaaagacctgcagaaacgtgtacaactgcgagctgccccagaactgcaaggaggtgaagagactgaagggcgccagcgaggacggcgagtacttcctgatgatcagaggcaagctgctgaagatcttctgcgccggcatgcacagcgaccaccccaaggagtacgtgaccctggtgcacggcgacagcgagaacttcagcgaggtgtacggccacagactgcacaaccccaccgagtgcccctacaacggcagcagaagagacgactgccagtgcagaaaggactacaccgccgccggcttcagcagcttccagaagatcagaatcgacctgaccagcatgcagatcatcaccaccgacctgcagttcgccagaaccagcgagggccaccccgtgcccttcgccaccgccggcgactgctacagcgccgccaagtgcccccagggcagattcagcatcaacctgtacggcaccggcctgagcctgaccgagagcgccagatggatcagccagggcaactacgccgtgagcgacatcaagaagagccccgacggcaccagagtggtgggcaagtgcggcggctactgcggcaagtgcacccccagcagcggcaccggcctggaggtgagagtgctgtag

SEQ ID NO: 257290 - DNA, 5808 bp, Artificial Sequence
  derived and/or modified sequence
atgcagttcgtgagctgggccaccctgctgaccctgctggtgagagacctggccgagatgggcagccccgacgccgccgccgccgtgagaaaggacagactgcaccccagacaggtgaagctgctggagaccctgagcgagtacgagatcgtgagccccatcagagtgaacgccctgggcgagcccttccccaccaacgtgcacttcaagagaaccagaagaagcatcaacagcgccaccgacccctggcccgccttcgccagcagcagcagcagcagcaccagcagccaggcccactacagactgagcgccttcggccagcagttcctgttcaacctgaccgccaacgccggcttcatcgcccccctgttcaccgtgaccctgctgggcacccccggcgtgaaccagaccaagttctacagcgaggaggaggccgagctgaagcactgcttctacaagggctacgtgaacaccaacagcgagcacaccgccgtgatcagcctgtgcagcggcatgctgggcaccttcagaagccacgacggcgactacttcatcgagcccctgcagagcatggacgagcaggaggacgaggaggagcagaacaagccccacatcatctacagaagaagcgccccccagagagagcccagcaccggcagacacgcctgcgacaccagcgagcacaagaacagacacagcaaggacaagaagaagaccagagccagaaagtggggcgagagaatcaacctggccggcgacgtggccgccctgaacagcggcctggccaccgaggccttcagcgcctacggcaacaagaccgacaacaccagagagaagagaacccacagaagaaccaagagattcctgagctaccccagattcgtggaggtgctggtggtggccgacaacagaatggtgagctaccacggcgagaacctgcagcactacatcctgaccctgatgagcatcgtggccagcatctacaaggaccccagcatcggcaacctgatcaacatcgtgatcgtgaacctgatcgtgatccacaacgagcaggacggccccagcatcagcttcaacgcccagaccaccctgaagaacttctgccagtggcagcacagcaagaacagccccggcggcatccaccacgacaccgccgtgctgctgaccagacaggacatctgcagagcccacgacaagtgcgacaccctgggcctggccgagctgggcaccatctgcgacccctacagaagctgcagcatcagcgaggacagcggcctgagcaccgccttcaccatcgcccacgagctgggccacgtgttcaacatgccccacgacgacaacaacaagtgcaaggaggagggcgtgaagagcccccagcacgtgatggcccccaccctgaacttctacaccaacccctggatgtggagcaagtgcagcagaaagtacatcaccgagttcctggacaccggctacggcgagtgcctgctgaacgagcccgagagcagaccctaccccctgcccgtgcagctgcccggcatcctgtacaacgtgaacaagcagtgcgagctgatcttcggccccggcagccaggtgtgcccctacatgatgcagtgcagaagactgtggtgcaacaacgtgaacggcgtgcacaagggctgcagaacccagcacaccccctgggccgacggcaccgagtgcgagcccggcaagcactgcaagtacggcttctgcgtgcccaaggagatggacgtgcccgtgaccgacggcagctggggcagctggagccccttcggcacctgcagcagaacctgcggcggcggcatcaagaccgccatcagagagtgcaacagacccgagcccaagaacggcggcaagtactgcgtgggcagaagaatgaagttcaagagctgcaacaccgagccctgcctgaagcagaagagagacttcagagacgagcagtgcgcccacttcgacggcaagcacttcaacatcaacggcctgctgcccaacgtgagatgggtgcccaagtacagcggcatcctgatgaaggacagatgcaagctgttctgcagagtggccggcaacaccgcctactaccagctgagagacagagtgatcgacggcaccccctgcggccaggacaccaacgacatctgcgtgcagggcctgtgcagacaggccggctgcgaccacgtgctgaacagcaaggccagaagagacaagtgcggcgtgtgcggcggcgacaacagcagctgcaagaccgtggccggcaccttcaacaccgtgcactacggctacaacaccgtggtgagaatccccgccggcgccaccaacatcgacgtgagacagcacagcttcagcggcgagaccgacgacgacaactacctggccctgagcagcagcaagggcgagttcctgctgaacggcaacttcgtggtgaccatggccaagagagagatcagaatcggcaacgccgtggtggagtacagcggcagcgagaccgccgtggagagaatcaacagcaccgacagaatcgagcaggagctgctgctgcaggtgctgagcgtgggcaagctgtacaaccccgacgtgagatacagcttcaacatccccatcgaggacaagccccagcagttctactggaacagccacggcccctggcaggcctgcagcaagccctgccagggcgagagaaagagaaagctggtgtgcaccagagagagcgaccagctgaccgtgagcgaccagagatgcgacagactgccccagcccggccacatcaccgagccctgcggcaccgactgcgacctgagatggcacgtggccagcagaagcgagtgcagcgcccagtgcggcctgggctacagaaccctggacatctactgcgccaagtacagcagactggacggcaagaccgagaaggtggacgacggcttctgcagcagccaccccaagcccagcaacagagagaagtgcagcggcgagtgcaacaccggcggctggagatacagcgcctggaccgagtgcagcaagagctgcgacggcggcacccagagaagaagagccatctgcgtgaacaccagaaacgacgtgctggacgacagcaagtgcacccaccaggagaaggtgaccatccagagatgcagcgagttcccctgcccccagtggaagagcggcgactggagcgagtgcctggtgacctgcggcaagggccacaagcacagacaggtgtggtgccagttcggcgaggacagactgaacgacagaatgtgcgaccccgagaccaagcccaccagcatgcagacctgccagcagcccgagtgcgccagctggcaggccggcccctggggccagtgcagcgtgacctgcggccagggctaccagctgagagccgtgaagtgcatcatcggcacctacatgagcgtggtggacgacaacgactgcaacgccgccaccagacccaccgacacccaggactgcgagctgcccagctgccaccccccccccgccgcccccgagaccagaagaagcacctacagcgcccccagaacccagtggagattcggcagctggaccccctgcagcgccacctgcggcaagggcaccagaatgagatacgtgagctgcagagacgagaacggcagcgtggccgacgagagcgcctgcgccaccctgcccagacccgtggccaaggaggagtgcagcgtgaccccctgcggccagtggaaggccctggactggagcagctgcagcgtgacctgcggccagggcagagccaccagacaggtgatgtgcgtgaactacagcgaccacgtgatcgacagaagcgagtgcgaccaggactacatccccgagaccgaccaggactgcagcatgagcccctgcccccagagaacccccgacagcggcctggcccagcaccccttccagaacgaggactacagacccagaagcgccagccccagcagaacccacgtgctgggcggcaaccagtggagaaccggcccctggggcgcctgcagcagcacctgcgccggcggcagccagagaagagtggtggtgtgccaggacgagaacggctacaccgccaacgactgcgtggagagaatcaagcccgacgagcagagagcctgcgagagcggcccctgcccccagtgggcctacggcaactggggcgagtgcaccaagctgtgcggcggcggcatcagaaccagactggtggtgtgccagagaagcaacggcgagagattccccgacctgagctgcgagatcctggacaagccccccgacagagagcagtgcaacacccacgcctgcccccacgacgccgcctggagcaccggcccctggagcagctgcagcgtgagctgcggcagaggccacaagcagagaaacgtgtactgcatggccaaggacggcagccacctggagagcgactactgcaagcacctggccaagccccacggccacagaaagtgcagaggcggcagatgccccaagtggaaggccggcgcctggagccagtgcagcgtgagctgcggcagaggcgtgcagcagagacacgtgggctgccagatcggcacccacaagatcgccagagagaccgagtgcaacccctacaccagacccgagagcgagagagactgccagggccccagatgccccctgtacacctggagagccgaggagtggcaggagtgcaccaagacctgcggcgagggcagcagatacagaaaggtggtgtgcgtggacgacaacaagaacgaggtgcacggcgccagatgcgacgtgagcaagagacccgtggacagagagagctgcagcctgcagccctgcgagtacgtgtggatcaccggcgagtggagcgagtgcagcgtgacctgcggcaagggctacaagcagagactggtgagctgcagcgagatctacaccggcaaggagaactacgagtacagctaccagaccaccatcaactgccccggcacccagccccccagcgtgcacccctgctacctgagagactgccccgtgagcgccacctggagagtgggcaactggggcagctgcagcgtgagctgcggcgtgggcgtgatgcagagaagcgtgcagtgcctgaccaacgaggaccagcccagccacctgtgccacaccgacctgaagcccgaggagagaaagacctgcagaaacgtgtacaactgcgagctgccccagaactgcaaggaggtgaagagactgaagggcgccagcgaggacggcgagtacttcctgatgatcagaggcaagctgctgaagatcttctgcgccggcatgcacagcgaccaccccaaggagtacgtgaccctggtgcacggcgacagcgagaacttcagcgaggtgtacggccacagactgcacaaccccaccgagtgcccctacaacggcagcagaagagacgactgccagtgcagaaaggactacaccgccgccggcttcagcagcttccagaagatcagaatcgacctgaccagcatgcagatcatcaccaccgacctgcagttcgccagaaccagcgagggccaccccgtgcccttcgccaccgccggcgactgctacagcgccgccaagtgcccccagggcagattcagcatcaacctgtacggcaccggcctgagcctgaccgagagcgccagatggatcagccagggcaactacgccgtgagcgacatcaagaagagccccgacggcaccagagtggtgggcaagtgcggcggctactgcggcaagtgcacccccagcagcggcaccggcctggaggtgagagtgctgtag

SEQ ID NO: 257291 - protein, 680 aa, Artificial Sequence
  derived and/or modified sequence
MGKSRTKRFKRPQFSPTGDCQAEAAAAANGTGGEEDDGPAAELLEKLQHPSAEVRECACAGLARLVQQRPALPGLARRDAVRRLGPLLLDPSLAVRETAAGALRNLSACGGFEVCDDMVTKDIMTPLVALLKECSAGLDSNEMSLQEKKDQNRNSIENIANETVNVLWNICECSSRAVSIFNKEGCLEIVLKYLSRFPTNVDLAISVAYCLQTVTEDNPELLKSFSATALNMLESALLSPVSSMESLLLKTLVAGTIWNLKDIIPCKSQAEIINALLKILSEVLGMDAGEMVIQMKEAETQRLKTAAEAEEILENTNGDDLIEDDEMEGISHKRRVRRKTFVSDLLPPTDKELRETIALLTAQQTALEIIVNMCCNEDPSDDEWEELSSSDESDAFMENSFSECGGQLFSPLCLSHEVHTALTNYLIPKKIFEKTAFPNSIAVDLCSRNPTWKPLIRKMNTIQCRALFCLQSLVSLLDVEHLGGAAALQTLAQHLSQLLFSQPDFAKHVDFLEAISSALRALLQTMASKNISQCMTPDQLMTLCKAGIHSSNVGVRVNVVSILGITGSVLAKEDGTLETLKNIGCFLLEVTTKDPSLVVAGEALDALFDVFADGKEAERASIQIKLLSALKEFQPVFKMKIRKEGRGNYSTDQLCVLDNVKMNLRRFIAYQETVEKRLTS

SEQ ID NO: 257292 - DNA, 2043 bp, Artificial Sequence
  derived and/or modified sequence
atgggcaagagcagaaccaagagattcaagagaccccagttcagccccaccggcgactgccaggccgaggccgccgccgccgccaacggcaccggcggcgaggaggacgacggccccgccgccgagctgctggagaagctgcagcaccccagcgccgaggtgagagagtgcgcctgcgccggcctggccagactggtgcagcagagacccgccctgcccggcctggccagaagagacgccgtgagaagactgggccccctgctgctggaccccagcctggccgtgagagagaccgccgccggcgccctgagaaacctgagcgcctgcggcggcttcgaggtgtgcgacgacatggtgaccaaggacatcatgacccccctggtggccctgctgaaggagtgcagcgccggcctggacagcaacgagatgagcctgcaggagaagaaggaccagaacagaaacagcatcgagaacatcgccaacgagaccgtgaacgtgctgtggaacatctgcgagtgcagcagcagagccgtgagcatcttcaacaaggagggctgcctggagatcgtgctgaagtacctgagcagattccccaccaacgtggacctggccatcagcgtggcctactgcctgcagaccgtgaccgaggacaaccccgagctgctgaagagcttcagcgccaccgccctgaacatgctggagagcgccctgctgagccccgtgagcagcatggagagcctgctgctgaagaccctggtggccggcaccatctggaacctgaaggacatcatcccctgcaagagccaggccgagatcatcaacgccctgctgaagatcctgagcgaggtgctgggcatggacgccggcgagatggtgatccagatgaaggaggccgagacccagagactgaagaccgccgccgaggccgaggagatcctggagaacaccaacggcgacgacctgatcgaggacgacgagatggagggcatcagccacaagagaagagtgagaagaaagaccttcgtgagcgacctgctgccccccaccgacaaggagctgagagagaccatcgccctgctgaccgcccagcagaccgccctggagatcatcgtgaacatgtgctgcaacgaggaccccagcgacgacgagtgggaggagctgagcagcagcgacgagagcgacgccttcatggagaacagcttcagcgagtgcggcggccagctgttcagccccctgtgcctgagccacgaggtgcacaccgccctgaccaactacctgatccccaagaagatcttcgagaagaccgccttccccaacagcatcgccgtggacctgtgcagcagaaaccccacctggaagcccctgatcagaaagatgaacaccatccagtgcagagccctgttctgcctgcagagcctggtgagcctgctggacgtggagcacctgggcggcgccgccgccctgcagaccctggcccagcacctgagccagctgctgttcagccagcccgacttcgccaagcacgtggacttcctggaggccatcagcagcgccctgagagccctgctgcagaccatggccagcaagaacatcagccagtgcatgacccccgaccagctgatgaccctgtgcaaggccggcatccacagcagcaacgtgggcgtgagagtgaacgtggtgagcatcctgggcatcaccggcagcgtgctggccaaggaggacggcaccctggagaccctgaagaacatcggctgcttcctgctggaggtgaccaccaaggaccccagcctggtggtggccggcgaggccctggacgccctgttcgacgtgttcgccgacggcaaggaggccgagagagccagcatccagatcaagctgctgagcgccctgaaggagttccagcccgtgttcaagatgaagatcagaaaggagggcagaggcaactacagcaccgaccagctgtgcgtgctggacaacgtgaagatgaacctgagaagattcatcgcctaccaggagaccgtggagaagagactgaccagctag

SEQ ID NO: 257293 - DNA, 2043 bp, Artificial Sequence
  derived and/or modified sequence
atgggaaaatctcgcactaagcgattcaagcggccccagttctcgcctactggcgattgtcaggcagaagctgccgctgcagccaatggtaccggtggagaagaagatgatggaccggctgctgagctgcttgagaagctgcagcatccaagcgctgaggtccgagaatgcgcatgcgcagggttggctaggctggtgcagcagaggcccgcactgccagggctggcacgtcgagatgctgtgaggcggttaggccctctgttattagacccctctttggccgtgcgggagacagccgcgggtgcgctccgaaatctgagtgcatgtgggggatttgaagtttgcgacgatatggtgacaaaggacattatgaccccactcgtggccctgcttaaagaatgttccgctgggctcgactcaaacgagatgagcttgcaggaaaaaaaggatcaaaaccgtaactcaatcgagaatattgcaaacgaaaccgttaacgtgctatggaacatctgtgagtgtagcagccgggctgtgagtatttttaataaagaaggatgtctggaaatagtcctgaagtacctttcaaggttccctaccaatgtggacctggcaattagtgtggcttactgtctccaaaccgtgaccgaggataatcccgagcttctaaagagcttttccgcgacagctctgaatatgctggaatcagctttactgagtccagtcagcagcatggagtctttgctgttgaagacacttgtggcaggtacaatttggaatctgaaggacatcattccctgcaaaagtcaggcggagataatcaatgcactcctaaaaatactgtcagaggtgctgggaatggacgccggcgagatggtcatccagatgaaggaagcggagacacagcgactaaagaccgcagccgaggccgaggagattctcgaaaacaccaatggcgatgatctcattgaagacgatgaaatggaaggaatcagtcataagagacgtgtgcggagaaagactttcgtgtctgacctgctgccccccacagacaaggagctgcgggagactatagccctattaacagcacaacagaccgcgctggaaatcatcgtgaatatgtgctgcaacgaagatccctctgacgacgagtgggaggagctgtcttcatctgacgagtccgacgcttttatggagaactcattttcagagtgcggcggacaactgttctcaccactatgcttgagccatgaggtacatacggcgttgacaaactacttgattcctaagaagatcttcgagaaaacagcattccccaacagcatcgcagttgatctttgcagtcgaaacccgacctggaagccactcatcagaaagatgaacaccatccagtgccgggctctgttttgtttgcagtctctggtatccctgctcgacgtcgagcatctgggtggcgcagccgcccttcagactctggcacagcacctcagccagcttttattctctcagccggactttgccaagcacgtggatttcctggaagccatatcttctgcccttcgcgcgctcttgcagacgatggcctctaagaacatatcccagtgcatgacccctgaccagctgatgactctgtgcaaggcgggaatccacagcagtaatgtgggcgtgcgcgtgaacgtggtgtcaatcctggggatcacagggtcagttctcgccaaagaggacggcactcttgagaccctcaagaacatcggctgcttcctcctcgaggtgaccaccaaggaccctagtctcgtggtggctggcgaagctctcgacgccttattcgatgtatttgcagacggtaaagaagccgaacgcgcttcaatccagataaagctgctctccgcactgaaggaatttcagccagtttttaaaatgaagatacgtaaggaggggcgcgggaactacagtaccgatcagctctgtgtcctcgataatgtgaagatgaacttgaggagatttatcgcctatcaggaaaccgtggagaagcgtttgacaagctag

SEQ ID NO: 257294 - DNA, 2043 bp, Artificial Sequence
  derived and/or modified sequence
atgggcaagagcaggaccaagcgcttcaagaggccccagttcagccccactggagactgccaggccgaggccgctgctgctgccaatggaactggaggagaagaagatgatggccctgctgctgagctgctggagaagctgcagcaccccagcgctgaggtgcgggagtgtgcctgtgccggcctggcccggctggtgcagcagaggcctgccctgcccggcctggccaggagagatgctgtgcggcggctgggccccctgctgctggaccccagcctggccgtgcgggagacagctgctggggccctgaggaacctgagcgcctgtggcggctttgaggtgtgtgatgacatggtgaccaaggacatcatgacccccctggtggccctgctgaaggaatgttctgctggcctggacagcaatgagatgagcctgcaggagaagaaggaccagaacagaaattccattgaaaatattgccaatgaaacagtgaatgtgctgtggaacatctgtgagtgcagcagcagagctgtgtccatcttcaacaaggagggctgcctggagatcgtgctgaagtacctgagccgcttccccaccaacgtggacctggccatctctgtggcctactgcctgcagacagtgacagaggacaaccctgagctgctgaagagcttcagcgccacagccctgaacatgctggagagcgccctgctgagccctgtgtcctccatggagagcctgctgctgaagaccctggtggccggcaccatctggaacctgaaggacatcatcccctgcaagagccaggccgagatcatcaatgccctgctgaagatcctgtctgaggtgctgggcatggatgctggggagatggtgatccagatgaaggaggccgagacccagaggctgaagacagctgctgaggccgaggagatcctggagaacaccaatggagatgacctgattgaagatgatgagatggagggcatcagccacaagagaagagtgcggaggaagacctttgtgtctgacctgctgcccccaacagacaaggagctgcgggagaccatcgccctgctgacagcccagcagacagccctggagatcatcgtgaacatgtgctgcaatgaagaccccagtgatgatgagtgggaggagctgagcagcagtgatgaaagtgatgccttcatggagaacagcttctctgaatgtggcggccagctgttcagccccctgtgcctgagccatgaggtgcacacagccctgaccaactacctgatccccaagaagatctttgagaagacagccttccccaacagcattgctgtggacctgtgcagcaggaaccccacctggaagcccctcatcaggaagatgaacaccatccagtgccgggccctcttctgcctgcagagcctggtgtccctgctggatgtggagcacctgggcggggccgccgccctgcagaccctggcccagcacctgagccagctgctcttcagccagcctgactttgccaagcacgtggacttcctggaggccatcagcagcgccctgcgggccctgctgcagaccatggccagcaagaacatcagccagtgcatgaccccagaccagctgatgaccctgtgcaaggccggcatccacagcagcaatgtgggcgtgcgggtgaatgtggtgtccatcctgggcatcaccggctctgtgctggccaaggaggatggcaccctggagaccctgaagaacatcggctgcttcctgctggaggtgaccaccaaggaccccagcctggtggtggccggggaggccctggatgccctgtttgatgtgtttgctgatggcaaggaggccgagcgggccagcatccagatcaagctgctgagcgccctgaaggagttccagcctgtgttcaagatgaagatcaggaaggagggccggggcaactacagcacagaccagctgtgtgtgctggacaacgtgaagatgaacctgcggcgcttcatcgcctaccaggagaccgtggagaagaggctgaccagctag

SEQ ID NO: 257295 - DNA, 3511 bp, Artificial Sequence
  derived and/or modified sequence
gcgcacggcttgcccatgtgtgctgcagccgtcagccggcccagctgagcagcagcaacggaccttgttaacggcgcggcagcctccaccgcctgctgttgccctcctctctcggtggtctgtccgcccagcgcacgtcaccatgggcaagagccggacgaagcgcttcaagcgacctcagttctcccctacgggcgactgtcaggccgaggcggctgcggcggcgaatgggaccggaggcgaggaggacgacgggccggcggcggagctgctggaaaagctccagcacccgagcgccgaggtccgcgagtgcgcctgcgcagggctggcccggctggtgcagcagcggccggcactcccgggcctggcgcgacgagacgccgtgcgccgcctcgggccgctgctgctagaccccagcctggccgtcagggagactgcagccggcgcgctgagaaatctcagtgcttgtggaggttttgaagtttgtgatgacatggtgactaaggatatcatgacccctctggttgcgctgctaaaagagtgtagtgctggactggattcaaatgagatgtctctgcaggagaaaaaagatcagaacagaaattctattgagaacatagccaatgagactgtgaacgtgctgtggaatatatgtgaatgcagtagtagagcagtgtctatattcaacaaagaagggtgtttggagattgtgttaaagtatttaagtaggtttcctaccaatgttgacctggctatttcagtagcatattgtttgcagacagtgactgaggataacccagagctgctgaagtctttcagtgctacagcattgaacatgctggaatcagcactgctttctcctgtcagttccatggaatctcttctattgaagacattggtagcaggcacaatttggaatctaaaggacattattccatgcaagagtcaagcagaaatcataaatgccttactaaagatcttatctgaagttttgggaatggatgctggtgaaatggttattcaaatgaaagaggctgaaacgcaaaggttaaaaactgctgcagaggctgaggaaatattagagaacactaatggggatgatttgattgaagatgatgaaatggaaggaatttctcataaaagaagagtcagaaggaaaactttcgtttcagatttacttccgcccactgacaaggaactgagagagactatagcattgctgacagcccaacagactgctctggaaattattgtcaacatgtgctgcaatgaagatccctctgatgacgaatgggaagagctttctagcagtgatgaaagtgacgcatttatggagaattccttcagtgagtgcgggggacagctgttttctcccctctgcctctcccatgaagttcacacggctctcaccaactacctcatcccaaagaagatttttgagaaaactgcctttccaaacagcattgcagttgacctatgttctaggaaccctacttggaaacctttgattagaaaaatgaacactattcagtgcagagccctcttctgtctccagagtcttgtgtccctcctggatgtggagcacctgggaggagccgcagcccttcagacgcttgcacagcatctgtcacagctgcttttttctcaaccagattttgctaaacatgttgactttctagaagccataagtagtgctttgagggcccttttgcaaacaatggcctccaagaacatttcccagtgcatgactcctgatcagctgatgacattatgcaaagcaggcattcatagtagtaatgtcggggttagagtgaatgtcgttagcattttaggaatcactggcagcgtccttgccaaagaagatggtacacttgaaactcttaagaacattgggtgctttctgcttgaagttaccaccaaagatccttcccttgtggtagcaggagaagctttggatgccctctttgatgtttttgcagatggtaaagaagccgaaagagcctcgattcaaattaaattattatctgctctgaaagaattccagccggtctttaaaatgaagatacgtaaagaagggagaggtaactatagcacagatcagctgtgtgttcttgacaatgtgaaaatgaatttgcgaagatttattgcttatcaagaaactgttgagaaaagactgacttcttaaacaatccaaaaaagaaaccagttcttcccccaaagtattcaatgcttagaatactaaaaggttttctttgaatgtatatgtttctgaaagtcattttttaatgattacattctgtacattctgtaaaaacttcaaaacctggccaggcatggtggctcacgcctataatcccagcaccttgggagaccgaggcgggtggatcacttgaggtcaggagtttgaggccagcctggccaacatggtgaaaccgcatgcataagcatggtggcacatgcctgtgatcccagctactcgggaggctgagggaggagagtcggttgaacctgggagacagaggttgcagtgagctgagatcacgctactgcactccagcctgggtgacagagggagaccctgtctccaaaaaaaaaaaaaaaaaaaaacttcaaaacctgtcagaaactctgttgctggtttttttgtgtgtgtgttttgtttgtttgttttgttttgttgtttttttcttttttgagatggagtctcactgctgcccaggctgtattacagtgctgcgatcttggcttactgcaacctctgccattccaggttcaagcgattctcatgcctcagcctcctgagtagctggaattacaggcacccaccaccacaccttgtttttgtttttggttttttggtttgtttttttttttcagtagagacgggtttcaccgtgttggccaggctggtctcaaattcctgacctcaagtgatccgcctgccctggcctcccaaagtgctgggattacaggcatgagccaccgtgcctggccagaaactcttttttaagtgatgagatctgtgtggcatttctagcgctctctaaattatgtctctggcatattttaatcactggaaactcaaagagtggaagagtggaagtgcgaaggaatctcaggtagctcttaactaattcgccagcagtgaagaaacttcaaccaatcatgttttccttgaattttgcaaagaaagaaaatccaaagcattgcttggatgttcttttaaggcattttatatcagttgaaccttaaactgaaatatgaagacaagctttataaactagttttttgatatgaagtatatcaattatgtttgccttttgtgaagaagtaaatgagttgaatttctatttcacttactagattatactaatgagctaatggggtcattgccatcctccctactcatgactttgatgagttattgctgtaacatcacttcttgatttaatttgatatggaatcagaattgggagaaggtatttttaaataaacaactttttaatggaaa

SEQ ID NO: 257296 - DNA, 2043 bp, Artificial Sequence
  derived and/or modified sequence
atgggcaagagccggaccaagcggttcaagcggccccagttcagcccgaccggtgattgccaggctgaggctgccgctgctgccaatggaacgggcggagaggaagacgacggcccagcggctgaactgcttgaaaagctacagcacccatctgctgaggttcgtgaatgtgcctgtgccggtctagcaagactggtgcagcaacgccccgcactgcctggattggctagacgcgacgcagtccgcagactgggtccccttttactggatcctagcctcgcggttcgggaaactgcagccggcgcacttcgaaatctgagcgcgtgcggggggttcgaggtttgtgacgacatggtgaccaaggatattatgacccctctggtcgccttgctgaaggaatgctccgccggactggattcgaacgagatgagcctgcaagagaaaaaagaccagaacagaaactctatcgagaacatagctaacgaaaccgtcaatgtgttatggaacatctgtgaatgttcctcccgggctgtgagtattttcaataaggagggctgcttagaaatcgttctgaagtatctgtctcgattccccacaaacgttgacctagccatcagtgtcgcatactgcttacagactgtaaccgaggacaacccagagcttctgaagagcttttcagcaaccgctctgaacatgttagagagtgctctgctgtcacccgtgagttcgatggagtctctgctgctgaaaacccttgtggctggcaccatatggaatctgaaggacattatcccctgcaagagccaagcagaaattattaatgcgctgttgaagatcctgagcgaagtgctgggcatggacgccggcgaaatggtcatccagatgaaggaagccgagacccaaaggttaaaaactgctgcagaggccgaagagattctggaaaatacgaatggcgatgatctgattgaagacgacgagatggaaggcatctctcacaagaggcgggtgcgaaggaaaacctttgtgagtgacctcctcccaccgaccgacaaggagttgagagagaccatcgccctgctgacggcgcagcagactgccctggagatcatcgtaaacatgtgctgtaacgaagatccgtcagatgatgaatgggaggaactaagctctagcgatgaatcagatgcttttatggaaaattcctttagcgagtgcggcggacaattattctcccctctgtgcttgtctcacgaagttcataccgcccttaccaactacctgatacctaagaaaatcttcgagaagaccgcctttcccaactccatcgccgtggacctgtgctccaggaaccccacatggaaaccactgatcaggaaaatgaatacaatccagtgccgcgcgttgttttgcctgcagtccctcgtatcactgcttgatgtggaacatctgggtggggcagccgccctacagaccctggctcagcatctttcccagctgctgttctctcaacccgattttgcaaagcatgtcgattttcttgaggccattagctctgcgctgcgggcattactgcagacaatggcaagcaagaatatttcccaatgtatgacccctgaccagcttatgactctgtgtaaggctggaattcatagctcgaatgtcggggtgcgtgtcaacgtagtgagcattctgggaattactggcagtgtgctggcaaaagaggacggtactttagagaccctgaagaacattggctgctttcttctggaggtaactacaaaggaccccagtctggttgtggctggagaagccctcgacgccctgtttgatgtctttgcggacggcaaagaggccgaaagggcttcgatccaaatcaagctgttaagtgctctgaaggagtttcagcccgtgttcaaaatgaagatcagaaaagagggtcgcgggaattattctacagaccagctgtgcgtcctggataacgttaaaatgaatctgcgacgtttcattgcgtatcaggaaacagtggaaaagagactgacctcttag

SEQ ID NO: 257297 - DNA, 2043 bp, Artificial Sequence
  derived and/or modified sequence
atgggcaagagcagaacgaaacgtttcaagcggccacagttttcgccgactggagattgtcaagctgaggcagctgcggcagcgaatggcaccggtggcgaggaggatgatggacctgcagctgagctattagaaaagctacagcacccgagtgccgaagtgcgcgaatgtgcatgcgcgggactggccaggctggtgcaacaacgcccagctctgcccggattagcgagaagggacgccgttcgaagacttggccctctgctactggacccgagcctcgccgtgagggagacagctgcgggtgccctgaggaatttgagcgcttgcgggggttttgaggtctgtgacgatatggtaaccaaggacatcatgacccctctcgtggccctgctgaaagagtgctcggccggtcttgatagcaacgagatgtccttacaggaaaaaaaagaccaaaaccgtaactccattgaaaacattgccaatgagactgtgaacgtgctttggaatatctgcgagtgttcaagtcgggctgtgagcattttcaataaggagggctgtcttgagatcgtgctcaagtatctgagccggttccctaccaacgtggatcttgcaatctcagtggcttactgtctgcagacagtgactgaggataatcctgagttactgaaatcctttagtgcaactgccttgaatatgctcgaatccgctttactctcccctgtcagcagtatggaaagtctactcctcaagaccttagtggccggaactatttggaatttgaaagacatcataccatgcaaatcccaggcggaaataatcaatgcactgctgaagattttgtcagaggtactgggaatggacgctggtgagatggtgatccaaatgaaagaagccgagacccagaggttaaagaccgccgcagaggctgaagagatcttggagaacactaatggcgacgatctgatagaggacgatgaaatggagggcatctctcacaagcgacgggtgcggagaaagacatttgtgagcgacctgctcccacccacagataaagagctaagggaaaccattgccctcctgacagcacagcagacggctctcgaaattatcgtcaacatgtgttgtaatgaggatcctagtgatgatgagtgggaagaactaagttcttcagatgagtcagacgctttcatggagaatagtttctcagaatgcgggggacagctattttctccactgtgcttgagccatgaagtccatactgcattgacgaactacctgattcctaaaaagatcttcgaaaaaaccgctttccctaatagtatcgccgtggacctgtgcagccgaaatcccacctggaagcctcttatccgaaagatgaatactattcagtgtagagctctgttctgtcttcagagtctcgtgtcattgctcgatgtggaacatctaggcggagccgcagcccttcagacgctggcccaacatttatcgcagcttttgttttcacagccagatttcgccaaacatgtggattttctggaggctatttcatcggctctgcgggctctgctgcaaactatggcttccaagaacatctcacaatgcatgacacccgaccaactcatgacactgtgcaaagccggtatacacagtagtaacgtgggtgtgcgggtaaatgttgtcagcatcctggggattactgggtcagtgttagctaaggaagacggtactcttgagactctgaagaacattggttgcttcctgctggaagtaacaaccaaggatccctcacttgtggttgcaggagaagctctggacgcgctgtttgacgtatttgctgatggcaaggaagccgagcgcgcaagcattcagattaaattgctctcggctctgaaagagttccagccagtgttcaagatgaagatccgcaaagagggcaggggcaactactccaccgatcagctctgcgttctcgataatgtgaagatgaacctgaggagattcattgcttaccaggagaccgtggaaaaacgactaacatcctag

SEQ ID NO: 257298 - protein, 573 aa, Artificial Sequence
  derived and/or modified sequence
MYDNMSTMVYIKEDKLEKLTQDEIISKTKQVIQGLEALKNEHNSILQSLLETLKCLKKDDESNLVEEKSNMIRKSLEMLELGLSEAQVMMALSNHLNAVESEKQKLRAQVRRLCQENQWLRDELANTQQKLQKSEQSVAQLEEEKKHLEFMNQLKKYDDDISPSEDKDTDSTKEPLDDLFPNDEDDPGQGIQQQHSSAAAAAQQGGYEIPARLRTLHNLVIQYASQGRYEVAVPLCKQALEDLEKTSGHDHPDVATMLNILALVYRDQNKYKDAANLLNDALAIREKTLGKDHPAVAATLNNLAVLYGKRGKYKEAEPLCKRALEIREKVLGKDHPDVAKQLNNLALLCQNQGKYEEVEYYYQRALEIYQTKLGPDDPNVAKTKNNLASCYLKQGKFKQAETLYKEILTRAHEREFGSVDDENKPIWMHAEEREECKGKQKDGTSFGEYGGWYKACKVDSPTVTTTLKNLGALYRRQGKFEAAETLEEAAMRSRKQGLDNVHKQRVAEVLNDPENMEKRRSRESLNVDVVKYESGPDGGEEVSMSVEWNGGVSGRASFCGKRQQQQWPGRRHR

SEQ ID NO: 257299 - DNA, 1722 bp, Artificial Sequence
  derived and/or modified sequence
atgtacgacaatatgagcacaatggtctacattaaagaagacaaattggagaagttaacgcaggacgagattattagtaaaacgaaacaagtaatccagggcctagaggcgcttaaaaatgagcacaatagcatcctgcaatccctcctggagacgcttaagtgcctgaagaaagacgacgagtcgaatttggtggaggagaagtctaatatgataagaaaaagtttagaaatgctcgagctcggtttgtcagaggcgcaggtgatgatggccctaagcaaccacctaaatgccgtagagtccgaaaaacaaaagttgagggcccaggtccgccgcctttgccaggaaaaccaatggctgcgcgacgagctggcgaatacacagcagaagttgcagaaaagtgagcaatcagtggctcaactagaggaagagaaaaaacatttggaatttatgaaccaactgaagaagtatgatgacgatatctctccctccgaggataaagataccgacagcacaaaggagccactcgacgatctgtttccgaacgacgaagacgaccccggccaggggattcagcagcagcactcttcagctgctgctgcagctcagcaaggcggctatgaaatccctgcgaggttgcggacacttcacaacctggtgatacaatacgcatctcaggggagatacgaagtcgctgtccctctgtgtaaacaggccctggaggatctcgagaaaacaagtggccatgatcatccggacgtcgccaccatgcttaatatattggctcttgtctatcgcgaccagaacaagtataaagatgccgccaacctgctgaatgacgccttggctatccgcgaaaaaactcttggcaaagatcacccagcagtcgcggccacactgaataacctggccgttttgtatggaaaacgaggtaaatacaaggaagctgagcctctttgcaagcgcgctcttgagattagagaaaaggtcctcggcaaggatcatccagatgtcgctaagcagctcaataatctggccttgctgtgccaaaaccagggaaaatacgaggaggtggaatactactaccagcgggccctggaaatttaccagaccaaattaggcccagatgatccaaatgtggccaaaacaaaaaataacctggcctcttgctacttgaaacaggggaagttcaaacaggctgaaaccctctacaaggaaatcctaaccagggcacacgagagggagttcggaagcgtggacgatgaaaacaaaccaatttggatgcatgctgaggagcgggaagagtgcaagggtaagcagaaggacggcacctcatttggggagtacggaggctggtacaaggcttgcaaggtcgactccccgaccgtcaccacaacgctcaagaacctcggggctctttaccgtcggcaggggaagtttgaagccgcagagaccctcgaggaggcagctatgaggtctcgcaagcaagggctggacaacgtacataagcagcgggtcgctgaggtgctcaatgatcccgagaacatggaaaagaggcgatctagagagtccctgaacgtagacgtcgtaaaatatgagtccggcccagacggcggtgaagaggtgtccatgtccgtggaatggaatgggggggtgagtgggagagcttcgttctgtggcaaaagacagcagcagcagtggccaggccggaggcaccgttag

SEQ ID NO: 257300 - DNA, 1755 bp, Artificial Sequence
  derived and/or modified sequence
atgtacgataacatgagcaccatggtgtacatcaaggaggacaagctcgagaaactgactcaggacgagattatttccaagaccaaacaggtcatacagggtctggaggcattgaaaaatgagcacaattcaatactacagagcttgttagagacgttgaaatgtctaaagaaggatgatgaaagcaacctggtggaagaaaagtctaacatgatcaggaagagcttggaaatgctggaactgggccttagcgaagcacaagtgatgatggccctatccaatcacctcaacgccgtggagagtgagaagcagaagctgcgggctcaggtcagaagactgtgccaggagaaccagtggctccgcgatgagcttgcaaacacacagcagaaattacagaagagcgagcagagtgtcgcgcagctggaagaggagaaaaaacatctggagttcatgaaccagctgaagaagtatgacgacgatatctccccgagtgaggacaaggacaccgatagcacaaaagaacccctggacgatctgtttccaaatgacgaggatgatccagggcagggtattcaacagcagcacagctcggctgccgccgcagcacagcaggggggttacgagattcctgcccgtctccgaactctgcataacctggtgattcagtacgcatcgcagggtaggtatgaagtggcagtccctctgtgtaaacaagccctagaagatctcgagaaaactagcgggcacgatcacccggatgtggccaccatgctaaacattcttgcacttgtttacagagaccagaacaaatacaaagatgctgctaatcttctcaacgatgcccttgcgattagggaaaaaacgctgggaaaagaccaccctgctgtcgcagccaccctgaataatctcgctgtcttgtatggcaaaaggggaaagtacaaggaagcggagcccttatgtaagagggcactggagatccgggaaaaggtgctgggcaaggaccacccagacgtggcgaaacaactgaataatcttgctctcctttgccagaaccaagggaagtatgaggaagttgaatattactatcagcgggcgcttgaaatctaccagactaaactgggccccgacgaccccaatgtcgcaaaaacaaaaaacaacctggcctcatgctatctgaagcagggcaagtttaagcaggcagaaacactatataaggaaattctgacccgggcacacgagagagaattcggctcggtcgacgatgagaacaaaccaatttggatgcacgcggaggagcgagaggaatgtaagggtaagcaaaaagatggcacatctttcggagagtacggcggttggtataaagcttgtaaggttgactccccgaccgtgacaacgacccttaaaaatctgggagccctctaccgcagacagggcaagttcgaggctgccgagacgctggaagaggcagcaatgcggtcaaggaaacagggccttgacaatgtgcacaagcagagggtcgccgaggtgctaaatgatccagaaaacatggaaaaaagacgctctagagaatccctcaatgtggacgtggtaaaatatgagtcaggccccgatggcggagaagaaatgaagagagcatccagtctgaatgtactgaatgtcggcgggaaggctgcagaagacagatttcaggagagaaacaactgtctggccgactcgagggctcttagcgcaagccataccgatctagcacactag

SEQ ID NO: 257301 - DNA, 1695 bp, Artificial Sequence
  derived and/or modified sequence
atgtatgataacatgtcaaccatggtgtacatcaaggaggacaagctagaaaaacttactcaggatgagatcatatccaaaaccaagcaagtcatccagggcctggaggcactcaagaatgaacataattctattctgcagtccctgctggagaccttgaaatgtctgaagaaagacgacgagtccaacctcgtggaagagaaaagtaatatgatccgaaaatcacttgagatgctcgagctggggttaagcgaagctcaggtgatgatggcattgagtaaccaccttaacgcggtggagtcggagaagcaaaagctgagggctcaagttcggcggctctgccaggagaaccagtggctgagggacgagctggctaacacccaacagaagctgcagaaatccgagcaatccgttgcccagcttgaagaagagaagaagcatctggagtttatgaatcaactgaaaaagtatgacgatgatataagcccctccgaggacaaagacaccgacagcactaaggaaccgttagacgacctgtttcctaacgatgaggatgatccagggcagggcattcagcagcaacattcatctgctgcagccgcagctcagcagggcggttacgaaatcccggcccggctgcgaactttgcacaatctggtaatccagtacgcctcccagggtcgctacgaagtcgccgtgcccctttgtaagcaggcgctcgaggacttggaaaagacttctggccacgatcatcctgacgttgcaaccatgcttaacatcctcgccttggtttaccgcgatcagaataaatataaggatgccgctaatcttctgaacgatgctctggccattcgcgagaagactctcggcaaggatcatccagcagtcgccgcgacattgaataacctggccgtcctgtacgggaagagaggaaagtacaaagaggcagagcccctgtgtaagcgtgcccttgagatcagggagaaggtgctcggaaaagatcaccctgatgtcgcgaagcagttgaacaatctcgcactgctttgccaaaaccagggcaagtatgaggaggtggaatactattatcagcgtgctctggaaatataccaaactaagctgggacctgacgacccaaacgttgcaaagaccaaaaataatctcgcctcatgctacctcaagcaagggaagtttaaacaagccgagactttgtataaggagatcctgacacgcgcccacgaacgcgagtttggatcagtcgatgatgagaataagccaatctggatgcatgctgaagaaagagaggagtgcaagggaaaacagaaagatggtacctcattcggcgagtatggcggttggtacaaggcgtgcaaggttgactctcccacagtcaccacaacactcaagaatctgggtgctctctacaggagacagggaaagtttgaggctgcagagacacttgaggaggcagccatgcgatcacggaagcagggcctcgacaatgtgcacaagcagcgtgtggcagaagtgctcaatgaccccgaaaacatggagaagcggcggtcacgtgagagcctcaacgtagacgtggtgaaatacgagtctggtcctgacggtggggaagaaggagtcagcggacgagctagcttctgtggtaagaggcagcagcagcagtggccagggcgtcgccacagatag

SEQ ID NO: 257302 - DNA, 2393 bp, Artificial Sequence
  derived and/or modified sequence
ggcggggcgccggggggagcaacactgagacgccattttcggcggcgggagcggcgcaggcggccgagcgggactggctgggtcggctgggctgctggtgcgaggagccgcggggctgtgctcggcggccaaggggacagcgcgtgggtggccgaggatgctgcggggcggtagctccggcgcccctagctggtgactgctgcgccgtgcctcacacagccgaggcgggctcggcgcacagtcgctgctccgcgcgcgcgcccggcggcgctccaggtgctgacagcgcgagagagcgcggccctcaggagcaaggcgaatgtatgacaacatgtccacaatggtgtacataaaggaagacaagttggagaagcttacacaggatgaaattatttctaagacaaagcaagtaattcaggggctggaagctttgaagaatgagcacaattccattttacaaagtttgctggagacactgaagtgtttgaagaaagatgatgaaagtaatttggtggaggagaaatcaaacatgatccggaagtcactggagatgttggagctcggcctgagtgaggcacaggttatgatggctttgtcaaatcacctgaatgctgtggagtccgagaagcagaaactgcgtgcgcaggttcgtcgtctgtgccaggagaatcagtggctacgggatgaactggccaacacgcagcagaaactgcagaagagtgagcagtctgtggctcaactggaggaggagaagaagcatctggagtttatgaatcagctaaaaaaatatgatgacgacatttccccatccgaggacaaagacactgattctaccaaagagcctctggatgaccttttccccaatgatgaagacgacccagggcaaggaatccagcagcagcacagcagtgcagccgcggctgcccagcagggcggctacgagatccccgcgcggctgcggacgctccacaacctggtgatccagtacgcctcgcaggggcgctacgaggtagctgtgcccctctgcaagcaggccctggaggacctggagaagacttcaggacacgaccacccggacgtggccaccatgctcaacatcctggccttggtgtacagggatcagaataaatacaaagatgcagctaacctactgaatgatgccttggctattcgtgagaaaactttgggcaaagatcatcctgcggtggcggcgactttgaataaccttgcagtcctttatggtaaaagagggaagtacaaagaagcagagccgttgtgtaaaagagctctggaaatccgagaaaaggttttggggaaggatcaccccgatgttgccaagcagttaaataacttggccttactgtgccagaaccagggcaagtatgaagaagtagaatattattatcaaagagccctcgagatctaccagacaaaactgggacctgatgaccccaacgtggctaagacgaaaaataacctggcatcctgctatttgaaacaaggaaagttcaagcaagcagaaacactgtacaaagagattctcactcgtgcacatgaaagggagtttggttctgtagatgatgaaaataaacccatctggatgcatgctgaagaaagagaagaatgcaaaggaaagcaaaaggatgggacatcttttggagagtatggcggctggtacaaagcctgcaaagttgatagtccaactgttacaaccactctaaaaaaccttggggcactttacagacgtcaaggcaaatttgaagctgcagaaacgttagaagaagctgctatgaggtctcgtaaacagggtcttgacaatgttcacaaacagagggtggcagaagtgctcaatgaccctgagaacatggagaagcgcaggagccgtgagagcctcaacgtggacgtggtcaagtacgagagtggccctgacggaggggaggaagtgagtatgagcgtagagtggaacgggggcgtctctggccgagcctctttttgtggaaaacgacagcagcagcagtggcctggaagacgccaccgctaactgaccccgacctggccccgctccaggatgggactgccgagtgtggcccggagctggcccgggacagccagggcggcagggagggcccctggccgggagccgcagcgctcactcatttctcctgcgtctgtgtgcataggacatgatactaataaccacacggctggcgtgaccttggggctggggctgggcctaagctggtgccctggtgcggcgtggtctctcccaggagacctggggcatgagctgggcccacggctcccttcccatgtgtaacttcctcacgttgtgtgcgataacgtattttattgtacatttttttaaattaaaagtttatatgccttatgcttta

SEQ ID NO: 257303 - DNA, 2063 bp, Artificial Sequence
  derived and/or modified sequence
ggggggagcaacactgagacgccattttcggcggcgggagcggcgcaggcggccgagcgggactggctgggtcggctgggctgctggtgcgaggagccgcggggctgtgctcggcggccaaggggacagcgcgtgggtggccgaggatgctgcggggcggtagctccggcgcccctagctggtgactgctgcgccgtgcctcacacagccgaggcgggctcggcgcacagtcgctgctccgcgcgcgcgcccggcggcgctccaggtgctgacagcgcgagagagcgcggccctcaggagcaaggcgaatgtatgacaacatgtccacaatggtgtacataaaggaagacaagttggagaagcttacacaggatgaaattatttctaagacaaagcaagtaattcaggggctggaagctttgaagaatgagcacaattccattttacaaagtttgctggagacactgaagtgtttgaagaaagatgatgaaagtaatttggtggaggagaaatcaaacatgatccggaagtcactggagatgttggagctcggcctgagtgaggcacaggttatgatggctttgtcaaatcacctgaatgctgtggagtccgagaagcagaaactgcgtgcgcaggttcgtcgtctgtgccaggagaatcagtggctacgggatgaactggccaacacgcagcagaaactgcagaagagtgagcagtctgtggctcaactggaggaggagaagaagcatctggagtttatgaatcagctaaaaaaatatgatgacgacatttccccatccgaggacaaagacactgattctaccaaagagcctctggatgaccttttccccaatgatgaagacgacccagggcaaggaatccagcagcagcacagcagtgcagccgcggctgcccagcagggcggctacgagatccccgcgcggctgcggacgctccacaacctggtgatccagtacgcctcgcaggggcgctacgaggtagctgtgcccctctgcaagcaggccctggaggacctggagaagacttcaggacacgaccacccggacgtggccaccatgctcaacatcctggccttggtgtacagggatcagaataaatacaaagatgcagctaacctactgaatgatgccttggctattcgtgagaaaactttgggcaaagatcatcctgcggtggcggcgactttgaataaccttgcagtcctttatggtaaaagagggaagtacaaagaagcagagccgttgtgtaaaagagctctggaaatccgagaaaaggttttggggaaggatcaccccgatgttgccaagcagttaaataacttggccttactgtgccagaaccagggcaagtatgaagaagtagaatattattatcaaagagccctcgagatctaccagacaaaactgggacctgatgaccccaacgtggctaagacgaaaaataacctggcatcctgctatttgaaacaaggaaagttcaagcaagcagaaacactgtacaaagagattctcactcgtgcacatgaaagggagtttggttctgtagatgatgaaaataaacccatctggatgcatgctgaagaaagagaagaatgcaaaggaaagcaaaaggatgggacatcttttggagagtatggcggctggtacaaagcctgcaaagttgatagtccaactgttacaaccactctaaaaaaccttggggcactttacagacgtcaaggcaaatttgaagctgcagaaacgttagaagaagctgctatgaggtctcgtaaacagggtcttgacaatgttcacaaacagagggtggcagaagtgctcaatgaccctgagaacatggagaagcgcaggagccgtgagagcctcaacgtggacgtggtcaagtacgagagtggccctgacggaggggaggaaatgaagcgtgccagctctctgaatgtccttaacgtgggtggcaaggctgctgaagatcgctttcaagaacgaaataattgtctggccgactcgcgagctctgagtgccagccacactgacctggcccactga

SEQ ID NO: 257304 - DNA, 2265 bp, Artificial Sequence
  derived and/or modified sequence
cgagcgggactggctgggtcggctgggctgctggtgcgaggagccgcggggctgtgctcggcggccaaggggacagcgcgtgggtggccgaggatgctgcggggcggtagctccggcgcccctagctggtgactgctgcgccgtgcctcacacagccgaggcgggctcggcgcacagtcgctgctccgcgcgcgcgcccggcggcgctccaggtgctgacagcgcgagagagcgcggccctcaggagcaaggcgaatgtatgacaacatgtccacaatggtgtacataaaggaagacaagttggagaagcttacacaggatgaaattatttctaagacaaagcaagtaattcaggggctggaagctttgaagaatgagcacaattccattttacaaagtttgctggagacactgaagtgtttgaagaaagatgatgaaagtaatttggtggaggagaaatcaaacatgatccggaagtcactggagatgttggagctcggcctgagtgaggcacaggttatgatggctttgtcaaatcacctgaatgctgtggagtccgagaagcagaaactgcgtgcgcaggttcgtcgtctgtgccaggagaatcagtggctacgggatgaactggccaacacgcagcagaaactgcagaagagtgagcagtctgtggctcaactggaggaggagaagaagcatctggagtttatgaatcagctaaaaaaatatgatgacgacatttccccatccgaggacaaagacactgattctaccaaagagcctctggatgaccttttccccaatgatgaagacgacccagggcaaggaatccagcagcagcacagcagtgcagccgcggctgcccagcagggcggctacgagatccccgcgcggctgcggacgctccacaacctggtgatccagtacgcctcgcaggggcgctacgaggtagctgtgcccctctgcaagcaggccctggaggacctggagaagacttcaggacacgaccacccggacgtggccaccatgctcaacatcctggccttggtgtacagggatcagaataaatacaaagatgcagctaacctactgaatgatgccttggctattcgtgagaaaactttgggcaaagatcatcctgcggtggcggcgactttgaataaccttgcagtcctttatggtaaaagagggaagtacaaagaagcagagccgttgtgtaaaagagctctggaaatccgagaaaaggttttggggaaggatcaccccgatgttgccaagcagttaaataacttggccttactgtgccagaaccagggcaagtatgaagaagtagaatattattatcaaagagccctcgagatctaccagacaaaactgggacctgatgaccccaacgtggctaagacgaaaaataacctggcatcctgctatttgaaacaaggaaagttcaagcaagcagaaacactgtacaaagagattctcactcgtgcacatgaaagggagtttggttctgtagatgatgaaaataaacccatctggatgcatgctgaagaaagagaagaatgcaaaggaaagcaaaaggatgggacatcttttggagagtatggcggctggtacaaagcctgcaaagttgatagtccaactgttacaaccactctaaaaaaccttggggcactttacagacgtcaaggcaaatttgaagctgcagaaacgttagaagaagctgctatgaggtctcgtaaacagggtcttgacaatgttcacaaacagagggtggcagaagtgctcaatgaccctgagaacatggagaagcgcaggagccgtgagagcctcaacgtggacgtggtcaagtacgagagtggccctgacggaggggaggaaggcgtctctggccgagcctctttttgtggaaaacgacagcagcagcagtggcctggaagacgccaccgctaactgaccccgacctggccccgctccaggatgggactgccgagtgtggcccggagctggcccgggacagccagggcggcagggagggcccctggccgggagccgcagcgctcactcatttctcctgcgtctgtgtgcataggacatgatactaataaccacacggctggcgtgaccttggggctggggctgggcctaagctggtgccctggtgcggcgtggtctctcccaggagacctggggcatgagctgggcccacggctcccttcccatgtgtaacttcctcacgttgtgtgcgataacgtattttattgtaca

SEQ ID NO: 257305 - DNA, 1722 bp, Artificial Sequence
  derived and/or modified sequence
atgtatgacaacatgagcaccatggtgtacatcaaggaggacaagctggagaagctgacccaggatgagatcatcagcaagaccaagcaggtgatccagggcctggaggccctgaagaatgagcacaacagcatcctgcagagcctgctggagaccctgaagtgcctgaagaaggatgatgagagcaacctggtggaggagaagagcaacatgatcaggaagagcctggagatgctggagctgggcctgtctgaggcccaggtgatgatggccctgagcaaccacctgaatgctgtggagagcgagaagcagaagctgcgggcccaggtgcggcggctgtgccaggagaaccagtggctgagagatgagctggccaacacccagcagaagctgcagaagtctgagcagagcgtggcccagctggaggaggagaagaagcacctggagttcatgaaccagctgaagaagtatgatgatgacatcagccccagcgaggacaaggacacagacagcaccaaggagcccctggatgacctcttccccaatgatgaagatgatcctggccagggcatccagcagcagcacagcagcgctgctgctgctgcccagcagggcggctatgagatcccagcccggctgcggaccctgcacaacctggtgatccagtatgccagccagggccgctatgaggtggccgtgcccctgtgcaagcaggccctggaggacctggagaagaccagcggccatgaccacccagatgtggccaccatgctgaacatcctggccctggtgtacagagaccagaacaagtacaaggatgctgccaacctgctgaatgatgccctggccatccgggagaagaccctgggcaaggaccaccctgctgtggccgccaccctgaacaacctggccgtgctgtatggcaagaggggcaagtacaaggaggccgagcccctgtgcaagagggccctggagatccgggagaaggtgctgggcaaggaccacccagatgtggccaagcagctgaacaacctggccctgctgtgccagaaccagggcaagtatgaggaggtggagtactactaccagagggccctggagatctaccagaccaagctgggcccagatgaccccaacgtggccaagaccaagaacaacctggccagctgctacctgaagcagggcaagttcaagcaggccgagaccctgtacaaggagatcctgacccgggcccacgagcgggagtttggatctgtggatgatgagaacaagcccatctggatgcacgccgaggagcgggaggagtgcaagggcaagcagaaggatggcaccagctttggagaatatggaggctggtacaaggcctgcaaggtggacagccccaccgtgaccaccaccctgaagaacctgggcgccctgtaccgccggcagggcaagtttgaggccgctgagaccctggaggaggccgccatgaggagcaggaagcagggcctggacaacgtgcacaagcagagggtggccgaggtgctgaatgaccctgagaacatggagaagagaagaagccgggagagcctgaatgtggatgtggtgaagtatgagagcggcccagatggaggagaggaggtgtccatgtctgtggagtggaatggaggagtgtctggccgggccagcttctgtgggaagaggcagcagcagcagtggccaggccgccgccacaggtag

SEQ ID NO: 257306 - DNA, 1755 bp, Artificial Sequence
  derived and/or modified sequence
atgtatgacaacatgagcaccatggtgtacatcaaggaggacaagctggagaagctgacccaggatgagatcatcagcaagaccaagcaggtgatccagggcctggaggccctgaagaatgagcacaacagcatcctgcagagcctgctggagaccctgaagtgcctgaagaaggatgatgagagcaacctggtggaggagaagagcaacatgatcaggaagagcctggagatgctggagctgggcctgtctgaggcccaggtgatgatggccctgagcaaccacctgaatgctgtggagagcgagaagcagaagctgcgggcccaggtgcggcggctgtgccaggagaaccagtggctgagagatgagctggccaacacccagcagaagctgcagaagtctgagcagagcgtggcccagctggaggaggagaagaagcacctggagttcatgaaccagctgaagaagtatgatgatgacatcagccccagcgaggacaaggacacagacagcaccaaggagcccctggatgacctcttccccaatgatgaagatgatcctggccagggcatccagcagcagcacagcagcgctgctgctgctgcccagcagggcggctatgagatcccagcccggctgcggaccctgcacaacctggtgatccagtatgccagccagggccgctatgaggtggccgtgcccctgtgcaagcaggccctggaggacctggagaagaccagcggccatgaccacccagatgtggccaccatgctgaacatcctggccctggtgtacagagaccagaacaagtacaaggatgctgccaacctgctgaatgatgccctggccatccgggagaagaccctgggcaaggaccaccctgctgtggccgccaccctgaacaacctggccgtgctgtatggcaagaggggcaagtacaaggaggccgagcccctgtgcaagagggccctggagatccgggagaaggtgctgggcaaggaccacccagatgtggccaagcagctgaacaacctggccctgctgtgccagaaccagggcaagtatgaggaggtggagtactactaccagagggccctggagatctaccagaccaagctgggcccagatgaccccaacgtggccaagaccaagaacaacctggccagctgctacctgaagcagggcaagttcaagcaggccgagaccctgtacaaggagatcctgacccgggcccacgagcgggagtttggatctgtggatgatgagaacaagcccatctggatgcacgccgaggagcgggaggagtgcaagggcaagcagaaggatggcaccagctttggagaatatggaggctggtacaaggcctgcaaggtggacagccccaccgtgaccaccaccctgaagaacctgggcgccctgtaccgccggcagggcaagtttgaggccgctgagaccctggaggaggccgccatgaggagcaggaagcagggcctggacaacgtgcacaagcagagggtggccgaggtgctgaatgaccctgagaacatggagaagagaagaagccgggagagcctgaatgtggatgtggtgaagtatgagagcggcccagatggaggagaggagatgaagagggccagcagcctgaatgtgctgaatgtgggcggcaaggccgcagaagatcgcttccaggagaggaacaactgcctggccgacagccgggccctgagcgccagccacacagacctggcccactag

SEQ ID NO: 257307 - DNA, 1695 bp, Artificial Sequence
  derived and/or modified sequence
atgtatgacaacatgagcaccatggtgtacatcaaggaggacaagctggagaagctgacccaggatgagatcatcagcaagaccaagcaggtgatccagggcctggaggccctgaagaatgagcacaacagcatcctgcagagcctgctggagaccctgaagtgcctgaagaaggatgatgagagcaacctggtggaggagaagagcaacatgatcaggaagagcctggagatgctggagctgggcctgtctgaggcccaggtgatgatggccctgagcaaccacctgaatgctgtggagagcgagaagcagaagctgcgggcccaggtgcggcggctgtgccaggagaaccagtggctgagagatgagctggccaacacccagcagaagctgcagaagtctgagcagagcgtggcccagctggaggaggagaagaagcacctggagttcatgaaccagctgaagaagtatgatgatgacatcagccccagcgaggacaaggacacagacagcaccaaggagcccctggatgacctcttccccaatgatgaagatgatcctggccagggcatccagcagcagcacagcagcgctgctgctgctgcccagcagggcggctatgagatcccagcccggctgcggaccctgcacaacctggtgatccagtatgccagccagggccgctatgaggtggccgtgcccctgtgcaagcaggccctggaggacctggagaagaccagcggccatgaccacccagatgtggccaccatgctgaacatcctggccctggtgtacagagaccagaacaagtacaaggatgctgccaacctgctgaatgatgccctggccatccgggagaagaccctgggcaaggaccaccctgctgtggccgccaccctgaacaacctggccgtgctgtatggcaagaggggcaagtacaaggaggccgagcccctgtgcaagagggccctggagatccgggagaaggtgctgggcaaggaccacccagatgtggccaagcagctgaacaacctggccctgctgtgccagaaccagggcaagtatgaggaggtggagtactactaccagagggccctggagatctaccagaccaagctgggcccagatgaccccaacgtggccaagaccaagaacaacctggccagctgctacctgaagcagggcaagttcaagcaggccgagaccctgtacaaggagatcctgacccgggcccacgagcgggagtttggatctgtggatgatgagaacaagcccatctggatgcacgccgaggagcgggaggagtgcaagggcaagcagaaggatggcaccagctttggagaatatggaggctggtacaaggcctgcaaggtggacagccccaccgtgaccaccaccctgaagaacctgggcgccctgtaccgccggcagggcaagtttgaggccgctgagaccctggaggaggccgccatgaggagcaggaagcagggcctggacaacgtgcacaagcagagggtggccgaggtgctgaatgaccctgagaacatggagaagagaagaagccgggagagcctgaatgtggatgtggtgaagtatgagagcggcccagatggaggagaggagggcgtgtctggccgggccagcttctgtgggaagaggcagcagcagcagtggccaggaagaagacacaggtag

SEQ ID NO: 257308 - DNA, 1722 bp, Artificial Sequence
  derived and/or modified sequence
atgtacgacaacatgagcaccatggtgtacatcaaggaggacaagctagaaaagctcacgcaagatgagattatcagcaagacaaaacaagtgatccagggcctggaagctctgaagaatgaacacaactctattctgcaaagcctacttgaaacccttaagtgcctaaaaaaagacgatgagtccaatctggtggaggagaagtccaatatgattcgtaaatcccttgagatgctcgaactgggactgagtgaggcccaggtgatgatggcactgagtaaccacctgaacgccgtcgaaagtgagaaacaaaagcttcgggcacaggtgaggcggctgtgccaggaaaaccagtggctgcgcgacgaactggccaacactcaacaaaagctgcagaagagcgaacagtcagtggcacagctggaagaagagaaaaagcatcttgagttcatgaatcagttgaagaaatatgatgatgacatctcaccaagcgaagataaggacaccgatagcacgaaagagcctctggacgacctttttcctaatgatgaagacgacccggggcaggggatacagcaacaacattcttccgccgctgccgccgcccagcaaggcggatatgaaatccctgctaggttacgcacactgcacaatctggtgatccagtatgcaagccaaggtcgatacgaggtagccgtacccctctgtaaacaggcactggaggatctggagaagacctcaggccacgatcacccagatgtcgcgaccatgctcaacattttggcactcgtctaccgtgatcaaaacaagtacaaggacgctgccaacctgttgaatgatgcactggctatccgcgagaagaccctggggaaagatcaccccgctgttgccgcaactctcaataaccttgccgtgttgtatggaaaaagagggaagtacaaggaagcagaacccttgtgtaagagagctctagaaatcagggagaaggtactcgggaaggaccaccctgatgttgcaaaacagctaaacaatctcgctctcctgtgccagaatcagggaaaatatgaagaagtggagtactattatcagagggccctggagatttatcaaactaagctgggcccagacgatcctaacgttgccaaaactaagaataatctcgccagctgttacctgaaacagggaaaattcaagcaggccgaaactctgtataaggagatcctcacccgggcgcatgagagggaatttggctctgtcgacgatgaaaacaaaccaatttggatgcacgctgaggaaagggaggaatgcaagggcaagcagaaggatggaacctcctttggggaatatggtggctggtataaggcatgcaaagtagactctcccacagtcaccactacccttaaaaatttaggcgctctgtaccgtcggcagggcaaatttgaagcagccgagaccttggaggaggctgcaatgcgctcacgtaagcagggactggacaatgtgcacaaacagcgagtggccgaggttttgaacgacccagagaacatggaaaagcgcagaagcagggagtccctgaacgtggacgtcgttaagtacgaatcaggtccagatggaggtgaagaggtgtccatgtccgtcgaatggaatgggggtgtctctggacgcgcctccttctgtgggaaaagacagcagcagcagtggccagggcgccggcataggtag

SEQ ID NO: 257309 - DNA, 1755 bp, Artificial Sequence
  derived and/or modified sequence
atgtacgacaacatgagcaccatggtgtacatcaaggaggacaagctcgaaaaacttacacaagatgagatcatttccaagaccaaacaggtcatacagggcctcgaggcccttaagaatgaacataactcaattcttcagagcctcctcgagacccttaaatgcctaaagaaagacgacgagagcaacttggtggaggagaaatctaacatgataagaaaaagcttagaaatgctggaactaggtctgtcagaagcacaggtgatgatggcactgagcaaccaccttaacgcagtcgagagcgaaaagcaaaaactgagggcacaagtgcgtcgcctgtgccaggaaaatcaatggctgagagatgagctggccaatacacagcagaaacttcaaaagtccgaacagagtgtggcccagctagaggaggaaaagaagcaccttgaattcatgaatcagcttaagaagtacgacgatgacatctcgcctagtgaggacaaagatactgactcgacaaaggagccactcgacgatctcttccccaacgatgaagacgaccccggtcaaggaattcagcagcagcactctagtgccgcggcagccgcccaacagggcggctatgagattcctgcacgcctgcgcactttgcacaatttggttattcagtatgcaagccaaggacgctacgaagtggctgtccccctgtgcaagcaggccctggaagatctggaaaagaccagcggtcatgatcaccctgatgtggcgactatgttgaacattctcgcgctggtgtaccgcgatcagaacaaatataaagatgctgccaatcttctcaatgatgcgctggctatacgcgagaaaaccctgggaaaggatcatccagccgtggctgccacactgaacaacttagccgttctttacggtaaaaggggaaagtataaagaggcagaacccttatgtaagagggctctggagatacgagagaaagtgctgggcaaggatcaccccgacgtcgcaaaacagttaaataaccttgccctgttgtgccagaaccagggcaaatatgaggaggtggaatactactatcagagagccctcgagatttatcagactaaacttggtcctgatgatccaaatgtggctaagaccaagaacaacctcgcctcatgctatctcaagcagggcaagtttaaacaagcagaaaccttgtacaaagagatcctgacacgagcacacgagcgggagttcggatcggtcgacgacgagaacaagcctatttggatgcacgccgaagagagagaagaatgcaagggaaagcagaaggatggtacttcctttggcgaatacggggggtggtacaaagcatgtaaggttgacagtccaaccgtaactacgactctcaagaatctgggagccttgtacagacgccaggggaagttcgaggccgctgagaccctagaggaagctgcgatgcgctcccggaagcaggggctggacaatgtgcacaaacagcgggtcgcagaggtactcaatgatcctgagaatatggaaaagagaagatccagggaaagcctcaatgtggatgttgtgaaatatgaatctggtcctgatggcggtgaggagatgaagagagcgagtagcctcaacgtactgaatgttggcggcaaggccgctgaggaccggtttcaggaacggaacaactgcttggccgactcccgcgctctttctgcgagtcatacagacttagcgcactag

SEQ ID NO: 257310 - DNA, 1695 bp, Artificial Sequence
  derived and/or modified sequence
atgtacgacaacatgagcaccatggtgtacatcaaggaggacaagctggagaagcttacacaggacgaaattatttcaaaaacaaagcaggtgatccaagggctggaagctctcaagaacgaacataattccatcctccagtctctcctggagactttgaaatgtctgaaaaaagacgatgagtctaacttggtcgaggaaaaatcaaatatgatccgcaagtccctggagatgttggaacttggcttaagcgaagctcaggtgatgatggcattgagcaaccacctgaatgcggtggaaagtgagaagcagaaattgagggctcaagtgaggcggctctgtcaggaaaaccaatggctgcgagatgagttagcaaatacccaacagaagttgcagaagtcagagcagtccgtggcccagttagaggaagagaaaaaacaccttgagttcatgaatcagctcaagaagtatgatgacgatatatccccaagcgaagataaagacacagattctaccaaagaaccattggatgatttgttccccaatgatgaagatgacccgggacaggggatccagcagcaacactcatctgctgccgctgcagcccagcagggagggtatgagataccggctaggctgcgcacacttcacaaccttgtgattcagtatgcaagccaaggcaggtacgaggtggcagttcccttgtgcaagcaggcccttgaagatctggaaaaaacgagcggtcatgaccacccagacgtggcaactatgctcaatatccttgctctggtgtacagggatcagaacaagtataaagacgcagcaaatctcctgaatgatgcactcgcgataagagagaagacattgggaaaggaccaccccgccgtagccgcaaccctgaataatttggctgtattgtacggaaagagaggaaaatataaagaggccgaacctctctgcaagagagctcttgagatccgcgaaaaagtcctgggcaaggaccaccccgatgtggccaaacagctaaataacctggccttactgtgccaaaaccaaggcaagtacgaggaggtggaatactattaccaacgtgccctggagatttatcagacgaagctagggcctgacgaccccaatgttgccaaaactaagaacaacctagcatcctgctacctgaagcaaggtaagttcaagcaggctgagacactttacaaggagattctcacccgagctcacgaaagagagttcggcagtgtggacgacgagaacaagcccatttggatgcatgctgaggagagagaagagtgcaaaggtaagcagaaggacggaaccagtttcggggagtacggaggctggtacaaagcatgcaaagtcgactcccctaccgtgacaactaccctgaagaatttgggggcactgtatagaagacaggggaaattcgaagccgctgaaacattagaggaggcagccatgagatcgcggaagcagggtttggataatgttcacaagcaacgtgtcgccgaggtcttgaatgatcccgagaatatggagaaaaggcggtcccgcgaaagtctgaatgttgatgtggtgaagtatgagtcaggcccggacgggggagaagagggagttagtggccgtgcgtccttctgcggaaagaggcagcagcaacagtggcctggtaggaggcaccgatag

SEQ ID NO: 257311 - DNA, 1722 bp, Artificial Sequence
  derived and/or modified sequence
atgtatgacaacatgtccacgatggtctacattaaggaggataagctggagaagttaacccaggatgagatcatatcaaagaccaagcaggtaatccaaggcctcgaggcactgaagaacgaacacaactccattctgcagtccttgttggaaactctcaagtgtttgaagaaggacgacgagtcaaatttggtagaagagaagagcaatatgattagaaagagcctcgagatgctggaactgggacttagcgaagcccaagtgatgatggcactgtcaaatcatctgaatgccgttgaatcagaaaaacagaagctgagggctcaagttcgcaggctgtgtcaggaaaatcagtggttacgggatgagcttgcgaatacacagcagaaactccaaaagtccgagcagtctgtggcccagttagaagaagagaagaagcacttagagtttatgaatcagctgaagaaatatgacgatgacatcagtccgagtgaggataaggataccgactcaaccaaggaaccattagatgacctctttcctaacgacgaggatgacccaggccagggcatccagcagcagcacagttcagccgctgccgcagcccaacaaggaggatacgagattcctgccaggctgcggaccctccacaatttggttatccagtacgcttcccagggccgatacgaggtcgctgttccactctgcaaacaggctttagaagatttggagaagaccagcggccacgatcaccccgatgtggctacgatgcttaacatcctggcccttgtttacagagaccagaataagtataaggacgctgccaacttgctgaacgatgcgcttgctattcgagaaaagaccttgggcaaggaccatcccgctgtcgcagcgactttgaacaatctggctgtcctgtacggcaaaagaggcaaatataaagaagccgaacccctgtgtaaacgggctctggaaatcagagaaaaggtgctaggaaaagaccacccagacgtcgctaaacaacttaacaacctggccctgttatgccagaatcagggaaagtatgaagaagtggaatattattaccagagggctcttgagatctaccagacaaaattaggcccagatgatccgaacgtggcgaagactaagaataacttggcctcatgttatctgaagcaaggcaagttcaagcaagccgaaactctgtataaagaaattttgactagggctcacgagcgagagttcgggtcagtggatgatgagaataagcccatatggatgcacgcggaggagcgagaggagtgtaaaggaaaacagaaggatggaaccagctttggcgagtatgggggttggtacaaagcctgtaaagtggactctcccacagtgaccaccaccctcaaaaatttaggcgctctgtatcggaggcagggaaagttcgaggccgctgagaccctggaggaggcggctatgcggagccgcaagcaggggttagacaacgttcacaagcagagggtcgccgaagtactgaatgaccctgagaatatggagaaacggcgatcacgcgaaagcctcaacgtagatgtcgttaagtatgaaagcggtccagatggcggagaggaagtgtctatgtctgttgaatggaacggcggagtaagcgggcgagccagtttttgcggcaagcgtcagcagcagcaatggcccggtcgacgacatagatag

SEQ ID NO: 257312 - DNA, 1755 bp, Artificial Sequence
  derived and/or modified sequence
atgtacgataatatgagtaccatggtctacatcaaggaagacaagctggagaaactgactcaagatgaaattatttccaaaactaagcaagtgatccagggtctggaagctctgaaaaacgagcataacagcatcctgcaaagtctgttggaaacattaaagtgtcttaaaaaagatgatgagtccaacttagtggaggagaagagcaacatgattcgaaaatcactagagatgctcgaactggggttgagcgaagctcaggttatgatggcattaagcaaccacctgaacgcagtggaatccgagaaacagaagctgcgggctcaggtgcgccgactgtgtcaggagaatcaatggctcagggatgaactcgcaaacacccagcaaaagttgcagaaatctgaacagtcagtggcgcagttagaagaagaaaagaagcatctggagtttatgaaccagttgaagaagtacgacgatgatatctctccatccgaagataaagatacagacagtaccaaggaacccctcgacgatctctttccaaatgacgaagatgaccctggccaaggtattcagcagcagcattcttctgcggcagccgctgctcagcaaggaggctacgaaatcccggctcgcttacgaaccttacataatctagtgatccaatacgccagccaggggagatatgaggtcgcagtgccattatgcaagcaggcgctggaagacttagagaaaacatctggccacgatcatcccgatgtcgccaccatgttaaatatccttgcacttgtctaccgtgatcagaacaagtataaagacgctgccaatttgctgaatgatgccttagccatccgggaaaaaactttaggaaaggaccaccccgctgtggcagccaccttaaacaacctggctgtcctgtatggaaaacgcggtaagtacaaggaggccgagccactctgcaagcgagctctggaaatccgtgaaaaagtgctggggaaagatcaccctgatgtggccaagcagctcaacaatttagcattactctgtcagaatcaagggaaatacgaagaagtcgagtattactatcagcgcgcactggagatttaccaaaccaagctcgggcctgacgatccaaatgtggccaagactaaaaataacttggcatcttgctatctcaaacagggtaagtttaaacaagccgagaccctgtataaggaaatccttacaagggctcatgagcgcgagttcgggagcgtcgacgacgagaataagccgatttggatgcacgcagaggagagggaggaatgcaaaggtaagcaaaaagatggcacatcttttggagaatatggaggctggtataaggcctgcaaggtggattctcctactgtgacaaccaccctaaaaaatctgggtgccctgtaccggagacagggcaaatttgaggcagccgaaacactagaggaagcggcaatgcggagccgcaaacaggggctggataatgtccacaaacagcgtgtcgccgaggtcctcaatgacccagagaacatggagaaacgacggagccgggagtctctgaacgtggacgttgtcaagtacgagtccggtcctgacggtggggaggagatgaaaagggcatcctcgcttaatgtgctcaatgtgggcggaaaggcggctgaggacaggttccaagagcggaataactgtctcgcagacagccgcgcactgagcgcctcacataccgatcttgctcattag

SEQ ID NO: 257313 - DNA, 1695 bp, Artificial Sequence
  derived and/or modified sequence
atgtatgataatatgagtactatggtttatatcaaggaggataaactggagaagctaacacaggacgagattatctccaaaaccaaacaagtgatccaaggtcttgaggcactcaaaaacgagcataactcaattcttcagagcttactggagaccctcaaatgcctcaagaaggacgacgaatccaacctagtggaggagaagtccaacatgattagaaaaagtctggagatgttagagttaggccttagtgaagcacaagtgatgatggcactgtcaaaccatttaaacgcggtggagtcagagaagcaaaaactcagggcacaggtgagacgattatgtcaggaaaaccagtggctgagagacgaattggcaaacacgcagcagaagctccagaaatccgaacagtccgtcgcccagctcgaggaagagaagaagcatctggagtttatgaaccagcttaagaagtacgacgatgacataagcccttcggaggacaaagatactgacagcaccaaagaacctttggacgacttgttcccaaatgatgaggacgatcccggacagggcatccagcagcaacacagcagtgcggcagcagccgctcagcaaggtggctacgagatccctgcgaggctgcgcaccctccacaacctggttatacagtatgctagccagggcaggtatgaagtggcagtgcccctgtgtaaacaggccctcgaggatttggaaaagacttctggacacgatcatcctgacgtcgctacaatgttaaatattctcgcgttggtctaccgggatcagaataagtacaaagatgccgcaaacctgcttaacgatgcccttgctatcagagagaaaactctgggtaaggaccatcccgctgtggctgccacgttgaataacctcgccgtattgtatgggaagaggggaaaatacaaggaggcggaacctctatgcaagcgcgcattagagatcagggaaaaggtcctaggtaaggaccaccccgatgtcgcaaaacagctcaataacctcgcattgctctgccaaaatcagggaaaatatgaggaagtggagtattattatcagagggccctggagatttatcagaccaaactgggccctgatgaccccaacgtggccaagacaaaaaataatcttgcctcttgctatctcaaacagggtaagtttaaacaagctgagaccctgtacaaggaaatcctgactcgcgcacatgaacgggaattcggttcagtagatgatgagaataagcccatatggatgcatgcagaggagcgtgaagagtgcaagggaaagcagaaggatggcactagtttcggcgagtatggcggttggtacaaggcttgcaaagtggattcaccgactgttacaacaacccttaaaaaccttggagccttatatcgaaggcaggggaaatttgaggcagctgagactcttgaagaagcagctatgcgatctagaaagcaaggccttgataacgtacataaacagagggttgcagaggtactcaacgaccctgaaaatatggaaaagagacgttcgcgggagtcgctgaatgtggatgtcgtcaagtatgagagcgggcctgacggaggagaagagggtgtaagcggccgtgcaagcttctgtggcaagcggcagcaacagcagtggccgggacgtcgccatagatag

SEQ ID NO: 257314 - DNA, 1722 bp, Artificial Sequence
  derived and/or modified sequence
atgtacgacaacatgagcaccatggtgtacatcaaggaggacaagctggagaagctgacccaggacgagatcatcagcaagaccaagcaggtgatccagggcctggaggccctgaagaacgagcacaacagcatcctgcagagcctgctggagaccctgaagtgcctgaagaaggacgacgagagcaacctggtggaggagaagagcaacatgatcagaaagagcctggagatgctggagctgggcctgagcgaggcccaggtgatgatggccctgagcaaccacctgaacgccgtggagagcgagaagcagaagctgagagcccaggtgagaagactgtgccaggagaaccagtggctgagagacgagctggccaacacccagcagaagctgcagaagagcgagcagagcgtggcccagctggaggaggagaagaagcacctggagttcatgaaccagctgaagaagtacgacgacgacatcagccccagcgaggacaaggacaccgacagcaccaaggagcccctggacgacctgttccccaacgacgaggacgaccccggccagggcatccagcagcagcacagcagcgccgccgccgccgcccagcagggcggctacgagatccccgccagactgagaaccctgcacaacctggtgatccagtacgccagccagggcagatacgaggtggccgtgcccctgtgcaagcaggccctggaggacctggagaagaccagcggccacgaccaccccgacgtggccaccatgctgaacatcctggccctggtgtacagagaccagaacaagtacaaggacgccgccaacctgctgaacgacgccctggccatcagagagaagaccctgggcaaggaccaccccgccgtggccgccaccctgaacaacctggccgtgctgtacggcaagagaggcaagtacaaggaggccgagcccctgtgcaagagagccctggagatcagagagaaggtgctgggcaaggaccaccccgacgtggccaagcagctgaacaacctggccctgctgtgccagaaccagggcaagtacgaggaggtggagtactactaccagagagccctggagatctaccagaccaagctgggccccgacgaccccaacgtggccaagaccaagaacaacctggccagctgctacctgaagcagggcaagttcaagcaggccgagaccctgtacaaggagatcctgaccagagcccacgagagagagttcggcagcgtggacgacgagaacaagcccatctggatgcacgccgaggagagagaggagtgcaagggcaagcagaaggacggcaccagcttcggcgagtacggcggctggtacaaggcctgcaaggtggacagccccaccgtgaccaccaccctgaagaacctgggcgccctgtacagaagacagggcaagttcgaggccgccgagaccctggaggaggccgccatgagaagcagaaagcagggcctggacaacgtgcacaagcagagagtggccgaggtgctgaacgaccccgagaacatggagaagagaagaagcagagagagcctgaacgtggacgtggtgaagtacgagagcggccccgacggcggcgaggaggtgagcatgagcgtggagtggaacggcggcgtgagcggcagagccagcttctgcggcaagagacagcagcagcagtggcccggcagaagacacagatag

SEQ ID NO: 257315 - DNA, 1755 bp, Artificial Sequence
  derived and/or modified sequence
atgtacgacaacatgagcaccatggtgtacatcaaggaggacaagctggagaagctgacccaggacgagatcatcagcaagaccaagcaggtgatccagggcctggaggccctgaagaacgagcacaacagcatcctgcagagcctgctggagaccctgaagtgcctgaagaaggacgacgagagcaacctggtggaggagaagagcaacatgatcagaaagagcctggagatgctggagctgggcctgagcgaggcccaggtgatgatggccctgagcaaccacctgaacgccgtggagagcgagaagcagaagctgagagcccaggtgagaagactgtgccaggagaaccagtggctgagagacgagctggccaacacccagcagaagctgcagaagagcgagcagagcgtggcccagctggaggaggagaagaagcacctggagttcatgaaccagctgaagaagtacgacgacgacatcagccccagcgaggacaaggacaccgacagcaccaaggagcccctggacgacctgttccccaacgacgaggacgaccccggccagggcatccagcagcagcacagcagcgccgccgccgccgcccagcagggcggctacgagatccccgccagactgagaaccctgcacaacctggtgatccagtacgccagccagggcagatacgaggtggccgtgcccctgtgcaagcaggccctggaggacctggagaagaccagcggccacgaccaccccgacgtggccaccatgctgaacatcctggccctggtgtacagagaccagaacaagtacaaggacgccgccaacctgctgaacgacgccctggccatcagagagaagaccctgggcaaggaccaccccgccgtggccgccaccctgaacaacctggccgtgctgtacggcaagagaggcaagtacaaggaggccgagcccctgtgcaagagagccctggagatcagagagaaggtgctgggcaaggaccaccccgacgtggccaagcagctgaacaacctggccctgctgtgccagaaccagggcaagtacgaggaggtggagtactactaccagagagccctggagatctaccagaccaagctgggccccgacgaccccaacgtggccaagaccaagaacaacctggccagctgctacctgaagcagggcaagttcaagcaggccgagaccctgtacaaggagatcctgaccagagcccacgagagagagttcggcagcgtggacgacgagaacaagcccatctggatgcacgccgaggagagagaggagtgcaagggcaagcagaaggacggcaccagcttcggcgagtacggcggctggtacaaggcctgcaaggtggacagccccaccgtgaccaccaccctgaagaacctgggcgccctgtacagaagacagggcaagttcgaggccgccgagaccctggaggaggccgccatgagaagcagaaagcagggcctggacaacgtgcacaagcagagagtggccgaggtgctgaacgaccccgagaacatggagaagagaagaagcagagagagcctgaacgtggacgtggtgaagtacgagagcggccccgacggcggcgaggagatgaagagagccagcagcctgaacgtgctgaacgtgggcggcaaggccgccgaggacagattccaggagagaaacaactgcctggccgacagcagagccctgagcgccagccacaccgacctggcccactag

SEQ ID NO: 257316 - DNA, 1695 bp, Artificial Sequence
  derived and/or modified sequence
atgtacgacaacatgagcaccatggtgtacatcaaggaggacaagctggagaagctgacccaggacgagatcatcagcaagaccaagcaggtgatccagggcctggaggccctgaagaacgagcacaacagcatcctgcagagcctgctggagaccctgaagtgcctgaagaaggacgacgagagcaacctggtggaggagaagagcaacatgatcagaaagagcctggagatgctggagctgggcctgagcgaggcccaggtgatgatggccctgagcaaccacctgaacgccgtggagagcgagaagcagaagctgagagcccaggtgagaagactgtgccaggagaaccagtggctgagagacgagctggccaacacccagcagaagctgcagaagagcgagcagagcgtggcccagctggaggaggagaagaagcacctggagttcatgaaccagctgaagaagtacgacgacgacatcagccccagcgaggacaaggacaccgacagcaccaaggagcccctggacgacctgttccccaacgacgaggacgaccccggccagggcatccagcagcagcacagcagcgccgccgccgccgcccagcagggcggctacgagatccccgccagactgagaaccctgcacaacctggtgatccagtacgccagccagggcagatacgaggtggccgtgcccctgtgcaagcaggccctggaggacctggagaagaccagcggccacgaccaccccgacgtggccaccatgctgaacatcctggccctggtgtacagagaccagaacaagtacaaggacgccgccaacctgctgaacgacgccctggccatcagagagaagaccctgggcaaggaccaccccgccgtggccgccaccctgaacaacctggccgtgctgtacggcaagagaggcaagtacaaggaggccgagcccctgtgcaagagagccctggagatcagagagaaggtgctgggcaaggaccaccccgacgtggccaagcagctgaacaacctggccctgctgtgccagaaccagggcaagtacgaggaggtggagtactactaccagagagccctggagatctaccagaccaagctgggccccgacgaccccaacgtggccaagaccaagaacaacctggccagctgctacctgaagcagggcaagttcaagcaggccgagaccctgtacaaggagatcctgaccagagcccacgagagagagttcggcagcgtggacgacgagaacaagcccatctggatgcacgccgaggagagagaggagtgcaagggcaagcagaaggacggcaccagcttcggcgagtacggcggctggtacaaggcctgcaaggtggacagccccaccgtgaccaccaccctgaagaacctgggcgccctgtacagaagacagggcaagttcgaggccgccgagaccctggaggaggccgccatgagaagcagaaagcagggcctggacaacgtgcacaagcagagagtggccgaggtgctgaacgaccccgagaacatggagaagagaagaagcagagagagcctgaacgtggacgtggtgaagtacgagagcggccccgacggcggcgaggagggcgtgagcggcagagccagcttctgcggcaagagacagcagcagcagtggcccggcagaagacacagatag

SEQ ID NO: 257317 - protein, 1363 aa, Artificial Sequence
  derived and/or modified sequence
MQRGAALCLRLWLCLGLLDGLVSGYSMTPPTLNITEESHVIDTGDSLSISCRGQHPLEWAWPGAQEAPATGDKDSEDTGVVRDCEGTDARPYCKVLLLHEVHANDTGSYVCYYKYIKARIEGTTAASSYVFVRDFEQPFINKPDTLLVNRKDAMWVPCLVSIPGLNVTLRSQSSVLWPDGQEVVWDDRRGMLVSTPLLHDALYLQCETTWGDQDFLSNPFLVHITGNELYDIQLLPRKSLELLVGEKLVLNCTVWAEFNSGVTFDWDYPGKQAERGKWVPERRSQQTHTELSSILTIHNVSQHDLGSYVCKANNGIQRFRESTEVIVHENPFISVEWLKGPILEATAGDELVKLPVKLAAYPPPEFQWYKDGKALSGRHSPHALVLKEVTEASTGTYTLALWNSAAGLRRNISLELVVNVPPQIHEKEASSPSIYSRHSRQALTCTAYGVPLPLSIQWHWRPWTPCKMFAQRSLRRRQQQDLMPQCRDWRAVTTQDAVNPIESLDTWTEFVEGKNKTVSKLVIQNANVSAMYKCVVSNKVGQDERLIYFYVTTIPDGFTIESKPSEELLEGQPVLLSCQADSYKYEHLRWYRLNLSTLHDAHGNPLLLDCKNVHLFATPLAASLEEVAPGARHATLSLSIPRVAPEHEGHYVCEVQDRRSHDKHCHKKYLSVQALEAPRLTQNLTDLLVNVSDSLEMQCLVAGAHAPSIVWYKDERLLEEKSGVDLADSNQKLSIQRVREEDAGRYLCSVCNAKGCVNSSASVAVEGSEDKGSMEIVILVGTGVIAVFFWVLLLLIFCNMRRPAHADIKTGYLSIIMDPGEVPLEEQCEYLSYDASQWEFPRERLHLGRVLGYGAFGKVVEASAFGIHKGSSCDTVAVKMLKEGATASEHRALMSELKILIHIGNHLNVVNLLGACTKPQGPLMVIVEFCKYGNLSNFLRAKRDAFSPCAEKSPEQRGRFRAMVELARLDRRRPGSSDRVLFARFSKTEGGARRASPDQEAEDLWLSPLTMEDLVCYSFQVARGMEFLASRKCIHRDLAARNILLSESDVVKICDFGLARDIYKDPDYVRKGSARLPLKWMAPESIFDKVYTTQSDVWSFGVLLWEIFSLGASPYPGVQINEEFCQRLRDGTRMRAPELATPAIRRIMLNCWSGDPKARPAFSELVEILGDLLQGRGLQEEEEVCMAPRSSQSSEEGSFSQVSTMALHIAQADAEDSPPSLQRHSLAARYYNWVSFPGCLARGAETRGSSRMKTFEEFPMTPTTYKGSVDNQTDSGMVLASEEFEQIESRHRQESGFSCKGPGQNVAVTRAHPDSQGRRRRPERGARGGQVFYNSEYGELSEPSEEDHCSPSARVTFFTDNSY

SEQ ID NO: 257318 - DNA, 4092 bp, Artificial Sequence
  derived and/or modified sequence
atgcagagaggcgccgccctgtgcctgagactgtggctgtgcctgggcctgctggacggcctggtgagcggctacagcatgaccccccccaccctgaacatcaccgaggagagccacgtgatcgacaccggcgacagcctgagcatcagctgcagaggccagcaccccctggagtgggcctggcccggcgcccaggaggcccccgccaccggcgacaaggacagcgaggacaccggcgtggtgagagactgcgagggcaccgacgccagaccctactgcaaggtgctgctgctgcacgaggtgcacgccaacgacaccggcagctacgtgtgctactacaagtacatcaaggccagaatcgagggcaccaccgccgccagcagctacgtgttcgtgagagacttcgagcagcccttcatcaacaagcccgacaccctgctggtgaacagaaaggacgccatgtgggtgccctgcctggtgagcatccccggcctgaacgtgaccctgagaagccagagcagcgtgctgtggcccgacggccaggaggtggtgtgggacgacagaagaggcatgctggtgagcacccccctgctgcacgacgccctgtacctgcagtgcgagaccacctggggcgaccaggacttcctgagcaaccccttcctggtgcacatcaccggcaacgagctgtacgacatccagctgctgcccagaaagagcctggagctgctggtgggcgagaagctggtgctgaactgcaccgtgtgggccgagttcaacagcggcgtgaccttcgactgggactaccccggcaagcaggccgagagaggcaagtgggtgcccgagagaagaagccagcagacccacaccgagctgagcagcatcctgaccatccacaacgtgagccagcacgacctgggcagctacgtgtgcaaggccaacaacggcatccagagattcagagagagcaccgaggtgatcgtgcacgagaaccccttcatcagcgtggagtggctgaagggccccatcctggaggccaccgccggcgacgagctggtgaagctgcccgtgaagctggccgcctaccccccccccgagttccagtggtacaaggacggcaaggccctgagcggcagacacagcccccacgccctggtgctgaaggaggtgaccgaggccagcaccggcacctacaccctggccctgtggaacagcgccgccggcctgagaagaaacatcagcctggagctggtggtgaacgtgcccccccagatccacgagaaggaggccagcagccccagcatctacagcagacacagcagacaggccctgacctgcaccgcctacggcgtgcccctgcccctgagcatccagtggcactggagaccctggaccccctgcaagatgttcgcccagagaagcctgagaagaagacagcagcaggacctgatgccccagtgcagagactggagagccgtgaccacccaggacgccgtgaaccccatcgagagcctggacacctggaccgagttcgtggagggcaagaacaagaccgtgagcaagctggtgatccagaacgccaacgtgagcgccatgtacaagtgcgtggtgagcaacaaggtgggccaggacgagagactgatctacttctacgtgaccaccatccccgacggcttcaccatcgagagcaagcccagcgaggagctgctggagggccagcccgtgctgctgagctgccaggccgacagctacaagtacgagcacctgagatggtacagactgaacctgagcaccctgcacgacgcccacggcaaccccctgctgctggactgcaagaacgtgcacctgttcgccacccccctggccgccagcctggaggaggtggcccccggcgccagacacgccaccctgagcctgagcatccccagagtggcccccgagcacgagggccactacgtgtgcgaggtgcaggacagaagaagccacgacaagcactgccacaagaagtacctgagcgtgcaggccctggaggcccccagactgacccagaacctgaccgacctgctggtgaacgtgagcgacagcctggagatgcagtgcctggtggccggcgcccacgcccccagcatcgtgtggtacaaggacgagagactgctggaggagaagagcggcgtggacctggccgacagcaaccagaagctgagcatccagagagtgagagaggaggacgccggcagatacctgtgcagcgtgtgcaacgccaagggctgcgtgaacagcagcgccagcgtggccgtggagggcagcgaggacaagggcagcatggagatcgtgatcctggtgggcaccggcgtgatcgccgtgttcttctgggtgctgctgctgctgatcttctgcaacatgagaagacccgcccacgccgacatcaagaccggctacctgagcatcatcatggaccccggcgaggtgcccctggaggagcagtgcgagtacctgagctacgacgccagccagtgggagttccccagagagagactgcacctgggcagagtgctgggctacggcgccttcggcaaggtggtggaggccagcgccttcggcatccacaagggcagcagctgcgacaccgtggccgtgaagatgctgaaggagggcgccaccgccagcgagcacagagccctgatgagcgagctgaagatcctgatccacatcggcaaccacctgaacgtggtgaacctgctgggcgcctgcaccaagccccagggccccctgatggtgatcgtggagttctgcaagtacggcaacctgagcaacttcctgagagccaagagagacgccttcagcccctgcgccgagaagagccccgagcagagaggcagattcagagccatggtggagctggccagactggacagaagaagacccggcagcagcgacagagtgctgttcgccagattcagcaagaccgagggcggcgccagaagagccagccccgaccaggaggccgaggacctgtggctgagccccctgaccatggaggacctggtgtgctacagcttccaggtggccagaggcatggagttcctggccagcagaaagtgcatccacagagacctggccgccagaaacatcctgctgagcgagagcgacgtggtgaagatctgcgacttcggcctggccagagacatctacaaggaccccgactacgtgagaaagggcagcgccagactgcccctgaagtggatggcccccgagagcatcttcgacaaggtgtacaccacccagagcgacgtgtggagcttcggcgtgctgctgtgggagatcttcagcctgggcgccagcccctaccccggcgtgcagatcaacgaggagttctgccagagactgagagacggcaccagaatgagagcccccgagctggccacccccgccatcagaagaatcatgctgaactgctggagcggcgaccccaaggccagacccgccttcagcgagctggtggagatcctgggcgacctgctgcagggcagaggcctgcaggaggaggaggaggtgtgcatggcccccagaagcagccagagcagcgaggagggcagcttcagccaggtgagcaccatggccctgcacatcgcccaggccgacgccgaggacagcccccccagcctgcagagacacagcctggccgccagatactacaactgggtgagcttccccggctgcctggccagaggcgccgagaccagaggcagcagcagaatgaagaccttcgaggagttccccatgacccccaccacctacaagggcagcgtggacaaccagaccgacagcggcatggtgctggccagcgaggagttcgagcagatcgagagcagacacagacaggagagcggcttcagctgcaagggccccggccagaacgtggccgtgaccagagcccaccccgacagccagggcagaagaagaagacccgagagaggcgccagaggcggccaggtgttctacaacagcgagtacggcgagctgagcgagcccagcgaggaggaccactgcagccccagcgccagagtgaccttcttcaccgacaacagctactag

SEQ ID NO: 257319 - DNA, 2283 bp, Artificial Sequence
  derived and/or modified sequence
atgctggtgagcacccccctgctgcacgacgccctgtacctgcagtgcgagaccacctggggcgaccaggacttcctgagcaaccccttcctggtgcacatcaccggcaacgagctgtacgacatccagctgctgcccagaaagagcctggagctgctggtgggcgagaagctggtgctgaactgcaccgtgtgggccgagttcaacagcggcgtgaccttcgactgggactaccccggcaagcaggccgagagaggcaagtgggtgcccgagagaagaagccagcagacccacaccgagctgagcagcatcctgaccatccacaacgtgagccagcacgacctgggcagctacgtgtgcaaggccaacaacggcatccagagattcagagagagcaccgaggtgatcgtgcacgagaaccccttcatcagcgtggagtggctgaagggccccatcctggaggccaccgccggcgacgagctggtgaagctgcccgtgaagctggccgcctaccccccccccgagttccagtggtacaaggacggcaaggccctgagcggcagacacagcccccacgccctggtgctgaaggaggtgaccgaggccagcaccggcacctacaccctggccctgtggaacagcgccgccggcctgagaagaaacatcagcctggagctggtggtgaacgtgcccccccagatccacgagaaggaggccagcagccccagcatctacagcagacacagcagacaggccctgacctgcaccgcctacggcgtgcccctgcccctgagcatccagtggcactggagaccctggaccccctgcaagatgttcgcccagagaagcctgagaagaagacagcagcaggacctgatgccccagtgcagagactggagagccgtgaccacccaggacgccgtgaaccccatcgagagcctggacacctggaccgagttcgtggagggcaagaacaagaccgtgagcaagctggtgatccagaacgccaacgtgagcgccatgtacaagtgcgtggtgagcaacaaggtgggccaggacgagagactgatctacttctacgtgaccaccatccccgacggcttcaccatcgagagcaagcccagcgaggagctgctggagggccagcccgtgctgctgagctgccaggccgacagctacaagtacgagcacctgagatggtacagactgaacctgagcaccctgcacgacgcccacggcaaccccctgctgctggactgcaagaacgtgcacctgttcgccacccccctggccgccagcctggaggaggtggcccccggcgccagacacgccaccctgagcctgagcatccccagagtggcccccgagcacgagggccactacgtgtgcgaggtgcaggacagaagaagccacgacaagcactgccacaagaagtacctgagcgtgcaggccctggaggcccccagactgacccagaacctgaccgacctgctggtgaacgtgagcgacagcctggagatgcagtgcctggtggccggcgcccacgcccccagcatcgtgtggtacaaggacgagagactgctggaggagaagagcggcgtggacctggccgacagcaaccagaagctgagcatccagagagtgagagaggaggacgccggcagatacctgtgcagcgtgtgcaacgccaagggctgcgtgaacagcagcgccagcgtggccgtggagggcagcgaggacaagggcagcatggagatcgtgatcctggtgggcaccggcgtgatcgccgtgttcttctgggtgctgctgctgctgatcttctgcaacatgagaagacccgcccacgccgacatcaagaccggctacctgagcatcatcatggaccccggcgaggtgcccctggaggagcagtgcgagtacctgagctacgacgccagccagtgggagttccccagagagagactgcacctgggcagagtgctgggctacggcgccttcggcaaggtggtggaggccagcgccttcggcatccacaagggcagcagctgcgacaccgtggccgtgaagatgctgaagggcgtgggcagcgccggcggcagaggcagcctggccggcgaggagcagcagctgggcgtgggcagatgggacggcaacagcggcagagagaccgaggccggcagccagagccaccccagattctacagagaggccgccggcttcagagccgagggcccccccgagccccccagcgtgggccccgccggctgccccggcggcccctag

SEQ ID NO: 257320 - DNA, 3921 bp, Artificial Sequence
  derived and/or modified sequence
atgcagagaggcgccgccctgtgcctgagactgtggctgtgcctgggcctgctggacggcctggtgagcggctacagcatgaccccccccaccctgaacatcaccgaggagagccacgtgatcgacaccggcgacagcctgagcatcagctgcagaggccagcaccccctggagtgggcctggcccggcgcccaggaggcccccgccaccggcgacaaggacagcgaggacaccggcgtggtgagagactgcgagggcaccgacgccagaccctactgcaaggtgctgctgctgcacgaggtgcacgccaacgacaccggcagctacgtgtgctactacaagtacatcaaggccagaatcgagggcaccaccgccgccagcagctacgtgttcgtgagagacttcgagcagcccttcatcaacaagcccgacaccctgctggtgaacagaaaggacgccatgtgggtgccctgcctggtgagcatccccggcctgaacgtgaccctgagaagccagagcagcgtgctgtggcccgacggccaggaggtggtgtgggacgacagaagaggcatgctggtgagcacccccctgctgcacgacgccctgtacctgcagtgcgagaccacctggggcgaccaggacttcctgagcaaccccttcctggtgcacatcaccggcaacgagctgtacgacatccagctgctgcccagaaagagcctggagctgctggtgggcgagaagctggtgctgaactgcaccgtgtgggccgagttcaacagcggcgtgaccttcgactgggactaccccggcaagcaggccgagagaggcaagtgggtgcccgagagaagaagccagcagacccacaccgagctgagcagcatcctgaccatccacaacgtgagccagcacgacctgggcagctacgtgtgcaaggccaacaacggcatccagagattcagagagagcaccgaggtgatcgtgcacgagaaccccttcatcagcgtggagtggctgaagggccccatcctggaggccaccgccggcgacgagctggtgaagctgcccgtgaagctggccgcctaccccccccccgagttccagtggtacaaggacggcaaggccctgagcggcagacacagcccccacgccctggtgctgaaggaggtgaccgaggccagcaccggcacctacaccctggccctgtggaacagcgccgccggcctgagaagaaacatcagcctggagctggtggtgaacgtgcccccccagatccacgagaaggaggccagcagccccagcatctacagcagacacagcagacaggccctgacctgcaccgcctacggcgtgcccctgcccctgagcatccagtggcactggagaccctggaccccctgcaagatgttcgcccagagaagcctgagaagaagacagcagcaggacctgatgccccagtgcagagactggagagccgtgaccacccaggacgccgtgaaccccatcgagagcctggacacctggaccgagttcgtggagggcaagaacaagaccgtgagcaagctggtgatccagaacgccaacgtgagcgccatgtacaagtgcgtggtgagcaacaaggtgggccaggacgagagactgatctacttctacgtgaccaccatccccgacggcttcaccatcgagagcaagcccagcgaggagctgctggagggccagcccgtgctgctgagctgccaggccgacagctacaagtacgagcacctgagatggtacagactgaacctgagcaccctgcacgacgcccacggcaaccccctgctgctggactgcaagaacgtgcacctgttcgccacccccctggccgccagcctggaggaggtggcccccggcgccagacacgccaccctgagcctgagcatccccagagtggcccccgagcacgagggccactacgtgtgcgaggtgcaggacagaagaagccacgacaagcactgccacaagaagtacctgagcgtgcaggccctggaggcccccagactgacccagaacctgaccgacctgctggtgaacgtgagcgacagcctggagatgcagtgcctggtggccggcgcccacgcccccagcatcgtgtggtacaaggacgagagactgctggaggagaagagcggcgtggacctggccgacagcaaccagaagctgagcatccagagagtgagagaggaggacgccggcagatacctgtgcagcgtgtgcaacgccaagggctgcgtgaacagcagcgccagcgtggccgtggagggcagcgaggacaagggcagcatggagatcgtgatcctggtgggcaccggcgtgatcgccgtgttcttctgggtgctgctgctgctgatcttctgcaacatgagaagacccgcccacgccgacatcaagaccggctacctgagcatcatcatggaccccggcgaggtgcccctggaggagcagtgcgagtacctgagctacgacgccagccagtgggagttccccagagagagactgcacctgggcagagtgctgggctacggcgccttcggcaaggtggtggaggccagcgccttcggcatccacaagggcagcagctgcgacaccgtggccgtgaagatgctgaaggagggcgccaccgccagcgagcacagagccctgatgagcgagctgaagatcctgatccacatcggcaaccacctgaacgtggtgaacctgctgggcgcctgcaccaagccccagggccccctgatggtgatcgtggagttctgcaagtacggcaacctgagcaacttcctgagagccaagagagacgccttcagcccctgcgccgagaagagccccgagcagagaggcagattcagagccatggtggagctggccagactggacagaagaagacccggcagcagcgacagagtgctgttcgccagattcagcaagaccgagggcggcgccagaagagccagccccgaccaggaggccgaggacctgtggctgagccccctgaccatggaggacctggtgtgctacagcttccaggtggccagaggcatggagttcctggccagcagaaagtgcatccacagagacctggccgccagaaacatcctgctgagcgagagcgacgtggtgaagatctgcgacttcggcctggccagagacatctacaaggaccccgactacgtgagaaagggcagcgccagactgcccctgaagtggatggcccccgagagcatcttcgacaaggtgtacaccacccagagcgacgtgtggagcttcggcgtgctgctgtgggagatcttcagcctgggcgccagcccctaccccggcgtgcagatcaacgaggagttctgccagagactgagagacggcaccagaatgagagcccccgagctggccacccccgccatcagaagaatcatgctgaactgctggagcggcgaccccaaggccagacccgccttcagcgagctggtggagatcctgggcgacctgctgcagggcagaggcctgcaggaggaggaggaggtgtgcatggcccccagaagcagccagagcagcgaggagggcagcttcagccaggtgagcaccatggccctgcacatcgcccaggccgacgccgaggacagcccccccagcctgcagagacacagcctggccgccagatactacaactgggtgagcttccccggctgcctggccagaggcgccgagaccagaggcagcagcagaatgaagaccttcgaggagttccccatgacccccaccacctacaagggcagcgtggacaaccagaccgacagcggcatggtgctggccagcgaggagttcgagcagatcgagagcagacacagacaggagagcggcttcagaggcaccagaagaaccagaggcgcctag

SEQ ID NO: 257321 - DNA, 4092 bp, Artificial Sequence
  derived and/or modified sequence
atgcaaagaggtgcggccttatgcttaaggctgtggctgtgcttggggctgcttgatggattggtctcaggctactccatgactccgcccaccctgaacataactgaagaatcacatgtcatcgacacaggtgattcccttagcatttcctgtagagggcagcaccctctggaatgggcttggccaggcgctcaggaggcccccgcgacaggcgacaaggatagcgaggatacaggcgtagtgcgcgactgcgaagggacagacgctcgaccgtactgcaaggttctgctgctacacgaggtccatgccaacgatacggggagctacgtgtgttattataagtatattaaagcccggatcgagggcacaacagccgcctctagttatgttttcgtgagggactttgaacagccatttatcaacaagccagacacacttttggttaaccggaaggacgcgatgtgggttccctgcctcgtgagcatacccggcctgaacgtcaccctcaggagccaaagcagtgtgctttggcccgatgggcaagaagttgtgtgggacgaccgtcgagggatgctcgtctctacccccctcctgcacgacgccttgtatctacagtgtgagactacctggggagaccaagacttcctctctaaccctttcctggtgcacattaccggcaacgagctgtatgacattcagctcctgccccggaagagcctggagctccttgtcggagaaaaactggtgttaaattgcacagtgtgggctgagtttaatagcggggtgacatttgactgggattacccaggaaagcaggcagagaggggaaagtgggtgcccgagaggcgttcacagcaaacccatacagagctcagcagcatcctaactattcacaatgttagtcagcacgatttgggaagctatgtctgcaaggcgaataatgggattcagcgatttcgcgagagtaccgaggttatagtgcatgaaaatcctttcatttcagtcgaatggctaaaaggtcccatcctcgaagcgactgccggcgacgagctagttaagctcccagtaaaacttgctgcatatccacctcccgagtttcaatggtacaaagatgggaaggcgctttccgggaggcacagcccccatgccctagtgctgaaagaggtgacggaggcgtctactgggacctacactctggcactatggaattcagctgcagggctcagacgcaatatatcgttggaacttgtagtgaacgtgcctccacagatacatgaaaaagaggcctctagtccaagcatctactctcgccattccagacaggctcttacctgcacggcctacggggtgccactccctctgtccatccagtggcattggcgcccatggactccttgcaaaatgttcgctcaaagatctctgagaaggcgccagcagcaggacctcatgccccagtgtagagattggagggcagtgacgacacaggatgctgtgaacccaattgaatcactggatacatggaccgagtttgtcgagggcaaaaacaaaacagtgagtaagcttgtgattcagaacgccaatgtgtccgccatgtacaagtgcgtggttagtaacaaggtgggacaagacgagcggctgatctatttttatgtgaccactattccggacggtttcaccatagagagtaaaccctccgaagagctgttggagggccaaccagtgttgctaagttgccaggctgacagttacaagtacgagcatctgagatggtaccgcctgaatctgtccaccctccacgacgcccacggtaatccactgctcctggactgtaaaaacgttcaccttttcgctacacccttagccgctagcctcgaggaagtggcccccggcgcccgacacgctaccttgagtctcagcatcccccgtgtggctccagagcacgaggggcattacgtttgcgaggtgcaggatcgccggagccatgataagcattgccacaagaaatatctgagtgtgcaggccctggaggcccccagacttacccagaatctgacggacctgctggtgaacgtgtccgactccctcgagatgcagtgtttggtggccggagcacacgcccccagtatcgtatggtacaaggatgagaggctcctggaagagaagtctggtgttgatttagccgactctaatcagaaactcagcattcaaagagtcagggaggaggacgccggccgctacttgtgttccgtttgtaacgcaaaaggatgtgtgaacagctcagctagtgtggcggtggaaggcagtgaggacaaggggtccatggaaatcgttattctcgtcggcactggggtcatagcggttttcttctgggttctgctcctattaatcttctgcaacatgcggagaccagcccacgccgacattaagactggctatctcagcattatcatggaccctggcgaagtgcccctcgaggaacagtgtgagtatctgtcctacgatgcctcacaatgggagttccctcgagagcgactccatctcggcagagtgctcgggtacggagcctttggtaaggtcgtggaggcatcggccttcggcatccataaaggttcttcatgcgacaccgtcgcagtcaagatgcttaaagagggggccactgcttcagagcatcgggcccttatgtcagagctaaaaattttaatccacattggtaatcacctcaacgtggtaaatttgttgggggcgtgtacaaaaccccagggacctcttatggtaatcgtggagttttgtaagtatggaaatctcagtaattttctgagggcgaaacgggacgcattttctccgtgcgcggagaaatcccctgaacagagaggccggtttagggccatggtggaactcgcccgcctggatagacgtcgccctgggagcagcgaccgcgtgttattcgcccgatttagcaagactgaggggggggcccgacgggcaagcccagaccaggaagccgaagacctatggctgagccccctgacgatggaggacctcgtctgctatagcttccaggtggcccggggaatggaattcctggcctctcggaagtgcattcatagagatctggccgcgcgtaatatactcctgagcgagtcagatgtggtgaagatttgcgactttggattggcacgagacatctataaagatcccgattacgtgcggaaaggtagtgctcgcctgccactgaagtggatggcccccgaaagtatctttgacaaggtgtacaccacccagagtgacgtgtggtcatttggcgtgctgctgtgggagatattcagcttaggagcctcgccatatcctggggttcagattaatgaggaattctgtcagcgtctgcgggacggcacacgaatgagagcccctgagttagccacccctgcaattagacggatcatgctgaattgctggtcaggtgatccgaaggcccggccagccttctcagaactggtggagatccttggagatctcctccagggtagaggcctccaggaagaagaagaggtgtgcatggctccccgctcctctcagtcatcagaggagggatccttttcacaggtcagcacaatggctttgcatatcgcgcaggctgacgcggaagactcacccccatccctccaacggcacagtctagctgcacggtactacaattgggtgtcattcccaggttgccttgctagaggcgccgaaacccgaggttcgagcagaatgaaaactttcgaggaattcccaatgactcccacaacatacaagggtagtgtggacaaccaaacagattccggtatggtactcgcttccgaagagttcgagcagattgaaagccgacatcggcaagagagcggattttcttgtaaagggccaggccagaacgtggccgtgacacgcgcccacccggattcccagggccggaggcgtagaccggaacgcggcgccaggggcggtcaggttttctacaactcggaatacggcgagctcagcgagccgtcagaggaggaccactgttcgccgtctgccagggtgactttttttaccgataattcctattag

SEQ ID NO: 257322 - DNA, 2283 bp, Artificial Sequence
  derived and/or modified sequence
atgctggttagcacccccctgctgcatgatgccctgtatctgcagtgcgagacaacttggggtgaccaggatttcctgtccaacccttttctggtgcatataaccggaaatgaactgtacgacattcagctgctgccgagaaagagtctcgagctactagtgggcgaaaagctggttctaaactgtacggtatgggcagagtttaactcgggggtcaccttcgactgggattatcccggcaaacaggctgaaagagggaaatgggttcctgagagacgtagccagcagactcataccgagctgagtagtattctgacaatacataacgtgagccagcatgatctgggttcctacgtctgcaaggccaataacggaattcagagattccgcgagagcacggaggtgattgtgcatgaaaatccttttatctccgtcgagtggcttaaaggacctattctggaagccaccgccggcgacgagcttgtgaaactgcccgtgaaactcgccgcatatcctccacccgagtttcagtggtacaaagatggaaaagccctttcaggtaggcattcaccacacgctctggttctgaaggaagtcacagaagcctcaaccggcacctatacacttgccctgtggaattccgcagccggcctccgccgcaatattagcctcgagctggtggtcaatgttcctccacagatccatgagaaagaggcctcaagcccatctatttactcccgacactcccggcaagctctgacttgcactgcctacggtgttcctttgcctctgagcatacaatggcactggaggccatggaccccctgtaagatgttcgcccaacgatctctgaggcgcagacagcagcaggacctgatgccgcagtgccgcgattggagggctgtcaccacacaggatgccgtcaatcccattgaatctttggacacctggaccgaatttgtggagggaaagaataagaccgttagtaagctagtaatccagaatgcgaacgtttcagcaatgtataagtgcgtggtttcaaataaggtcggccaggatgagaggctgatttacttctacgtcaccacaattcctgatggatttacaatcgagtcaaagccgagcgaggagctactcgagggccaaccagtcttgttgtcctgccaggccgattcttacaagtatgaacacctgcgctggtacagattgaatctgtctaccttgcacgatgctcacggcaacccactcctgctggactgtaagaatgtacacctcttcgctacccccctcgccgccagtctggaggaggttgcgcctggcgcaaggcacgccaccctgtccttaagtattcctcgggtggccccagagcacgaagggcactatgtttgtgaagtgcaggatcgccgtagtcatgataagcattgccataaaaaatacttgtcagttcaagccttggaagcgcctaggttgacccagaacctgacagacctgctcgtcaacgtttccgactctctggagatgcagtgtctggttgccggcgcccacgctccctcaatcgtttggtacaaagacgaacgcctgctggaggagaaatccggggtggacctggcagattcaaaccagaaactgagcattcagcgcgtcagagaagaagacgctggaagatatctctgcagcgtgtgcaacgctaagggttgcgtgaatagtagcgcctcggtggccgtggaaggatccgaggacaagggatcgatggaaattgtcattctggttgggacaggagttatcgccgtttttttctgggttttgctcttgctgatcttctgtaatatgagacggccagcccatgcggatatcaagaccggctacctgagcatcattatggaccctggcgaggtgccattagaggagcaatgtgagtaccttagctacgatgctagtcaatgggaatttcctagagagcgcttgcatcttggtagagtgctaggctacggagccttcggtaaggttgttgaagcgagtgctttcggcatccacaaaggaagctcctgcgacaccgtggccgttaaaatgctcaaaggagtcggctccgcagggggaaggggaagccttgccggcgaggaacaacaactcggggtgggcaggtgggatggcaattcagggcgtgaaacggaagctgggtcacagagtcacccccggttttacagagaggctgctgggtttcgagcagaaggaccacccgagccacctagcgtggggccagctggttgccccggggggccttag

SEQ ID NO: 257323 - DNA, 3921 bp, Artificial Sequence
  derived and/or modified sequence
atgcaaagaggggccgcactgtgtctgcggctctggctgtgtttaggccttctggatggactggtcagtggctattcgatgacgccccctacacttaatattacagaggaatcccatgtgattgacacaggggactcactgtcgattagctgtaggggccaacatcctttggagtgggcttggccaggtgcacaggaagcgccggctacaggcgataaggacagtgaagacacaggggttgtccgggattgtgagggaacagatgcccgtccttactgcaaagtgctgcttttacatgaagtgcatgccaacgatactggctcttacgtttgttactataagtatatcaaagctcgcatcgaggggaccactgcggcttctagctatgtgttcgtgcgagactttgagcagccattcattaataagcctgatacacttttggtgaatcgcaaagatgcaatgtgggtcccctgcttggtttctatacccggactcaacgtgacactccgtagccagtcaagcgtgttgtggcccgatggacaggaggtcgtgtgggatgacagacgaggcatgcttgttagcacccctctgttacatgacgccttgtatcttcagtgcgaaaccacctggggagatcaggattttctctccaatccattccttgtgcacatcaccgggaacgaactctatgacatccaactgcttcctcggaaatctctggaacttctagtgggcgaaaagctagtcctgaactgtaccgtttgggctgaatttaattctggggtgacatttgattgggattatcccggaaaacaggctgagcgtgggaagtgggtgcccgaaagaaggagccaacagacacacacggaactctcttcaattcttaccatccacaatgtgtctcagcacgacttaggctcctacgtatgtaaggccaacaacggaatacagcggttccgggaaagtactgaggtcattgtccacgagaatcctttcatatccgtggaatggctgaaaggacccatcctcgaggccacagcgggagatgaattagttaagctgccagtgaaattggccgcctatcctcctcctgaattccagtggtacaaagacggaaaagccctgtccgggcggcatagcccacacgccttagtcttaaaagaagtgaccgaggcatccacagggacctacactctcgccctgtggaattccgctgcagggcttcggagaaacattagtctggagctcgtggtgaacgtgccgccccagatacatgaaaaggaggcttctagtccctccatatacagccgccattcgcgacaggctttgacatgtaccgcctacggggtccccctgccactgtctatccagtggcactggcgcccgtggacaccctgtaagatgtttgcccaacgtagcctgcggcgacgccaacagcaagatctgatgcctcaatgtcgggattggagggcagtgacaacccaagatgctgtcaatcctattgaatcactcgatacgtggaccgaattcgtggaagggaagaataagactgtctcaaaattggtgatccaaaacgccaatgtgagcgccatgtataagtgtgtcgtctctaacaaggtgggccaggatgagcgcctgatctatttctatgtcaccacaatacccgacggctttaccatcgagtcaaagccgtcagaggaattgttagagggacaacctgtcttattaagttgtcaggctgatagctacaaatacgagcatctgcgatggtaccggttgaatctgtctactcttcatgatgctcatggcaaccctctgttactggactgtaaaaatgtacacttatttgcaacacccttagcagccagccttgaagaagtggcccctggcgcaaggcatgccacgctgagcttatccattcccagggtcgcacccgagcatgagggtcactatgtgtgcgaagtgcaagaccgacgctctcatgataaacactgccataagaagtacctctccgtgcaagctcttgaagcacctaggttgacgcagaacttgactgatctgctcgtgaacgtttcagacagcctagagatgcagtgcctggttgctggggcccacgctccaagcattgtttggtataaagacgaacggttgttagaggaaaaatccggcgtcgatctggctgacagtaaccagaagctgagcattcagcgggttagagaggaagatgccggaaggtatctctgctcggtatgtaatgccaaaggctgcgtaaacagcagtgcctctgtagcggtggaggggagcgaagacaaaggtagcatggaaattgttatccttgtcggtacgggggtgatagcagttttcttctgggttttactactcctcatattttgtaacatgcgcagacctgcccacgccgacattaagacaggatatctctcaatcatcatggaccccggcgaggtacctctcgaagagcagtgtgaatacctctcttacgatgcctcccagtgggagttccctcgggaaagattacacttaggccgggtcctcgggtatggggccttcggcaaagtcgtggaggcctcggccttcgggatccataagggcagcagctgcgacacagtggccgtgaagatgctgaaggagggagccacagcatcagagcatagagcacttatgtctgagttaaagattctcatccatattggaaaccacctcaacgtggtgaatctcctaggggcctgtactaagccccagggcccgcttatggttatcgttgagttttgtaagtacggaaatctttccaatttcttgcgggccaagagagacgcgttttccccctgtgccgagaagagtccagaacaacggggccggtttcgcgcaatggtagagttagctaggctcgatagaaggagacccgggtcaagcgaccgggttctcttcgctcgtttcagtaagactgaaggcggcgcccgacgcgcttctccggatcaagaggctgaagacctatggctgtcccccctcactatggaggacctcgtctgctatagcttccaggtggctagaggaatggaatttcttgcttcacggaagtgtattcatcgcgatctggctgccagaaatattctgctgtctgagtctgacgtcgtgaagatctgcgactttggcttagcccgtgacatctataaggaccctgactacgtacggaaaggcagtgcccgcttgcccctcaaatggatggctccagaatcaatctttgataaggtgtacactacgcaatctgatgtctggagtttcggtgtccttctctgggagattttttccctgggagcctccccttaccccggggtgcagatcaatgaagagttctgccagagacttcgagacgggacaagaatgcgggctccagaactggccacacccgcaattcggcgaattatgttgaactgttggtccggagaccctaaggcgcggccggccttctccgaacttgttgagattctcggggacctgctccagggcaggggtctgcaagaagaggaggaggtttgcatggcacctcgttcttctcagtccagcgaggagggttcattttcacaagttagcactatggcacttcatatcgcacaggccgatgccgaggattctccaccttctctgcagaggcattctttggcggcccgctattataactgggtcagttttccagggtgcctggcaagaggcgcggaaaccaggggtagcagtcgcatgaagacttttgaagaatttcccatgacacctaccacctacaaaggctctgtggataaccagactgacagcgggatggtcttagcctctgaagaattcgaacaaattgagagcagacaccggcaggagtccggcttcagggggacacggcgtaccaggggagcctag

SEQ ID NO: 257324 - DNA, 5857 bp, Artificial Sequence
  derived and/or modified sequence
aggccagccggcgcccgcgcggacactttcagccccgagccgcggccgctcgggtcggacccacgcgcagcggccggagatgcagcggggcgccgcgctgtgcctgcgactgtggctctgcctgggactcctggacggcctggtgagtggctactccatgacccccccgaccttgaacatcacggaggagtcacacgtcatcgacaccggtgacagcctgtccatctcctgcaggggacagcaccccctcgagtgggcttggccaggagctcaggaggcgccagccaccggagacaaggacagcgaggacacgggggtggtgcgagactgcgagggcacagacgccaggccctactgcaaggtgttgctgctgcacgaggtacatgccaacgacacaggcagctacgtctgctactacaagtacatcaaggcacgcatcgagggcaccacggccgccagctcctacgtgttcgtgagagactttgagcagccattcatcaacaagcctgacacgctcttggtcaacaggaaggacgccatgtgggtgccctgtctggtgtccatccccggcctcaatgtcacgctgcgctcgcaaagctcggtgctgtggccagacgggcaggaggtggtgtgggatgaccggcggggcatgctcgtgtccacgccactgctgcacgatgccctgtacctgcagtgcgagaccacctggggagaccaggacttcctttccaaccccttcctggtgcacatcacaggcaacgagctctatgacatccagctgttgcccaggaagtcgctggagctgctggtaggggagaagctggtcctgaactgcaccgtgtgggctgagtttaactcaggtgtcacctttgactgggactacccagggaagcaggcagagcggggtaagtgggtgcccgagcgacgctcccagcagacccacacagaactctccagcatcctgaccatccacaacgtcagccagcacgacctgggctcgtatgtgtgcaaggccaacaacggcatccagcgatttcgggagagcaccgaggtcattgtgcatgaaaatcccttcatcagcgtcgagtggctcaaaggacccatcctggaggccacggcaggagacgagctggtgaagctgcccgtgaagctggcagcgtaccccccgcccgagttccagtggtacaaggatggaaaggcactgtccgggcgccacagtccacatgccctggtgctcaaggaggtgacagaggccagcacaggcacctacaccctcgccctgtggaactccgctgctggcctgaggcgcaacatcagcctggagctggtggtgaatgtgcccccccagatacatgagaaggaggcctcctcccccagcatctactcgcgtcacagccgccaggccctcacctgcacggcctacggggtgcccctgcctctcagcatccagtggcactggcggccctggacaccctgcaagatgtttgcccagcgtagtctccggcggcggcagcagcaagacctcatgccacagtgccgtgactggagggcggtgaccacgcaggatgccgtgaaccccatcgagagcctggacacctggaccgagtttgtggagggaaagaataagactgtgagcaagctggtgatccagaatgccaacgtgtctgccatgtacaagtgtgtggtctccaacaaggtgggccaggatgagcggctcatctacttctatgtgaccaccatccccgacggcttcaccatcgaatccaagccatccgaggagctactagagggccagccggtgctcctgagctgccaagccgacagctacaagtacgagcatctgcgctggtaccgcctcaacctgtccacgctgcacgatgcgcacgggaacccgcttctgctcgactgcaagaacgtgcatctgttcgccacccctctggccgccagcctggaggaggtggcacctggggcgcgccacgccacgctcagcctgagtatcccccgcgtcgcgcccgagcacgagggccactatgtgtgcgaagtgcaagaccggcgcagccatgacaagcactgccacaagaagtacctgtcggtgcaggccctggaagcccctcggctcacgcagaacttgaccgacctcctggtgaacgtgagcgactcgctggagatgcagtgcttggtggccggagcgcacgcgcccagcatcgtgtggtacaaagacgagaggctgctggaggaaaagtctggagtcgacttggcggactccaaccagaagctgagcatccagcgcgtgcgcgaggaggatgcgggacgctatctgtgcagcgtgtgcaacgccaagggctgcgtcaactcctccgccagcgtggccgtggaaggctccgaggataagggcagcatggagatcgtgatccttgtcggtaccggcgtcatcgctgtcttcttctgggtcctcctcctcctcatcttctgtaacatgaggaggccggcccacgcagacatcaagacgggctacctgtccatcatcatggaccccggggaggtgcctctggaggagcaatgcgaatacctgtcctacgatgccagccagtgggaattcccccgagagcggctgcacctggggagagtgctcggctacggcgccttcgggaaggtggtggaagcctccgctttcggcatccacaagggcagcagctgtgacaccgtggccgtgaaaatgctgaaagagggcgccacggccagcgagcaccgcgcgctgatgtcggagctcaagatcctcattcacatcggcaaccacctcaacgtggtcaacctcctcggggcgtgcaccaagccgcagggccccctcatggtgatcgtggagttctgcaagtacggcaacctctccaacttcctgcgcgccaagcgggacgccttcagcccctgcgcggagaagtctcccgagcagcgcggacgcttccgcgccatggtggagctcgccaggctggatcggaggcggccggggagcagcgacagggtcctcttcgcgcggttctcgaagaccgagggcggagcgaggcgggcttctccagaccaagaagctgaggacctgtggctgagcccgctgaccatggaagatcttgtctgctacagcttccaggtggccagagggatggagttcctggcttcccgaaagtgcatccacagagacctggctgctcggaacattctgctgtcggaaagcgacgtggtgaagatctgtgactttggccttgcccgggacatctacaaagaccccgactacgtccgcaagggcagtgcccggctgcccctgaagtggatggcccctgaaagcatcttcgacaaggtgtacaccacgcagagtgacgtgtggtcctttggggtgcttctctgggagatcttctctctgggggcctccccgtaccctggggtgcagatcaatgaggagttctgccagcggctgagagacggcacaaggatgagggccccggagctggccactcccgccatacgccgcatcatgctgaactgctggtccggagaccccaaggcgagacctgcattctcggagctggtggagatcctgggggacctgctccagggcaggggcctgcaagaggaagaggaggtctgcatggccccgcgcagctctcagagctcagaagagggcagcttctcgcaggtgtccaccatggccctacacatcgcccaggctgacgctgaggacagcccgccaagcctgcagcgccacagcctggccgccaggtattacaactgggtgtcctttcccgggtgcctggccagaggggctgagacccgtggttcctccaggatgaagacatttgaggaattccccatgaccccaacgacctacaaaggctctgtggacaaccagacagacagtgggatggtgctggcctcggaggagtttgagcagatagagagcaggcatagacaagaaagcggcttcagctgtaaaggacctggccagaatgtggctgtgaccagggcacaccctgactcccaagggaggcggcggcggcctgagcggggggcccgaggaggccaggtgttttacaacagcgagtatggggagctgtcggagccaagcgaggaggaccactgctccccgtctgcccgcgtgactttcttcacagacaacagctactaagcagcatcggacaagacccccagcacttgggggttcaggcccggcagggcgggcagagggctggaggcccaggctgggaactcatctggttgaactctggtggcacaggagtgtcctcttccctctctgcagacttcccagctaggaagagcaggactccaggcccaaggctcccggaattccgtcaccacgactggccagggccacgctccagctgccccggcccctccccctgagattcagatgtcatttagttcagcatccgcaggtgctggtcccggggccagcacttccatgggaatgtctctttggcgacctcctttcatcacactgggtggtggcctggtccctgttttcccacgaggaatctgtgggtctgggagtcacacagtgttggaggttaaggcatacgagagcagaggtctcccaaacgccctttcctcctcaggcacacagctactctccccacgagggctggctggcctcacccacccctgcacagttgaagggaggggctgtgtttccatctcaaagaaggcatttgcagggtcctcttctgggcctgaccaaacagccaactagcccctggggtggccaccagtatgacagtattatacgctggcaacacagaggcagcccgcacacctgcgcctgggtgttgagagccatcctgcaagtctttttcaacagaacttcacagactgttagagctgctgagaagaatttgctttccgaattcagcctggaaggcgcccagggacagctgtactgagtctagatgactctgacccccgccccaggtcaaggccagcagagcagtcagtgcctctggagaaggcccttgctctcccacctggcccagactccgaggagcctgggtctggagctgccggtctggttcttccctttagagcccggatctgccacctgcggcccctcccaagccgtgaaccagctcatgagagatgaacactgtgggatccactcaggaaggctcggggctggcacaaaggaccacccagcattgccctgtgccacccagcactcagtggacattctggggacctgccttcagccttttcctgccctgtgcctgacatcagcaccctggctggtcagaatgccgccctcccagaggagcagccgagagatcccctgaaggctggaggcattctgctcaggacccctatcccagctcacagtgcccaaccatctcaccaggagaaagagccacatccccacgttaggaccacggagactgaccaccaccctgaccccccaaacccacgcaccagacgcttgcaggacaggcgccgcgcagcgggcaggggcttgcccggccgaccctcccctccccacctcccccactgcgcgttactccaggatatgccgagtgcacgtataaggtcatcttcgtcgtccccgtggacctcccccttcctctgcacgtcgtccaacgtgggactggcgtgtcaggcttccctgggaggatctggaggttgttctctgcagagaaccagcctggctcctggcgcgcacctctgctcccttctcctcactacccacccacgcatgtaccgggaaaaaaactactatgcccttctagaccatgttctgagaaaagatcgaaaatatttaacaagagataataataaatctgatgccggtctttgtgtgtgttgcgga

SEQ ID NO: 257325 - DNA, 2932 bp, Artificial Sequence
  derived and/or modified sequence
aggccagccggcgcccgcgcggacactttcagccccgagccgcggccgctcgggtcggacccacgcgcagcggccggagatgcagcggggcgccgcgctgtgcctgcgactgtggctctgcctgggactcctggacggcctggtgagtggctactccatgacccccccgaccttgaacatcacggaggagtcacacgtcatcgacaccggtgacagcctgtccatctcctgcaggggacagcaccccctcgagtgggcttggccaggagctcaggaggcgccagccaccggagacaaggacagcgaggacacgggggtggtgcgagactgcgagggcacagacgccaggccctactgcaaggtgttgctgctgcacgaggtacatgccaacgacacaggcagctacgtctgctactacaagtacatcaaggcacgcatcgagggcaccacggccgccagctcctacgtgttcgtgagagactttgagcagccattcatcaacaagcctgacacgctcttggtcaacaggaaggacgccatgtgggtgccctgtctggtgtccatccccggcctcaatgtcacgctgcgctcgcaaagctcggtgctgtggccagacgggcaggaggtggtgtgggatgaccggcggggcatgctcgtgtccacgccactgctgcacgatgccctgtacctgcagtgcgagaccacctggggagaccaggacttcctttccaaccccttcctggtgcacatcacaggcaacgagctctatgacatccagctgttgcccaggaagtcgctggagctgctggtaggggagaagctggtcctgaactgcaccgtgtgggctgagtttaactcaggtgtcacctttgactgggactacccagggaagcaggcagagcggggtaagtgggtgcccgagcgacgctcccagcagacccacacagaactctccagcatcctgaccatccacaacgtcagccagcacgacctgggctcgtatgtgtgcaaggccaacaacggcatccagcgatttcgggagagcaccgaggtcattgtgcatgaaaatcccttcatcagcgtcgagtggctcaaaggacccatcctggaggccacggcaggagacgagctggtgaagctgcccgtgaagctggcagcgtaccccccgcccgagttccagtggtacaaggatggaaaggcactgtccgggcgccacagtccacatgccctggtgctcaaggaggtgacagaggccagcacaggcacctacaccctcgccctgtggaactccgctgctggcctgaggcgcaacatcagcctggagctggtggtgaatgtgcccccccagatacatgagaaggaggcctcctcccccagcatctactcgcgtcacagccgccaggccctcacctgcacggcctacggggtgcccctgcctctcagcatccagtggcactggcggccctggacaccctgcaagatgtttgcccagcgtagtctccggcggcggcagcagcaagacctcatgccacagtgccgtgactggagggcggtgaccacgcaggatgccgtgaaccccatcgagagcctggacacctggaccgagtttgtggagggaaagaataagactgtgagcaagctggtgatccagaatgccaacgtgtctgccatgtacaagtgtgtggtctccaacaaggtgggccaggatgagcggctcatctacttctatgtgaccaccatccccgacggcttcaccatcgaatccaagccatccgaggagctactagagggccagccggtgctcctgagctgccaagccgacagctacaagtacgagcatctgcgctggtaccgcctcaacctgtccacgctgcacgatgcgcacgggaacccgcttctgctcgactgcaagaacgtgcatctgttcgccacccctctggccgccagcctggaggaggtggcacctggggcgcgccacgccacgctcagcctgagtatcccccgcgtcgcgcccgagcacgagggccactatgtgtgcgaagtgcaagaccggcgcagccatgacaagcactgccacaagaagtacctgtcggtgcaggccctggaagcccctcggctcacgcagaacttgaccgacctcctggtgaacgtgagcgactcgctggagatgcagtgcttggtggccggagcgcacgcgcccagcatcgtgtggtacaaagacgagaggctgctggaggaaaagtctggagtcgacttggcggactccaaccagaagctgagcatccagcgcgtgcgcgaggaggatgcgggacgctatctgtgcagcgtgtgcaacgccaagggctgcgtcaactcctccgccagcgtggccgtggaaggctccgaggataagggcagcatggagatcgtgatccttgtcggtaccggcgtcatcgctgtcttcttctgggtcctcctcctcctcatcttctgtaacatgaggaggccggcccacgcagacatcaagacgggctacctgtccatcatcatggaccccggggaggtgcctctggaggagcaatgcgaatacctgtcctacgatgccagccagtgggaattcccccgagagcggctgcacctggggagagtgctcggctacggcgccttcgggaaggtggtggaagcctccgctttcggcatccacaagggcagcagctgtgacaccgtggccgtgaaaatgctgaaaggtgtggggtcagcgggcggaaggggcagcctagctggtgaggagcagcagctcggggtgggccggtgggacggcaactcgggaagggagactgaggctggaagccagtctcatccgagattctacagggaggctgcgggcttcagagccgagggaccacccgaacccccttcagtggggccggcaggatgtcctgggggcccttag

SEQ ID NO: 257326 - DNA, 4140 bp, Artificial Sequence
  derived and/or modified sequence
actttcagccccgagccgcggccgctcgggtcggacccacgcgcagcggccggagatgcagcggggcgccgcgctgtgcctgcgactgtggctctgcctgggactcctggacggcctggtgagtggctactccatgacccccccgaccttgaacatcacggaggagtcacacgtcatcgacaccggtgacagcctgtccatctcctgcaggggacagcaccccctcgagtgggcttggccaggagctcaggaggcgccagccaccggagacaaggacagcgaggacacgggggtggtgcgagactgcgagggcacagacgccaggccctactgcaaggtgttgctgctgcacgaggtacatgccaacgacacaggcagctacgtctgctactacaagtacatcaaggcacgcatcgagggcaccacggccgccagctcctacgtgttcgtgagagactttgagcagccattcatcaacaagcctgacacgctcttggtcaacaggaaggacgccatgtgggtgccctgtctggtgtccatccccggcctcaatgtcacgctgcgctcgcaaagctcggtgctgtggccagacgggcaggaggtggtgtgggatgaccggcggggcatgctcgtgtccacgccactgctgcacgatgccctgtacctgcagtgcgagaccacctggggagaccaggacttcctttccaaccccttcctggtgcacatcacaggcaacgagctctatgacatccagctgttgcccaggaagtcgctggagctgctggtaggggagaagctggtcctgaactgcaccgtgtgggctgagtttaactcaggtgtcacctttgactgggactacccagggaagcaggcagagcggggtaagtgggtgcccgagcgacgctcccagcagacccacacagaactctccagcatcctgaccatccacaacgtcagccagcacgacctgggctcgtatgtgtgcaaggccaacaacggcatccagcgatttcgggagagcaccgaggtcattgtgcatgaaaatcccttcatcagcgtcgagtggctcaaaggacccatcctggaggccacggcaggagacgagctggtgaagctgcccgtgaagctggcagcgtaccccccgcccgagttccagtggtacaaggatggaaaggcactgtccgggcgccacagtccacatgccctggtgctcaaggaggtgacagaggccagcacaggcacctacaccctcgccctgtggaactccgctgctggcctgaggcgcaacatcagcctggagctggtggtgaatgtgcccccccagatacatgagaaggaggcctcctcccccagcatctactcgcgtcacagccgccaggccctcacctgcacggcctacggggtgcccctgcctctcagcatccagtggcactggcggccctggacaccctgcaagatgtttgcccagcgtagtctccggcggcggcagcagcaagacctcatgccacagtgccgtgactggagggcggtgaccacgcaggatgccgtgaaccccatcgagagcctggacacctggaccgagtttgtggagggaaagaataagactgtgagcaagctggtgatccagaatgccaacgtgtctgccatgtacaagtgtgtggtctccaacaaggtgggccaggatgagcggctcatctacttctatgtgaccaccatccccgacggcttcaccatcgaatccaagccatccgaggagctactagagggccagccggtgctcctgagctgccaagccgacagctacaagtacgagcatctgcgctggtaccgcctcaacctgtccacgctgcacgatgcgcacgggaacccgcttctgctcgactgcaagaacgtgcatctgttcgccacccctctggccgccagcctggaggaggtggcacctggggcgcgccacgccacgctcagcctgagtatcccccgcgtcgcgcccgagcacgagggccactatgtgtgcgaagtgcaagaccggcgcagccatgacaagcactgccacaagaagtacctgtcggtgcaggccctggaagcccctcggctcacgcagaacttgaccgacctcctggtgaacgtgagcgactcgctggagatgcagtgcttggtggccggagcgcacgcgcccagcatcgtgtggtacaaagacgagaggctgctggaggaaaagtctggagtcgacttggcggactccaaccagaagctgagcatccagcgcgtgcgcgaggaggatgcgggacgctatctgtgcagcgtgtgcaacgccaagggctgcgtcaactcctccgccagcgtggccgtggaaggctccgaggataagggcagcatggagatcgtgatccttgtcggtaccggcgtcatcgctgtcttcttctgggtcctcctcctcctcatcttctgtaacatgaggaggccggcccacgcagacatcaagacgggctacctgtccatcatcatggaccccggggaggtgcctctggaggagcaatgcgaatacctgtcctacgatgccagccagtgggaattcccccgagagcggctgcacctggggagagtgctcggctacggcgccttcgggaaggtggtggaagcctccgctttcggcatccacaagggcagcagctgtgacaccgtggccgtgaaaatgctgaaagagggcgccacggccagcgagcaccgcgcgctgatgtcggagctcaagatcctcattcacatcggcaaccacctcaacgtggtcaacctcctcggggcgtgcaccaagccgcagggccccctcatggtgatcgtggagttctgcaagtacggcaacctctccaacttcctgcgcgccaagcgggacgccttcagcccctgcgcggagaagtctcccgagcagcgcggacgcttccgcgccatggtggagctcgccaggctggatcggaggcggccggggagcagcgacagggtcctcttcgcgcggttctcgaagaccgagggcggagcgaggcgggcttctccagaccaagaagctgaggacctgtggctgagcccgctgaccatggaagatcttgtctgctacagcttccaggtggccagagggatggagttcctggcttcccgaaagtgcatccacagagacctggctgctcggaacattctgctgtcggaaagcgacgtggtgaagatctgtgactttggccttgcccgggacatctacaaagaccccgactacgtccgcaagggcagtgcccggctgcccctgaagtggatggcccctgaaagcatcttcgacaaggtgtacaccacgcagagtgacgtgtggtcctttggggtgcttctctgggagatcttctctctgggggcctccccgtaccctggggtgcagatcaatgaggagttctgccagcggctgagagacggcacaaggatgagggccccggagctggccactcccgccatacgccgcatcatgctgaactgctggtccggagaccccaaggcgagacctgcattctcggagctggtggagatcctgggggacctgctccagggcaggggcctgcaagaggaagaggaggtctgcatggccccgcgcagctctcagagctcagaagagggcagcttctcgcaggtgtccaccatggccctacacatcgcccaggctgacgctgaggacagcccgccaagcctgcagcgccacagcctggccgccaggtattacaactgggtgtcctttcccgggtgcctggccagaggggctgagacccgtggttcctccaggatgaagacatttgaggaattccccatgaccccaacgacctacaaaggctctgtggacaaccagacagacagtgggatggtgctggcctcggaggagtttgagcagatagagagcaggcatagacaagaaagcggcttcagaggaaccaggaggacaagaggagcatgaaagtggacaaggagtgtgaccactgaagcaccacagggaggggttaggcctccggatgactgcgggcaggcctggataatatccagcctcccacaagaagctggtggagcagagtgttccctgactcctccaaggaaagggagacgccctttcatggtctgctg

SEQ ID NO: 257327 - DNA, 4092 bp, Artificial Sequence
  derived and/or modified sequence
atgcagagaggagctgccctgtgcctgcggctgtggctgtgcctgggcctgctggatggcctggtgtctggctacagcatgaccccacccaccctgaacatcacagaggagagccacgtgattgacacaggagacagcctgagcatcagctgccggggccagcaccccctggagtgggcctggccaggggcccaggaggccccagccaccggggacaaggacagcgaggacaccggggtggtgcgggactgtgagggcacagatgcccggccctactgcaaggtgctgctgctgcacgaggtgcacgccaatgacaccggcagctatgtgtgctactacaagtacatcaaggcccgcatcgagggcaccacagctgccagcagctatgtgtttgtgcgggactttgagcagcccttcatcaacaagccagacaccctgctggtgaacaggaaggatgccatgtgggtgccctgcctggtgtccatccctggcctgaatgtgaccctgcggagccagagctctgtgctgtggccagatggccaggaggtggtgtgggatgaccggcggggcatgctggtgtccacccccctgctgcatgatgccctgtacctgcagtgtgagaccacctggggagaccaggacttcctgagcaaccccttcctggtgcacatcactggaaatgagctgtatgacatccagctgctgcccaggaagagcctggagctgctggtgggggagaagctggtgctgaactgcaccgtgtgggccgagttcaacagcggcgtgacctttgactgggactacccaggcaagcaggccgagcggggcaagtgggtgcctgagcggcgcagccagcagacccacacagagctgagcagcatcctgaccatccacaacgtgtcccagcacgacctgggcagctatgtgtgcaaggccaacaacggcatccagcgcttccgggagagcacagaggtgattgtgcatgagaaccccttcatctctgtggagtggctgaagggccccatcctggaggccacagctggagatgagctggtgaagctgcctgtgaagctggccgcctacccacctcctgagttccagtggtacaaggatggcaaggccctgagcggccgccacagcccccacgccctggtgctgaaggaggtgacagaggccagcacaggcacctacaccctggccctgtggaacagcgctgctggcctgcggaggaacatcagcctggagctggtggtgaatgtgcccccccagatccacgagaaggaggccagcagccccagcatctacagccgccacagccggcaggccctgacctgcacagcctacggcgtgcccctgcccctgagcatccagtggcactggaggccctggaccccctgcaagatgtttgcccagaggagcctgcggcggcggcagcagcaggacctgatgccccagtgccgggactggagggctgtgaccacccaggatgctgtgaaccccatcgagagcctggacacctggacagaatttgtggagggcaagaacaagacagtgtccaagctggtgatccagaatgccaacgtgtctgccatgtacaagtgtgtggtgagcaacaaggtgggccaggatgagcggctcatctacttctacgtgaccaccatcccagatggcttcaccatcgagagcaagcccagcgaggagctgctggagggccagcctgtgctgctgagctgccaggccgacagctacaagtatgagcacctgcgctggtaccgcctgaacctgagcaccctgcatgatgcccacggcaaccccctgctgctggactgcaagaatgtgcacctgtttgccacccccctggccgccagcctggaggaggtggcccctggggcccggcatgccaccctgagcctgagcatcccccgggtggcccctgagcacgagggccactacgtgtgtgaggtgcaggaccggcgcagccatgacaagcactgccacaagaagtacctgtctgtgcaggccctggaggccccccggctgacccagaacctgacagacctgctggtgaatgtgtctgacagcctggagatgcagtgcctggtggccggggcccacgcccccagcatcgtgtggtacaaggatgagcggctgctggaggagaagagcggcgtggacctggccgacagcaaccagaagctgagcatccagagggtgcgggaggaggatgctggccgctacctgtgcagcgtgtgcaatgccaagggctgtgtgaacagcagcgcctctgtggccgtggagggctctgaagataaaggctccatggagatcgtcatcctggtgggcaccggggtgattgctgtgttcttctgggtgctgctgctgctgatcttctgcaacatgagaagacctgcccacgccgacatcaagacaggctacctgagcatcatcatggaccctggagaggtgcccctggaggagcagtgtgagtacctgtcctatgatgccagccagtgggagttcccccgggagcggctgcacctgggccgggtgctgggctatggagccttcggcaaggtggtggaggccagcgccttcggcatccacaagggcagcagctgtgacacagtggccgtgaagatgctgaaggagggcgccacagccagcgagcaccgggccctgatgtctgagctgaagatcctgatccacatcggcaaccacctgaatgtggtgaacctgctgggcgcctgcaccaagccccagggccccctgatggtgattgtggagttctgcaagtatggcaacctgagcaacttcctgcgggccaagagagatgccttcagcccctgtgccgagaagagccctgagcagaggggccgcttccgggccatggtggagctggcccggctggacagaagaagacctggcagcagtgacagagtgctgtttgcccgcttcagcaagacagagggcggggcccggcgggccagcccagaccaggaggccgaggacctgtggctgagccccctgaccatggaggacctggtgtgctacagcttccaggtggcccggggcatggagttcctggccagcaggaagtgcatccaccgggacctggccgccaggaacatcctgctgtctgagagtgatgtggtgaagatctgtgactttggcctggcccgggacatctacaaggaccctgactatgtgaggaaaggaagtgcccggctgcccctgaagtggatggcccctgagagcatctttgacaaggtgtacaccacccagagtgatgtgtggagctttggagtgctgctgtgggagatcttcagcctgggcgccagcccctacccaggagtgcagatcaatgaggagttctgccagaggctgagagatggcaccaggatgagggcccctgagctggccaccccagccatccgccgcatcatgctgaactgctggagcggggaccccaaggcccggcctgccttcagcgagctggtggagatcctgggggacctgctgcagggccggggcctgcaggaggaggaggaggtgtgcatggcccccaggagcagccagagcagcgaggagggcagcttcagccaggtgtccaccatggccctgcacatcgcccaggctgatgctgaggacagcccccccagcctgcagaggcacagcctggccgcccgctactacaactgggtgtccttccctggctgcctggcccggggagctgagacccggggcagcagcaggatgaagacctttgaggagttccccatgacccccaccacctacaagggctctgtggacaaccagacagattctggcatggtgctggccagcgaggagtttgagcagatcgagagccgccaccggcaggagagcggcttcagctgcaagggccctggccagaatgtggccgtgacccgggcccacccagacagccagggcagaagaagaagacctgagcggggggcccggggcggccaggtgttctacaacagtgaatatggagagctgtctgagcccagcgaggaggaccactgcagccccagcgcccgggtgaccttcttcacagacaacagctactag

SEQ ID NO: 257328 - DNA, 2283 bp, Artificial Sequence
  derived and/or modified sequence
atgctggtgtccacccccctgctgcatgatgccctgtacctgcagtgtgagaccacctggggagaccaggacttcctgagcaaccccttcctggtgcacatcactggaaatgagctgtatgacatccagctgctgcccaggaagagcctggagctgctggtgggggagaagctggtgctgaactgcaccgtgtgggccgagttcaacagcggcgtgacctttgactgggactacccaggcaagcaggccgagcggggcaagtgggtgcctgagcggcgcagccagcagacccacacagagctgagcagcatcctgaccatccacaacgtgtcccagcacgacctgggcagctatgtgtgcaaggccaacaacggcatccagcgcttccgggagagcacagaggtgattgtgcatgagaaccccttcatctctgtggagtggctgaagggccccatcctggaggccacagctggagatgagctggtgaagctgcctgtgaagctggccgcctacccacctcctgagttccagtggtacaaggatggcaaggccctgagcggccgccacagcccccacgccctggtgctgaaggaggtgacagaggccagcacaggcacctacaccctggccctgtggaacagcgctgctggcctgcggaggaacatcagcctggagctggtggtgaatgtgcccccccagatccacgagaaggaggccagcagccccagcatctacagccgccacagccggcaggccctgacctgcacagcctacggcgtgcccctgcccctgagcatccagtggcactggaggccctggaccccctgcaagatgtttgcccagaggagcctgcggcggcggcagcagcaggacctgatgccccagtgccgggactggagggctgtgaccacccaggatgctgtgaaccccatcgagagcctggacacctggacagaatttgtggagggcaagaacaagacagtgtccaagctggtgatccagaatgccaacgtgtctgccatgtacaagtgtgtggtgagcaacaaggtgggccaggatgagcggctcatctacttctacgtgaccaccatcccagatggcttcaccatcgagagcaagcccagcgaggagctgctggagggccagcctgtgctgctgagctgccaggccgacagctacaagtatgagcacctgcgctggtaccgcctgaacctgagcaccctgcatgatgcccacggcaaccccctgctgctggactgcaagaatgtgcacctgtttgccacccccctggccgccagcctggaggaggtggcccctggggcccggcatgccaccctgagcctgagcatcccccgggtggcccctgagcacgagggccactacgtgtgtgaggtgcaggaccggcgcagccatgacaagcactgccacaagaagtacctgtctgtgcaggccctggaggccccccggctgacccagaacctgacagacctgctggtgaatgtgtctgacagcctggagatgcagtgcctggtggccggggcccacgcccccagcatcgtgtggtacaaggatgagcggctgctggaggagaagagcggcgtggacctggccgacagcaaccagaagctgagcatccagagggtgcgggaggaggatgctggccgctacctgtgcagcgtgtgcaatgccaagggctgtgtgaacagcagcgcctctgtggccgtggagggctctgaagataaaggctccatggagatcgtcatcctggtgggcaccggggtgattgctgtgttcttctgggtgctgctgctgctgatcttctgcaacatgagaagacctgcccacgccgacatcaagacaggctacctgagcatcatcatggaccctggagaggtgcccctggaggagcagtgtgagtacctgtcctatgatgccagccagtgggagttcccccgggagcggctgcacctgggccgggtgctgggctatggagccttcggcaaggtggtggaggccagcgccttcggcatccacaagggcagcagctgtgacacagtggccgtgaagatgctgaagggcgtgggcagcgctgggggccggggcagcctggccggggaggagcagcagctgggcgtgggccgctgggatggcaacagcggccgggagacagaagctggcagccagagccacccccgcttctaccgggaggccgccggcttccgggcagagggccccccagagccccccagcgtgggccctgctggctgccctgggggcccctag

SEQ ID NO: 257329 - DNA, 3921 bp, Artificial Sequence
  derived and/or modified sequence
atgcagagaggagctgccctgtgcctgcggctgtggctgtgcctgggcctgctggatggcctggtgtctggctacagcatgaccccacccaccctgaacatcacagaggagagccacgtgattgacacaggagacagcctgagcatcagctgccggggccagcaccccctggagtgggcctggccaggggcccaggaggccccagccaccggggacaaggacagcgaggacaccggggtggtgcgggactgtgagggcacagatgcccggccctactgcaaggtgctgctgctgcacgaggtgcacgccaatgacaccggcagctatgtgtgctactacaagtacatcaaggcccgcatcgagggcaccacagctgccagcagctatgtgtttgtgcgggactttgagcagcccttcatcaacaagccagacaccctgctggtgaacaggaaggatgccatgtgggtgccctgcctggtgtccatccctggcctgaatgtgaccctgcggagccagagctctgtgctgtggccagatggccaggaggtggtgtgggatgaccggcggggcatgctggtgtccacccccctgctgcatgatgccctgtacctgcagtgtgagaccacctggggagaccaggacttcctgagcaaccccttcctggtgcacatcactggaaatgagctgtatgacatccagctgctgcccaggaagagcctggagctgctggtgggggagaagctggtgctgaactgcaccgtgtgggccgagttcaacagcggcgtgacctttgactgggactacccaggcaagcaggccgagcggggcaagtgggtgcctgagcggcgcagccagcagacccacacagagctgagcagcatcctgaccatccacaacgtgtcccagcacgacctgggcagctatgtgtgcaaggccaacaacggcatccagcgcttccgggagagcacagaggtgattgtgcatgagaaccccttcatctctgtggagtggctgaagggccccatcctggaggccacagctggagatgagctggtgaagctgcctgtgaagctggccgcctacccacctcctgagttccagtggtacaaggatggcaaggccctgagcggccgccacagcccccacgccctggtgctgaaggaggtgacagaggccagcacaggcacctacaccctggccctgtggaacagcgctgctggcctgcggaggaacatcagcctggagctggtggtgaatgtgcccccccagatccacgagaaggaggccagcagccccagcatctacagccgccacagccggcaggccctgacctgcacagcctacggcgtgcccctgcccctgagcatccagtggcactggaggccctggaccccctgcaagatgtttgcccagaggagcctgcggcggcggcagcagcaggacctgatgccccagtgccgggactggagggctgtgaccacccaggatgctgtgaaccccatcgagagcctggacacctggacagaatttgtggagggcaagaacaagacagtgtccaagctggtgatccagaatgccaacgtgtctgccatgtacaagtgtgtggtgagcaacaaggtgggccaggatgagcggctcatctacttctacgtgaccaccatcccagatggcttcaccatcgagagcaagcccagcgaggagctgctggagggccagcctgtgctgctgagctgccaggccgacagctacaagtatgagcacctgcgctggtaccgcctgaacctgagcaccctgcatgatgcccacggcaaccccctgctgctggactgcaagaatgtgcacctgtttgccacccccctggccgccagcctggaggaggtggcccctggggcccggcatgccaccctgagcctgagcatcccccgggtggcccctgagcacgagggccactacgtgtgtgaggtgcaggaccggcgcagccatgacaagcactgccacaagaagtacctgtctgtgcaggccctggaggccccccggctgacccagaacctgacagacctgctggtgaatgtgtctgacagcctggagatgcagtgcctggtggccggggcccacgcccccagcatcgtgtggtacaaggatgagcggctgctggaggagaagagcggcgtggacctggccgacagcaaccagaagctgagcatccagagggtgcgggaggaggatgctggccgctacctgtgcagcgtgtgcaatgccaagggctgtgtgaacagcagcgcctctgtggccgtggagggctctgaagataaaggctccatggagatcgtcatcctggtgggcaccggggtgattgctgtgttcttctgggtgctgctgctgctgatcttctgcaacatgagaagacctgcccacgccgacatcaagacaggctacctgagcatcatcatggaccctggagaggtgcccctggaggagcagtgtgagtacctgtcctatgatgccagccagtgggagttcccccgggagcggctgcacctgggccgggtgctgggctatggagccttcggcaaggtggtggaggccagcgccttcggcatccacaagggcagcagctgtgacacagtggccgtgaagatgctgaaggagggcgccacagccagcgagcaccgggccctgatgtctgagctgaagatcctgatccacatcggcaaccacctgaatgtggtgaacctgctgggcgcctgcaccaagccccagggccccctgatggtgattgtggagttctgcaagtatggcaacctgagcaacttcctgcgggccaagagagatgccttcagcccctgtgccgagaagagccctgagcagaggggccgcttccgggccatggtggagctggcccggctggacagaagaagacctggcagcagtgacagagtgctgtttgcccgcttcagcaagacagagggcggggcccggcgggccagcccagaccaggaggccgaggacctgtggctgagccccctgaccatggaggacctggtgtgctacagcttccaggtggcccggggcatggagttcctggccagcaggaagtgcatccaccgggacctggccgccaggaacatcctgctgtctgagagtgatgtggtgaagatctgtgactttggcctggcccgggacatctacaaggaccctgactatgtgaggaaaggaagtgcccggctgcccctgaagtggatggcccctgagagcatctttgacaaggtgtacaccacccagagtgatgtgtggagctttggagtgctgctgtgggagatcttcagcctgggcgccagcccctacccaggagtgcagatcaatgaggagttctgccagaggctgagagatggcaccaggatgagggcccctgagctggccaccccagccatccgccgcatcatgctgaactgctggagcggggaccccaaggcccggcctgccttcagcgagctggtggagatcctgggggacctgctgcagggccggggcctgcaggaggaggaggaggtgtgcatggcccccaggagcagccagagcagcgaggagggcagcttcagccaggtgtccaccatggccctgcacatcgcccaggctgatgctgaggacagcccccccagcctgcagaggcacagcctggccgcccgctactacaactgggtgtccttccctggctgcctggcccggggagctgagacccggggcagcagcaggatgaagacctttgaggagttccccatgacccccaccacctacaagggctctgtggacaaccagacagattctggcatggtgctggccagcgaggagtttgagcagatcgagagccgccaccggcaggagagcggcttccggggcaccaggaggaccaggggggcctag

SEQ ID NO: 257330 - DNA, 4092 bp, Artificial Sequence
  derived and/or modified sequence
atgcagcggggcgccgccctgtgcctgcggctgtggctgtgcctgggactgctggatggactagtctctggatactccatgaccccaccgacgctgaatatcacggaagagtcccacgtgattgacactggggacagcctaagtatctcttgccgtggacagcatcccctggagtgggcttggcccggggctcaggaagcaccagccaccggcgataaggattccgaggacacaggcgtggttcgagactgtgaaggaacagacgcgcgaccgtattgtaaggtcctgttactccacgaggttcatgcgaatgatacagggtcctacgtgtgctactataaatatattaaagctcgtattgaaggcaccactgccgcaagctcttacgtgtttgtcagggactttgagcagccatttatcaacaagcccgataccctgctggtgaataggaaagatgcgatgtgggttccctgcctggtctccatccctggacttaacgtgactttaaggtctcaatccagcgtcctgtggcctgatggccaggaggtggtgtgggacgaccgccgtggcatgctagtgtcaacgcccctcttacatgatgctctgtatctgcagtgcgagacaacctggggagatcaggactttctgtctaatccatttctggttcacatcactggcaacgagctgtatgatatccagctgctgccaaggaaaagcctcgaactacttgttggagagaaactcgttctgaactgcactgtgtgggctgaatttaactctggtgtgacttttgattgggactatcctggtaaacaggccgagcgcgggaaatgggtgccggagaggaggagtcagcagacccataccgaattatcaagtattctgactatccacaacgtatcccaacacgacttgggcagttacgtttgcaaggcaaacaacggcattcaacggttccgcgagagcacagaggtgatcgtgcatgagaaccccttcatctcagtagagtggcttaagggccccattcttgaagccaccgctggggatgaactcgtgaagttacctgtgaagttagccgcttacccccccccagagtttcaatggtacaaagatgggaaagctttatcaggccggcatagccctcacgcactggtccttaaggaggttacggaagcatctactgggacatataccctcgctctctggaatagtgcagctggcttaaggaggaatatctccctagagctagttgttaatgtacctcctcagatccatgagaaagaggcttcctccccatccatctacagtaggcactcccggcaagccctgacctgtactgcctatggggtgcccttgccactgagtatccagtggcactggaggccttggaccccatgcaaaatgttcgctcagcgatccctcaggcggagacaacaacaggatctgatgccccaatgtcgtgactggagagccgtcactacacaggatgcggtgaatcctattgagagtctggacacttggaccgaattcgtcgaagggaaaaataaaaccgtctctaagctagtgatccagaatgctaatgtgtcggctatgtacaaatgtgtggtgtctaataaagttgggcaggatgaacgtctgatttatttctacgtaaccaccatcccagatgggttcacaatcgagtcaaaaccttcggaagaactgttggaagggcagcctgtcctgctgtcctgccaggccgattcttataagtacgagcacctccggtggtacaggctgaacctgagcacacttcacgatgcgcacggaaatccactcctgctggactgtaagaatgtccacctttttgccaccccccttgccgcttctctagaggaggtggcgccgggcgcacgccacgcaacactgagcctctcaataccccgggttgccccagaacacgaggggcattacgtatgcgaggtccaagaccggaggagtcatgataagcactgtcacaagaaatacctgagtgttcaggccctcgaagcccctcgcctcactcagaatctgactgacctgcttgtcaatgtcagcgactccctggagatgcagtgtctcgtcgcaggtgcccacgcgccgtctattgtctggtacaaagatgaacggctccttgaagaaaagtctggagttgacctggccgattccaaccagaaattatcaatccagcgggtgcgggaagaggatgcgggacggtacctgtgcagtgtttgtaacgctaaaggatgtgtcaattctagtgccagtgtagctgtcgagggttccgaggacaagggctctatggaaatagtgatcttggtgggtacaggagtcattgctgtgttcttctgggttctgctcttgctgattttctgcaacatgcgccggcccgcccacgctgacattaagacaggctacctgtccataatcatggacccgggagaagtcccactggaagaacagtgtgagtacctgtcttacgacgcctcgcagtgggaattcccacgagagcggttacatctcggacgtgtgctggggtacggcgccttcggaaaagtcgtggaggcatccgcattcgggatccataagggatcctcatgtgacactgtagctgtcaagatgttgaaggagggcgccaccgcaagcgaacaccgagcactgatgagtgagctgaagatcctgatccacattggcaatcacctcaacgtagtgaacctccttggtgcctgcaccaagccccaaggccctttgatggtgatcgtcgaattttgtaaatatggaaacctctccaatttcctcagggccaaaagggatgcattttcaccttgcgctgagaaaagcccagaacaacgaggacggttccgggccatggtggagctcgcacgacttgacaggaggaggccgggatcctctgatcgtgtgctattcgctcggttcagcaaaactgaaggaggggccagaagggcatctcctgaccaggaggcggaagatttatggctatccccacttacaatggaggacctggtatgttactcgttccaagtcgctcgcggtatggaatttctggccagtcgcaagtgtatacaccgcgatttagctgcacgaaacattctcctgagcgaaagcgacgttgtgaagatctgtgactttggcctagctcgtgatatctataaggatcccgactatgtgcggaagggttccgctcgcctgcctctgaagtggatggcccccgagtccatctttgataaggtgtatacaacccagtccgacgtctggtcgttcggggtgctgctctgggaaatattcagtcttggcgcctccccctaccctggtgtgcagattaacgaggaattctgccagcgcttgagagacgggactcggatgcgggctccagaactcgcaactccggcgattcgccgtatcatgctcaattgttggtccggagatccaaaagccaggccagctttctccgagctggttgagatccttggggacctgcttcagggtagaggcttgcaggaagaagaggaggtttgtatggctccgcgcagcagccagtcctctgaggaaggaagcttcagtcaggtgagtaccatggctctgcacattgctcaagctgacgcagaagattctccaccttcgctgcaacggcatagcctcgccgccagatattataattgggtcagcttcccaggctgtcttgcccgaggcgccgagacgagaggctcttccaggatgaagacctttgaggaatttccaatgacgccaaccacgtataaaggatccgtggataaccaaacagattccgggatggtgctcgccagtgaagaatttgagcagatcgagagccgtcacaggcaggaatcaggcttttcctgcaaagggccgggtcagaacgtggctgtcacccgggcccaccctgatagccaggggcgccgtagaaggcctgaacggggcgcccgaggaggacaagtcttctataattccgagtacggcgagttgtctgagccatccgaggaggatcattgctcgccctccgctcgcgttactttctttacagacaatagttactag

SEQ ID NO: 257331 - DNA, 2283 bp, Artificial Sequence
  derived and/or modified sequence
atgctggtgagcacccccctgctgcacgacgccctgtacctgcagtgcgagactacatggggagatcaggattttctcagtaatccttttttggtccacattaccggtaacgagctttatgacatccagctcctcccccgtaaaagtctcgagctgctggtgggtgagaaacttgtactgaactgcacagtgtgggcagaattcaattccggagtcaccttcgattgggactatcctgggaaacaggctgaaaggggtaagtgggttcctgagaggcggagtcagcagacacacacagaactatctagcattctcaccatccacaacgtctcccagcacgacttagggtcttacgtatgcaaggccaacaatgggatccaacgcttcagggaaagcaccgaggttattgtgcatgagaatccttttatctcagtcgagtggctcaaaggaccaattttggaggcaactgccggggacgagctcgttaagttgccggtcaagctggccgcttaccccccgccagagtttcagtggtacaaggatggcaaggccctatctggacgccactctccccacgcgctcgtcttgaaagaagtaaccgaagccagtacggggacttataccctcgccctttggaatagcgctgctggcctccggcgcaacatttcgctcgagctcgtggtcaacgtaccacctcagatccatgagaaagaggcttctagtccctccatttattctcggcattctaggcaggcactgacttgcactgcttatggtgtgccactaccactctcgatacaatggcattggcgaccttggacaccttgcaagatgttcgctcagcgctctttacggcgacgccagcagcaggacttaatgcctcagtgccgggactggagagccgttaccacccaggacgcagtcaacccaattgagagcctggatacttggacggagtttgtcgaggggaaaaacaaaacagtttcgaagttggtcattcagaatgccaacgtaagcgccatgtacaagtgcgtggtgtcgaacaaagtggggcaggacgaacgactgatctacttttatgtcaccaccataccagacggtttcacaatcgagagtaaaccttcagaggagcttttagaggggcagccagtgcttctttcctgccaggccgatagttacaaatatgagcacctgcggtggtatcggctgaacctttcaaccctgcatgatgcacatggcaacccccttctgttggactgtaaaaacgttcacctgttcgcgacaccgttggccgcctcacttgaagaagtggcaccaggggcaagacatgcaaccctttctctgtcaatcccccgagtggcgcctgaacatgaaggtcactatgtctgcgaagtgcaagaccgaaggtcacacgacaagcattgccataagaagtatcttagtgtgcaggcactcgaggccccaagactaactcagaatctgaccgatttgcttgtgaacgttagtgactcattggagatgcaatgcctggtggcaggggcgcatgcccccagcattgtgtggtataaggacgagcgcttattggaggagaagtctggagtggacttggcagacagtaaccagaagttgagcatccagcgcgttcgcgaggaggatgctggccggtatctatgctccgtatgcaacgctaaaggttgcgtgaacagcagtgcctctgtggccgttgaggggtccgaggataaaggctcaatggaaatcgtgatcctggtgggaacaggagtgatagccgtgttcttctgggtacttctgctgctcatattctgcaacatgcgtcgccccgcacacgccgatattaagaccggctacctgagcattatcatggacccaggggaagtgccgcttgaggagcagtgcgaatatctgagttacgacgcatcccaatgggaatttcctagagagaggctgcatctgggccgcgttctggggtatggtgccttcggaaaagttgtggaagcctctgcgtttggcatccacaaggggagcagctgcgatacggtggccgtcaaaatgctaaagggagtgggatctgctggagggagaggttcgctggcaggtgaagagcaacagttaggtgttggccggtgggatgggaattccggtagggaaaccgaagctgggtcgcaatctcatcccaggttttatcgtgaggcagctggatttcgcgccgaaggtcctccagagcctccttctgtgggacctgctggctgtcccgggggcccctag

SEQ ID NO: 257332 - DNA, 3921 bp, Artificial Sequence
  derived and/or modified sequence
atgcagcggggcgccgccctgtgcctgcggctgtggctgtgcctgggcctactggatgggttagtgtctggatacagcatgacaccacccacacttaatattacagaggagtctcacgtgatcgacaccggcgattccttgtcaatctcctgcagagggcaacaccctctcgaatgggcctggccaggtgcacaggaagccccagccactggcgacaaggactctgaagacaccggcgtggtgagggactgcgaggggactgacgcccgcccctattgcaaggtgctccttctacacgaagtacacgctaatgacacaggcagttacgtgtgctattacaaatacataaaggctagaatcgaggggaccacagcagcaagctcctacgtcttcgttagagattttgagcagccattcattaataagcccgacacactccttgtcaatcggaaggacgccatgtgggtgccatgcctggtgagcatcccaggacttaatgtgaccctgcggagtcagagctctgtcctctggccggacggacaggaggtcgtttgggacgacaggcgcggaatgcttgtttcaactcccctcctgcacgacgctttgtaccttcaatgcgaaacgacgtggggagatcaggattttctgtctaatcctttcctggttcacatcaccggcaacgaactgtacgatatccagctcctgccaagaaaatctctcgagctcctcgtaggtgagaagctggtccttaactgtactgtgtgggccgagttcaactcaggtgtaaccttcgactgggattaccctgggaaacaggctgagcgtggcaagtgggtcccagagcgccgtagtcagcagacccatacggaactcagttccatcctgacaatacacaacgtgagccaacacgatttaggatcatacgtatgtaaggcaaacaatggtattcagagatttagggaatctacagaggttatcgtgcacgaaaatcccttcatctcagtcgagtggctgaaaggcccgattctggaagcaaccgcaggtgatgagctggtgaagcttcccgttaagctcgctgcgtatccacctcctgagttccagtggtacaaagatggaaaggccttgtcaggacggcacagcccccatgccttggtactgaaggaagtgacagaagcctccaccggcacatacacattagctctctggaatagcgccgcggggttgagaaggaatatttccctcgagctggtcgtcaacgtgccacctcaaatacatgagaaggaagcaagcagcccatctatttacagccggcacagtcggcaagccttgacatgtaccgcctatggagtgccactccctctgtccatccagtggcattggaggccatggacaccatgtaaaatgtttgcccaacgatcattgcgccggagacagcagcaggatctgatgccccagtgtcgggattggcgggccgtaactactcaggacgcagtgaatcccattgagtcattggatacctggactgagtttgttgaaggcaagaacaagactgtgagcaagctggttatccagaacgccaatgtgagcgcgatgtataagtgtgttgtgtccaacaaggttggtcaggatgaacgattgatctatttttatgtgaccacgatccccgacggcttcaccatagagagcaaaccttctgaggagctcctggagggtcagccagtcctgttaagctgccaggcagactcttacaagtacgagcaccttcgatggtaccgcctaaacctgagtacactgcacgacgctcacggcaaccctctactgttggattgcaagaatgtacatctttttgccaccccattagcagcaagcctggaagaagtggccccaggtgcccggcatgctacactgtccctaagcataccgagagttgctcccgaacacgagggacactacgtgtgtgaggtgcaggaccggaggtcccatgataagcattgccataaaaagtacctgagcgtgcaggcactggaagccccccgcttgacgcagaacttaacggatcttctggtgaatgtgtcagacagccttgagatgcagtgcctggtggccggtgctcacgcaccttctatcgtgtggtacaaagatgagagactgctggaagaaaaatcaggtgtggacctggcagacagcaatcaaaagctttctattcagcgggttagagaagaggacgcgggccgatatctttgctcagtgtgtaacgcaaaggggtgtgtcaacagctcagcctcggtggcagtggagggaagtgaagacaaaggctcaatggagatcgtgattttagttggcaccggcgtgattgcagttttcttctgggtgttactcctgctaatcttctgcaatatgcgtagacctgcccatgccgacataaaaaccggctatctaagcattatcatggatccaggtgaagtgcctctcgaggagcagtgtgaatacctgagttatgacgcctcgcagtgggaatttcccagagaacggctgcacctcgggcgggtgctgggttacggagcatttggtaaggttgtcgaggcctcagccttcggtattcataaaggctcctcttgtgatacagtggctgttaagatgctaaaagagggtgccaccgccagcgaacacagggcacttatgagcgaactgaagatccttatacacatcggtaaccaccttaacgtggtgaatctgctgggggcttgtactaagccccaagggccactgatggtgatagtggagttttgtaagtacggcaatctctctaattttttgcgcgccaagcgcgacgcttttagcccatgtgcagagaagtcacccgagcagcgtggccgtttcagggccatggtagagctggcacggctggaccgtcgccgacccggatccagcgatcgggtcctattcgcccggttttccaaaactgaaggaggggctagacgcgccagccccgaccaggaagctgaagatctgtggctctcgccactgaccatggaggacttggtgtgttattccttccaagtcgctcggggtatggagtttctggccagtagaaaatgtatccatcgcgacttagccgccaggaatatcctgctcagcgagtcagatgtcgtgaaaatctgtgactttggccttgcccgtgatatctacaaggacccagattatgtgcgcaagggctccgcccgcctcccactgaagtggatggctccagagagtatcttcgataaggtgtataccactcagtccgatgtgtggtcgtttggggtcctattgtgggagatcttctcgctaggcgcttcaccctaccctggcgttcagataaacgaggagttttgtcagcggctgagagacggcacacgaatgcgcgcccccgagctcgctactcctgcaatcaggagaattatgctcaattgctggagcggtgacccgaaagctcgccctgcattcagcgagctggtggagatactcggtgacctcctccagggtaggggacttcaggaggaggaagaggtgtgcatggcccccaggagtagccaatcatccgaagagggcagcttctcgcaggtctcaaccatggccctgcatattgcacaggccgacgccgaggactctcctcctagcctacagcgtcacagtctcgcagcaaggtactataattgggtctcatttcctggctgtcttgccagaggcgcagagaccagaggctcttctagaatgaaaaccttcgaggaattcccaatgaccccgaccacgtacaagggcagcgtcgataaccaaaccgatagtgggatggtgctcgcgagcgaagagtttgagcagattgagagccgccatcgccaagagagcggttttagggggactcggcgcacacgcggggcttag

SEQ ID NO: 257333 - DNA, 4092 bp, Artificial Sequence
  derived and/or modified sequence
atgcagcgcggagccgctctctgcctccgcctctggttgtgcttggggctgctggatgggctggtttctggatactccatgacccctcccactctgaatatcaccgaggaaagtcacgtaatcgatactggtgactccttgtccattagctgcagaggccagcatccgcttgagtgggcatggccgggagcacaggaagccccagccacaggagacaaagacagcgaggacacgggggtcgtgagagattgcgagggtaccgacgctagaccctactgcaaggtcttgctcctgcacgaggtgcacgctaacgatacaggttcttatgtgtgctactataaatatatcaaggcgaggattgagggaactaccgccgcttccagttatgtgttcgtgcgggacttcgaacagccctttataaataagccagacactctcctggttaaccgtaaagacgccatgtgggtcccctgcctcgtttccataccagggctgaacgtgaccttacggtcccagtcttcagtcctgtggcccgacggccaggaggttgtgtgggatgatcggaggggtatgctggtatcaacgccattactacacgatgcactgtacctccagtgcgaaacgacttggggagaccaagatttcctgagtaacccattcctcgtgcacattacgggcaacgaactctacgacatccaactgcttccccgtaaatccctggagcttctggtaggagagaaactcgttctcaactgtacagtgtgggctgagtttaactccggggtcactttcgactgggattatccaggtaaacaggcagagcgaggcaaatgggtccctgaacggaggagccagcagacccatactgagctcagcagcattctcacaatccacaacgtctcacaacacgacttggggagctatgtttgcaaggccaataatggtattcagcggttcagggaatccactgaggttatcgtccatgagaatccatttattagcgtggaatggttgaagggccctatactagaggccacagccggtgacgagttagtgaagctaccagtcaagctcgcggcttacccacctcctgaatttcagtggtacaaggatggtaaggccctgtcgggtaggcactccccccatgctcttgtcctcaaggaggtgaccgaggcatcaaccggaacttatactctggcgctgtggaatagtgcagccggactccgacggaacatttcgctggagctcgtggtcaatgtgccccctcaaatccatgagaaggaggctagtagcccaagcatatacagcaggcacagcaggcaagctctcacctgtaccgcttacggcgtgcctctgccgctgtcaatacagtggcattggaggccttggacaccgtgcaaaatgttcgcccagcgaagcctgagaagacgccagcagcaggatctgatgcctcagtgcagagactggcgagcggtgactacacaggacgccgtgaacccaatcgagagtctggacacttggactgagttcgtggagggtaagaataagaccgtttctaagctggtaatccagaatgctaacgtctccgccatgtataagtgcgtggtttccaacaaggttggtcaggacgaaaggctgatctacttttatgttacgaccattccagacggctttactatcgagtctaaaccctctgaagaattgttggaagggcaaccggtgctgctctcttgccaggccgactcatacaagtacgaacacttacgttggtaccgcctaaacctcagcactctacacgatgcccacggcaatccacttttgctggactgtaagaatgttcatctgtttgcgacacctcttgcggcttccctggaagaagtggccccaggcgcaagacatgccaccttatctctttctatcccccgagtcgctccagagcatgagggccactacgtttgtgaagtccaagatcgcagaagtcacgataagcattgccacaaaaaatatctgagcgtgcaggctctggaagcccctaggctcacacagaatctgacagatctactcgtgaatgtgagtgacagcctggagatgcagtgcttggtggccggagcacacgccccatcaatcgtgtggtacaaggacgaacgccttctggaggagaaatcaggtgtggaccttgccgattccaaccaaaagttatccattcagcgcgtgagagaggaagacgccggtagatacctttgctctgtatgcaacgccaaggggtgcgtcaactcctccgcgtcggttgccgtggagggctcagaggacaaagggtccatggagatcgtgatattagtcgggacaggggtgattgctgtttttttttgggtcctgcttctattaatcttttgcaatatgcgacggcctgcccacgccgatattaagacgggctacctgagtatcatcatggatccaggggaagttccgttagaggagcagtgtgaatacttaagttacgatgcctctcagtgggaattcccacgggagaggctccatctcggtagagtgcttggatatggcgctttcggaaaggtcgtggaggcaagcgcctttggaatacataagggcagctcttgcgatacagtggccgtgaaaatgttgaaggagggggctaccgcaagtgagcatcgggctctgatgtcggagctgaagatcttgattcacattggtaaccatctgaacgtggtcaacctgctgggggcatgcaccaagccacagggtccgttgatggtcattgtggaattttgtaaatacggcaatctgagtaattttctcagggcgaaacgagacgccttcagcccatgtgcagaaaaatcccctgaacagcgaggcagatttcgcgctatggtagagctggcgaggctggacagacgcagaccagggtcttccgatcgcgtgctttttgcgagattcagcaagactgagggtggtgccaggcgggcatccccggaccaggaagcagaagatttgtggctgagccctttaactatggaagatctggtctgttacagttttcaggtagcgcgtggcatggagttcttagcttctcggaagtgcatccatagggaccttgcggcacggaatattctgctgtctgaatccgatgtcgtaaaaatctgtgactttggccttgccagggacatatacaaagatccagattacgttcgcaaaggatccgcacggctgccgctcaagtggatggcacctgagtctattttcgataaagtgtacactacccagagcgacgtttggagcttcggcgtcttgctgtgggagatctttagtctcggagcttccccttacccgggagtccagataaacgaggagttttgccagaggctgagagatgggacccgcatgagggccccagagctggcaactccggcaatcaggcgcattatgcttaattgttggtctggggaccccaaggcaaggcccgctttctccgagttagtcgagatcctgggggacctcctgcaggggaggggactccaggaggaggaggaggtgtgtatggcccctaggtccagccagtcttctgaggaaggctctttcagtcaggtgtccaccatggcccttcacattgcccaggctgacgcagaggattcacctccctccctgcagaggcatagcttagcagcacggtattacaactgggtcagctttccagggtgtctggccagaggagctgagaccagaggttcatcgaggatgaagactttcgaagaatttcctatgactcccactacatacaaaggctccgtggataatcagactgactcgggcatggtgctggcatctgaggagtttgagcagattgagagccgtcaccgacaagaatcgggcttctcctgtaagggtccgggtcaaaatgtggctgtgacgcgtgcccaccctgattcacagggtaggcggcgaaggccagagaggggagcacggggtggccaggtcttctacaactccgaatacggggaactgtcagaaccctcagaagaggatcactgctcgcccagtgctagagtgactttcttcacagacaattcgtattag

SEQ ID NO: 257334 - DNA, 2283 bp, Artificial Sequence
  derived and/or modified sequence
atgttagtatcgactcccctgcttcatgatgccctgtatctgcagtgtgagaccacttggggagatcaggattttctgtccaatccattcctagtgcacattacgggaaacgagctttatgatatccagcttctcccaaggaagtccttggaactcttagtaggagagaagctggtactgaactgcacggtctgggccgagttcaatagcggtgtgacgttcgactgggactacccaggcaaacaggcagaacggggtaagtgggtacctgaacgcaggagccaacaaacccacaccgaactatcatctattctcaccatccataatgtatcccagcacgatcttggatcatacgtttgcaaggctaacaatggcatccagagattcagggaatccacagaggtcatcgtgcatgaaaatccctttatttctgtggaatggctcaaggggccaattttggaggcaacagcgggagatgaactggttaaactgcctgtgaagctggctgcctatccccctccagagttccagtggtacaaggacggcaaggctctcagcggcagacactctcctcacgctctggtattaaaggaagtgactgaagcgtccacaggcacatacacactagctttgtggaactctgcggcaggactacgacggaatatatcattggagctcgtggtgaacgttccaccgcagatacatgaaaaggaagcttcttctccatctatctactcacggcactccaggcaggcccttacttgcactgcatatggagtgcccttgcctctgtccattcagtggcactggcggccatggacgccctgcaaaatgttcgcacagagatctctgagacggaggcaacagcaggatctgatgcctcagtgtcgcgactggcgcgctgtgactacccaggatgccgtaaatccaatcgagagcttggacacctggacagagttcgtagagggcaagaataagactgtttctaaactggttatccagaacgcaaatgtgagcgccatgtataagtgtgtggtgtctaacaaggtcggccaggacgagagactcatttacttttatgtcactaccatccccgacggttttacaatcgagagcaagccgagtgaggagctccttgaaggacagccagtgctcctgtcttgccaagcagactcatacaaatacgagcacctgcgatggtacaggctgaatttgtccaccctgcacgatgcacacgggaatcccttactgctggactgcaagaatgtccatcttttcgcgacaccactggctgcgtcactggaggaggtagcaccaggcgcaagacacgccaccctctctctgtccatcccacgagtggcccctgaacatgaaggccattatgtctgtgaggtgcaggatcggcgttctcatgacaagcattgtcataagaagtatctgagcgttcaagctctcgaagccccacggctaactcagaatcttacagacttactggtgaacgtgtccgattctcttgaaatgcagtgtctggtcgcaggagcccacgcaccaagcatcgtgtggtacaaggatgagagattgctggaggagaagtctggggtagatctggcagactctaatcagaagctttctatacagagagtgcgtgaagaggacgcagggagatatctatgcagtgtttgcaacgccaaaggatgcgtgaattcatcggcctcagtcgctgtggaaggcagcgaggacaaagggtcaatggaaattgtgattctggtgggcaccggcgtgattgccgtcttcttttgggtgctgctcctgttaattttttgtaacatgcgacgacctgcgcatgctgacatcaagaccggctacctgtctattatcatggatcccggagaggttccccttgaagagcagtgtgagtacctttcgtacgacgccagccagtgggagttccccagagaaaggctgcatctgggaagggtcctgggctatggagcctttggtaaggtcgtcgaagctagtgccttcggtattcacaaaggaagctcttgcgacaccgtcgccgtaaagatgctcaagggtgtaggaagcgctggcggacgcggttccctagctggtgaagaacagcagctgggggtgggtcggtgggatggcaattccggaagggagacagaggctggtagccagtcacacccaaggttttacagggaagccgcaggttttagagctgaagggcctccagagcccccatcagtggggcctgccggatgtcctggcggaccatag

SEQ ID NO: 257335 - DNA, 3921 bp, Artificial Sequence
  derived and/or modified sequence
atgcaaagaggggcagccctctgtctgcgactttggctgtgcttaggccttttggatggcctcgtgtcaggatatagcatgacccctcccactctcaatattacagaggaaagtcatgtcatcgataccggagattccttgtcgatttcttgtcgaggccagcatcctcttgaatgggcatggccaggcgctcaggaagcgcctgctacaggcgataaggacagtgaagatacaggagtcgttcgggattgtgaaggaaccgatgctaggccttactgcaaagtactccttctgcatgaggtccacgccaatgatactgggagctatgtgtgctactacaagtatatcaaagccagaattgaaggcacgacggctgctagcagctacgtgtttgtaagggatttcgagcagccatttattaacaaacctgacaccctgcttgtgaaccggaaggatgcaatgtgggtcccttgtttggtgagtatcccaggactcaacgtgaccctacggtcccagtcctctgtgctgtggccggatggccaggaggtggtctgggacgatcggaggggcatgttagtaagcactccccttcttcacgatgccctctaccttcagtgtgaaaccacctggggcgatcaggacttccttagtaacccatttttggtacatataaccggcaatgagctctacgatatccagctgttgccgagaaaatctctggagctcttagttggggaaaagctcgtgctgaactgtacagtctgggcggagtttaacagtggggttacgtttgattgggattacccagggaagcaggccgagcgaggcaagtgggtccctgaaagaagatcacagcaaacacacaccgagttgagcagcatcctcaccatccacaatgtcagccaacatgacttaggaagttacgtctgtaaggccaataatgggattcagaggtttagagaatccacagaggtgattgtgcacgagaatccttttatcagtgtagagtggctgaagggcccaatattagaggcgacagctggcgacgagttggtgaaactcccagttaagctggcagcctacccaccccctgagttccaatggtacaaagacggtaaggccttatccggaaggcactctccccacgcgctcgtgctaaaggaagtgactgaagcgtccacaggcacatatacactggccctgtggaactcggccgctggcctaaggcgcaatattagtctggaactcgtggttaatgtgccgcctcaaatccatgagaaagaagcgagctcaccgagcatctactctcggcacagccgtcaggcgctcacatgtactgcctacggcgtgcctcttcccctgtcaatccaatggcattggcggccatggactccttgtaaaatgttcgcacaaaggtcgctgagacgcagacagcaacaagatctaatgccccagtgcagagattggcgggctgtgacaacccaggacgctgtcaacccaatcgaatccttagacacttggacagagtttgtggaaggaaaaaacaaaaccgtttcgaagctggtgatccagaacgcaaatgtgtccgccatgtataagtgcgtggtgtctaacaaggtgggtcaggatgagaggctcatttacttctacgtgaccacgattccagatggattcactatcgagtcaaaaccctctgaggaactcctggaaggacagcctgtgcttctgtcctgccaagccgacagttacaagtacgagcaccttaggtggtacaggctgaatctgagtaccctccacgacgcgcacggcaacccactcctgctagattgcaaaaacgtccatctgtttgctacaccccttgcggctagcctcgaagaagtggccccaggagccaggcacgctacactttccctgtctatcccgagagttgcccctgaacatgaaggacattatgtgtgtgaggtgcaggatcggaggtcgcatgataagcactgccacaaaaagtacctgtcggtgcaggccctggaggccccaagactcacccagaatctgaccgatctcttagtgaatgtgtccgactctctggagatgcagtgccttgtggctggagcgcacgctcctagcattgtgtggtacaaagacgaaaggctgctggaggaaaagtccggagttgatctggccgattcgaatcagaagttgtccatccagagggtacgggaagaagatgccggacggtacctgtgcagtgtatgcaatgctaaaggttgcgtgaactcctcggcatctgttgcagttgagggttcggaagataaaggaagtatggagatcgtcattctggttggaacaggcgtaatagctgtgtttttttgggtcctgctcctgctgatattctgtaacatgcgcaggccggcacatgcagatattaaaacaggataccttagtatcattatggaccccggagaggttcccctggaggaacagtgtgagtacctcagttacgacgcttcacaatgggaatttcccagagaacggttgcatctgggccgagttcttggatatggtgccttcggcaaagtggttgaggccagtgcctttggcattcataaagggagctcctgtgataccgtggctgtgaagatgctgaaggagggcgctacagcctcggagcaccgagccttgatgtccgaattgaaaattctcatacacataggcaaccatttgaatgtggtaaatctgctgggggcatgcaccaaaccccagggccctctgatggtgatcgtggagttttgcaagtatggcaacttatcaaacttcctaagagccaagcgggacgctttctcaccttgcgctgagaagtcgcccgagcagaggggtcgattcagggctatggtagagcttgcccgtctagatagaagaaggcctgggtctagcgatcgggttcttttcgcacgcttttctaagacagaggggggagctaggcgtgcctcccccgaccaggaagcagaggacctgtggctgtcgccactcactatggaagatctggtttgttattcattccaggtcgcaagaggtatggagttccttgcgagccgaaaatgcatccatcgggacctagccgctcggaacatcctgctaagcgaatctgatgtagtgaagatctgcgactttgggctggccagggacatttataaagacccagactatgtgcgcaagggtagcgcccgattacccttaaaatggatggcccctgagtccattttcgataaggtgtataccacccaaagtgatgtgtggtcattcggcgtccttttgtgggagattttctccttgggagcgtcaccttatccaggagtacagatcaatgaagagttttgtcagagattaagagacggtaccaggatgagagcccctgaactggccaccccggcaatccggaggatcatgcttaattgctggtcaggggacccaaaggcccgacccgcattcagcgaactcgtagagatattaggcgacttgcttcagggccgtgggctgcaagaggaggaagaggtctgcatggcacctcgcagcagccaaagcagcgaggagggcagtttcagtcaggtgagcacaatggcgctgcacatcgcccaagccgatgctgaggacagtcccccttctttgcaacggcactccctcgcagccagatattacaattgggtatcgttcccgggatgcctcgccagaggagccgagacaaggggtagttctcgtatgaaaaccttcgaagaatttcctatgactcctacaacatataaaggctctgtcgacaatcagacggactccggcatggtgctggctagcgaggaattcgaacaaatcgagtcaagacaccgccaggaatccggctttagaggcacacgcagaaccagaggcgcttag

SEQ ID NO: 257336 - protein, 298 aa, Artificial Sequence
  derived and/or modified sequence
MERGISDVTDRKLTMEEEEAKRIAEMGKPVLGEHPKLEVIIEESYEFKTTVDKLIKKTNLALVVGTHSWRDQFMEAITVSAAGDEDEDESGEERLPSCFDYVMHFLTVFWKVLFACVPPTEYCHGWACFAVSILIIGMLTAIIGDLASHFGCTIGLKDSVTAVVFVAFGTSVPDTFASKAAALQDVYADASIGNVTGSNAVNVFLGIGLAWSVAAIYWALQGQEFHVSAGTLAFSVTLFTIFAFVCISVLLYRRRPHLGGELGGPRGCKLATTWLFVSLWLLYILFATLEAYCYIKGF

SEQ ID NO: 257337 - protein, 921 aa, Artificial Sequence
  derived and/or modified sequence
MAWLRLQPLTSAFLHFGLVTFVLFLNGLRAEAGGSGDVPSTGQNNESCSGSSDCKEGVILPIWYPENPSLGDKIARVIVYFVALIYMFLGVSIIADRFMASIEVITSQEREVTIKKPNGETSTTTIRVWNETVSNLTLMALGSSAPEILLSLIEVCGHGFIAGDLGPSTIVGSAAFNMFIIIGICVYVIPDGETRKIKHLRVFFITAAWSIFAYIWLYMILAVFSPGVVQVWEGLLTLFFFPVCVLLAWVADKRLLFYKYMHKKYRTDKHRGIIIETEGDHPKGIEMDGKMMNSHFLDGNLVPLEGKEVDESRREMIRILKDLKQKHPEKDLDQLVEMANYYALSHQQKSRAFYRIQATRMMTGAGNILKKHAAEQAKKASSMSEVHTDEPEDFISKVFFDPCSYQCLENCGAVLLTVVRKGGDMSKTMYVDYKTEDGSANAGADYEFTEGTVVLKPGETQKEFSVGIIDDDIFEEDEHFFVRLSNVRIEEEQPEEGMPPAIFNSLPLPRAVLASPCVATVTILDDDHAGIFTFECDTIHVSESIGVMEVKVLRTSGARGTVIVPFRTVEGTAKGGGEDFEDTYGELEFKNDETVKTIRVKIVDEEEYERQENFFIALGEPKWMERGISDVTDRKLTMEEEEAKRIAEMGKPVLGEHPKLEVIIEESYEFKTTVDKLIKKTNLALVVGTHSWRDQFMEAITVSAAGDEDEDESGEERLPSCFDYVMHFLTVFWKVLFACVPPTEYCHGWACFAVSILIIGMLTAIIGDLASHFGCTIGLKDSVTAVVFVAFGTSVPDTFASKAAALQDVYADASIGNVTGSNAVNVFLGIGLAWSVAAIYWALQGQEFHVSAGTLAFSVTLFTIFAFVCISVLLYRRRPHLGGELGGPRGCKLATTWLFVSLWLLYILFATLEAYCYIKGF

SEQ ID NO: 257338 - protein, 284 aa, Artificial Sequence
  derived and/or modified sequence
MEEEEAKRIAEMGKPVLGEHPKLEVIIEESYEFKTTVDKLIKKTNLALVVGTHSWRDQFMEAITVSAAGDEDEDESGEERLPSCFDYVMHFLTVFWKVLFACVPPTEYCHGWACFAVSILIIGMLTAIIGDLASHFGCTIGLKDSVTAVVFVAFGTSVPDTFASKAAALQDVYADASIGNVTGSNAVNVFLGIGLAWSVAAIYWALQGQEFHVSAGTLAFSVTLFTIFAFVCISVLLYRRRPHLGGELGGPRGCKLATTWLFVSLWLLYILFATLEAYCYIKGF

SEQ ID NO: 257339 - DNA, 2766 bp, Artificial Sequence
  derived and/or modified sequence
atggcctggctgagactgcagcccctgaccagcgccttcctgcacttcggcctggtgaccttcgtgctgttcctgaacggcctgagagccgaggccggcggcagcggcgacgtgcccagcaccggccagaacaacgagagctgcagcggcagcagcgactgcaaggagggcgtgatcctgcccatctggtaccccgagaaccccagcctgggcgacaagatcgccagagtgatcgtgtacttcgtggccctgatctacatgttcctgggcgtgagcatcatcgccgacagattcatggccagcatcgaggtgatcaccagccaggagagagaggtgaccatcaagaagcccaacggcgagaccagcaccaccaccatcagagtgtggaacgagaccgtgagcaacctgaccctgatggccctgggcagcagcgcccccgagatcctgctgagcctgatcgaggtgtgcggccacggcttcatcgccggcgacctgggccccagcaccatcgtgggcagcgccgccttcaacatgttcatcatcatcggcatctgcgtgtacgtgatccccgacggcgagaccagaaagatcaagcacctgagagtgttcttcatcaccgccgcctggagcatcttcgcctacatctggctgtacatgatcctggccgtgttcagccccggcgtggtgcaggtgtgggagggcctgctgaccctgttcttcttccccgtgtgcgtgctgctggcctgggtggccgacaagagactgctgttctacaagtacatgcacaagaagtacagaaccgacaagcacagaggcatcatcatcgagaccgagggcgaccaccccaagggcatcgagatggacggcaagatgatgaacagccacttcctggacggcaacctggtgcccctggagggcaaggaggtggacgagagcagaagagagatgatcagaatcctgaaggacctgaagcagaagcaccccgagaaggacctggaccagctggtggagatggccaactactacgccctgagccaccagcagaagagcagagccttctacagaatccaggccaccagaatgatgaccggcgccggcaacatcctgaagaagcacgccgccgagcaggccaagaaggccagcagcatgagcgaggtgcacaccgacgagcccgaggacttcatcagcaaggtgttcttcgacccctgcagctaccagtgcctggagaactgcggcgccgtgctgctgaccgtggtgagaaagggcggcgacatgagcaagaccatgtacgtggactacaagaccgaggacggcagcgccaacgccggcgccgactacgagttcaccgagggcaccgtggtgctgaagcccggcgagacccagaaggagttcagcgtgggcatcatcgacgacgacatcttcgaggaggacgagcacttcttcgtgagactgagcaacgtgagaatcgaggaggagcagcccgaggagggcatgccccccgccatcttcaacagcctgcccctgcccagagccgtgctggccagcccctgcgtggccaccgtgaccatcctggacgacgaccacgccggcatcttcaccttcgagtgcgacaccatccacgtgagcgagagcatcggcgtgatggaggtgaaggtgctgagaaccagcggcgccagaggcaccgtgatcgtgcccttcagaaccgtggagggcaccgccaagggcggcggcgaggacttcgaggacacctacggcgagctggagttcaagaacgacgagaccgtgaagaccatcagagtgaagatcgtggacgaggaggagtacgagagacaggagaacttcttcatcgccctgggcgagcccaagtggatggagagaggcatcagcgacgtgaccgacagaaagctgaccatggaggaggaggaggccaagagaatcgccgagatgggcaagcccgtgctgggcgagcaccccaagctggaggtgatcatcgaggagagctacgagttcaagaccaccgtggacaagctgatcaagaagaccaacctggccctggtggtgggcacccacagctggagagaccagttcatggaggccatcaccgtgagcgccgccggcgacgaggacgaggacgagagcggcgaggagagactgcccagctgcttcgactacgtgatgcacttcctgaccgtgttctggaaggtgctgttcgcctgcgtgccccccaccgagtactgccacggctgggcctgcttcgccgtgagcatcctgatcatcggcatgctgaccgccatcatcggcgacctggccagccacttcggctgcaccatcggcctgaaggacagcgtgaccgccgtggtgttcgtggccttcggcaccagcgtgcccgacaccttcgccagcaaggccgccgccctgcaggacgtgtacgccgacgccagcatcggcaacgtgaccggcagcaacgccgtgaacgtgttcctgggcatcggcctggcctggagcgtggccgccatctactgggccctgcagggccaggagttccacgtgagcgccggcaccctggccttcagcgtgaccctgttcaccatcttcgccttcgtgtgcatcagcgtgctgctgtacagaagaagaccccacctgggcggcgagctgggcggccccagaggctgcaagctggccaccacctggctgttcgtgagcctgtggctgctgtacatcctgttcgccaccctggaggcctactgctacatcaagggcttctag

SEQ ID NO: 257340 - DNA, 2766 bp, Artificial Sequence
  derived and/or modified sequence
atggcttggctgaggctgcagccactcacctctgctttcctacattttggtctcgttaccttcgttctcttccttaacggactgagggctgaggcaggcgggtcaggagacgtgccttctacaggacagaataatgagtcctgttcaggtagcagcgactgtaaggagggagtgatactcccaatctggtatccagaaaacccctccctcggtgataagattgctagagttatagtatactttgtagcccttatctatatgttcttgggcgtgtctatcatcgcagataggttcatggcatcaatagaagtgataaccagtcaggaaagagaggtcaccatcaaaaaaccaaacggggaaaccagtacaacaactatcagggtgtggaacgaaactgtttctaatctgactctcatggccctaggatccagcgctcccgagattctgctgagcctgatcgaagtctgcggacatggtttcatagccggcgatttaggaccctccaccatcgttgggagcgccgcctttaatatgtttatcatcatcggcatctgtgtgtacgttatccccgatggggagacccgaaagataaagcatctgagagtattcttcatcaccgccgcctggagcatttttgcctacatctggctttatatgattttagctgtgttctctcccggagtcgtgcaggtgtgggagggactgctcaccctgttttttttcccggtctgtgttcttctcgcttgggtggcggacaaaaggttattattctacaaatatatgcacaagaaatataggaccgataagcataggggaataattatcgagactgagggcgatcacccaaaagggatcgagatggatggtaaaatgatgaactcccactttctggatggcaaccttgttcccctggagggtaaagaggtagacgaatccaggagagagatgattcggatcttgaaagacctaaagcagaaacacccagagaaagatctggaccagttagtcgaaatggcgaattattacgccttgtcccaccagcagaagtcacgcgccttctatagaatccaggccactcgcatgatgacaggcgctgggaacatcctcaaaaaacacgcagccgagcaggccaagaaggcgagctccatgagcgaggtgcacaccgatgagcccgaggacttcatttctaaagtcttctttgacccttgctcctaccagtgccttgagaactgcggagccgttctgctaactgtggtgagaaaggggggcgacatgagcaagacaatgtatgtggattacaagaccgaagatggttctgcaaatgccggagcagactacgagtttaccgagggaaccgtggtcctcaaacccggggaaacccagaaggaatttagcgttggcattatcgatgacgatatcttcgaagaggatgaacactttttcgtgcggttgtcaaatgtgaggatcgaagaggaacagcctgaagaaggcatgcccccagcaatctttaatagtctccccttacccagggctgttctcgccagcccttgcgtggccacggtcacaattttagatgacgatcatgccggtatcttcactttcgagtgcgatacaattcatgtgtcggaatccataggagttatggaagtgaaagtgttgaggacaagcggcgcccgcggcactgtgatagtccccttccggaccgttgagggcactgccaaaggcggcggtgaggatttcgaggatacatatggggaactggagttcaaaaacgacgagacagttaagaccattagggtgaagatcgtcgatgaggaggagtacgagagacaagagaattttttcattgccctgggggaacccaaatggatggaaagggggatttccgacgttactgacaggaagctgaccatggaggaggaggaagcaaagcgtattgccgagatggggaagcccgtcttgggcgagcaccccaaattggaagttatcatagaggaaagttacgaatttaagaccaccgtggataaactgataaaaaaaactaatctggccctggtggtgggcacccattcatggagagaccagtttatggaggccattaccgttagtgctgccggggatgaagatgaggatgagagtggcgaggagagattgccaagctgcttcgactacgtaatgcactttttaaccgtcttctggaaggttctcttcgcttgcgtgccaccaacggagtactgccacgggtgggcttgttttgcagtgtccatactcatcatcggcatgctcacagcaataataggagatcttgcttcacacttcgggtgcaccatagggttgaaagattcggtgactgcagtggtgtttgttgcgtttggtacgtccgtgccagatacatttgccagcaaggccgccgccttacaggatgtctatgcagatgcgtcaataggcaacgtcaccgggtctaacgcagtgaatgtgtttctcggaatcggcttggcctggtccgtggcagcaatatactgggctctgcagggacaagaatttcacgtatccgcgggaaccctagctttctccgttactctgttcactatcttcgcctttgtgtgtatcagtgttcttttgtatcgtcgccgcccccatcttggaggtgaactcggaggtcctcggggatgtaagctggctacaacctggcttttcgtgtcactatggctgctgtacattctgtttgcaactctggaggcatactgctatatcaaggggttctag

SEQ ID NO: 257341 - DNA, 2766 bp, Artificial Sequence
  derived and/or modified sequence
atggcctggctgcggctgcagcccctgaccagcgccttcctgcacttcggcctggtgacctttgtgctcttcctgaatggcctgcgggcagaggccggcggcagcggagatgtgcccagcacaggccagaacaatgaaagctgcagcggcagcagtgactgcaaggagggcgtcatcctgcccatctggtacccagagaaccccagcctgggggacaagatcgcccgggtcatcgtgtactttgtggccctgatctacatgttcctgggcgtgtccatcatcgctgaccgcttcatggccagcattgaggtgatcaccagccaggagcgggaggtgaccatcaagaagcccaacggggagaccagcaccaccaccatccgggtgtggaatgagaccgtgagcaacctgaccctgatggccctgggcagcagcgcccctgagatcctgctgagcctgattgaggtgtgtggccacggcttcatcgccggggacctgggccccagcaccatcgtgggcagcgctgccttcaacatgttcatcatcatcggcatctgtgtgtatgtgatcccagatggagagaccaggaagatcaagcacctgcgggtcttcttcatcacagctgcctggagcatctttgcctacatctggctgtacatgatcctggccgtgttcagccctggggtggtgcaggtgtgggagggcctgctgaccctcttcttcttccctgtgtgtgtgctgctggcctgggtggccgacaagaggctgctcttctacaagtacatgcacaagaagtacagaacagacaagcaccggggcatcatcattgaaacagaaggagaccaccccaagggcatcgagatggatggcaagatgatgaacagccacttcctggatggcaacctggtgcccctggagggcaaggaggtggatgagagcagaagagagatgatccgcatcctgaaggacctgaagcagaagcaccctgagaaggacctggaccagctggtggagatggccaactactatgccctgagccaccagcagaagagccgggccttctaccgcatccaggccaccaggatgatgactggagctggcaacatcctgaagaagcatgctgctgagcaggccaagaaggccagctccatgtctgaggtgcacacagatgagcctgaggacttcatcagcaaggtgttctttgacccctgcagctaccagtgcctggagaactgtggggctgtgctgctgactgtggtgaggaaaggaggagacatgagcaagaccatgtatgtggactacaagacagaagatggcagcgccaatgctggagctgactatgagttcacagagggcaccgtggtgctgaagccaggagagacccagaaggagttctctgtgggcatcattgatgatgacatctttgaggaggatgagcacttctttgtgcggctgagcaatgtgagaattgaggaggagcagcctgaggagggcatgcccccagccatcttcaacagcctgcccctgcccagggctgtgctggccagcccctgtgtggccaccgtgaccatcctggatgatgaccatgctggcatcttcacctttgaatgtgacaccatccacgtgtctgagagcattggagtgatggaggtgaaggtgctgcggaccagcggggcccggggcaccgtgattgtgcccttcagaacagtggagggcacagccaagggcggcggggaggactttgaggacacctacggggagctggagttcaagaatgatgagaccgtgaagaccatccgggtgaagatcgtggatgaggaggagtatgaaaggcaggagaacttcttcatcgccctgggggagcccaagtggatggagcggggcatcagtgatgtgacagacaggaagctgaccatggaggaggaggaggccaagagaattgctgagatgggcaagcctgtgctgggggagcaccccaagctggaggtgatcatcgaggagagctatgagttcaagaccaccgtggacaagctgatcaagaagaccaacctggccctggtggtgggcacccacagctggagggaccagttcatggaggccatcaccgtgtctgctgctggagatgaagatgaagatgaaagtggagaggagcggctgcccagctgctttgattatgtgatgcacttcctgaccgtcttctggaaggtgctgtttgcctgtgtgcccccaacagagtactgccacggctgggcctgctttgctgtgtccatcctgatcatcggcatgctgacagccatcatcggggacctggccagccacttcggctgcaccatcggcctgaaggacagcgtgacagctgtggtgtttgtggccttcggcacctctgtgcctgacacctttgccagcaaggccgccgccctgcaggatgtgtatgcagatgccagcattggaaatgtgacaggcagcaatgctgtgaatgtgttcctgggcatcggcctggcctggagcgtggccgccatctactgggccctgcagggccaggagttccacgtgtctgctggcaccctggccttctctgtgaccctcttcaccatctttgcctttgtgtgcatctctgtgctgctgtacagaagaagaccccacctgggcggggagctgggcggcccccggggctgcaagctggccaccacctggctgtttgtgtccctgtggctgctgtacatcctgtttgccaccctggaggcctactgctacatcaagggcttctag

SEQ ID NO: 257342 - DNA, 2766 bp, Artificial Sequence
  derived and/or modified sequence
atggcctggctgcggctgcagcccctgaccagcgccttcctgcacttcggtttagtcacattcgtgctgtttctgaatggcctgcgagccgaggccggggggagtggcgatgtcccatcaacaggccagaataacgagagctgcagtggatcgtcagattgcaaagagggggtgatacttccaatctggtatcctgagaatccctccctaggagataagatcgcgagggtgattgtctacttcgtcgcactcatttacatgttcctgggggtatccatcatcgccgatcgctttatggctagtatcgaagtgatcacaagtcaggaacgcgaagtgacaatcaagaagccaaacggtgagacttccactactaccatccgcgtatggaatgagacggtcagtaacctgacactgatggcacttggcagttctgcacccgaaattctgctgtctctgatcgaagtctgcggccacggctttattgcaggggacttggggccttccacgattgtcggttccgcggcattcaacatgttcataatcatcggtatttgtgtctacgtaatccctgacggcgagactcggaagattaagcatctacgcgtgtttttcattacagctgcctggagtatctttgcgtatatatggctgtatatgattctggctgttttttctcccggtgttgttcaggtctgggagggattgctaactctcttcttctttcccgtgtgcgtgctgttggcatgggtggctgataagcggctgctgttctacaaatacatgcataagaaatatcgtaccgataagcaccggggcatcattatcgaaactgaaggcgaccacccgaaagggatagaaatggatggaaagatgatgaattctcactttttggacggcaacctcgtgcccctggaggggaaagaggtggacgagagcagacgggagatgatcaggatcctgaaggatctgaaacagaaacatccggagaaagatttggaccaactggttgagatggcgaactactacgctctcagccaccagcagaaaagtcgtgccttctacaggatccaggccacccgtatgatgacaggcgctgggaatattttgaaaaagcacgctgccgagcaggccaaaaaagcctccagtatgtcagaagtacacacggatgagccagaagatttcatttcaaaagtgttctttgacccctgctcctatcaatgcctcgagaactgcggagcggtactcctcacggttgtcaggaaaggtggtgatatgtccaaaacaatgtacgtcgactacaaaacggaggacggcagtgccaatgccggcgcagactatgagtttactgagggaactgtggtattgaaacccggggaaactcagaaagaattttccgtcggcattattgatgatgacattttcgaagaggatgagcacttctttgtccgcctgtccaacgtgaggatcgaagaggagcagcccgaggaaggcatgccacccgcaatcttcaactcactgcctctccctagggcagtcttagcgagcccttgcgttgctaccgtgactatcttagatgacgaccatgctggcattttcactttcgagtgcgacacaattcacgtgagtgagagcatcggagtaatggaggtcaaggtgctacgtacatctggagcgcggggcacagtgattgttccgtttaggacagtggaggggactgcgaaaggggggggcgaggactttgaagacacatacggagaacttgagttcaagaacgacgaaaccgtcaagaccattcgggtgaaaatcgtggatgaggaagagtatgaaagacaggaaaacttctttattgctctgggggagccaaaatggatggaacggggtatctctgatgtaacggatagaaaacttaccatggaggaagaggaagccaaaaggatcgccgagatgggcaagcccgtattaggagagcacccaaaattggaggtgatcatcgaggaaagttatgaattcaagaccacggtggataagttaataaaaaagacaaacctggcacttgtggtcggtacccacagctggcgcgaccagtttatggaagcgataaccgtgtcggctgctggtgacgaggatgaggatgagtctggggaggaaaggctgccttcttgctttgattacgtgatgcacttcttgacagtgttctggaaggtgctgttcgcttgcgttcctccgactgagtactgccacggctgggcatgcttcgcagtctcgatcttgatcattggcatgctgaccgcaataatcggagacctcgcaagtcatttcgggtgtacaatagggttaaaagactcggtgactgccgtggtgttcgttgcttttggaacctctgtgcccgatacctttgcgagcaaagctgcagcccttcaggacgtctacgcagacgcctctatcggcaatgtgaccggctcaaacgcagtgaacgtttttcttggaattgggctggcttggtccgtggctgcaatatattgggctctccagggtcaagagtttcacgtgtccgcgggtactttagcctttagtgtgacattatttacaatctttgcatttgtctgcattagcgtgctcctataccgacgacgcccccatctgggaggggaactggggggtccacgaggctgtaaacttgctactacctggctgtttgttagcctttggttattgtacattctgtttgctacactggaagcatactgctatattaaagggttttag

SEQ ID NO: 257343 - DNA, 2766 bp, Artificial Sequence
  derived and/or modified sequence
atggcatggctgcggctccagcccctgacgtcagcttttctgcattttggcctagttaccttcgtgctgtttctgaatggcctacgggcagaagcagggggttccggggatgtcccaagcactggccagaataacgagagctgctctggtagctctgactgtaaggagggcgttattttacccatctggtaccccgagaacccctccttgggcgataaaatcgcccgtgtcattgtgtattttgtggctctgatctacatgtttttgggtgtgtccattattgctgacagatttatggcctctattgaagtgatcacctctcaggaaagggaggtgaccattaagaagccgaatggggagacgtcaaccacaacaatccgggtgtggaacgagactgttagtaacctgactctgatggccctgggcagctcagctccagagatccttctgagtttgatcgaggtatgtggacatggatttattgctggtgatctagggcctagcacaatcgtcggatcagctgctttcaatatgtttatcataatcggaatttgcgtttacgttatccctgatggtgagacgcgcaaaattaaacacctgcgtgtgtttttcattaccgcggcttggtctatttttgcctacatctggctctatatgatcttggcggttttctcccctggcgtcgtgcaggtttgggagggtttacttacattgttcttctttcctgtgtgtgtgctgctcgcctgggtcgcagataaaaggttactgttttataagtacatgcataagaaataccgaaccgacaagcatcggggtataatcatcgagacggagggggatcaccccaaagggattgagatggacggcaaaatgatgaattcacatttcctcgatggcaatctcgtgcccctggaaggcaaggaagtggacgaatccaggcgcgagatgataaggatcctcaaggacctgaagcagaagcacccagaaaaagatcttgaccaactcgtcgaaatggcgaattactatgccctatctcaccagcagaagtctcgcgctttctacagaatccaggccaccagaatgatgaccggggcaggtaacatcctgaaaaagcacgccgctgagcaggccaaaaaggcaagtagtatgtcagaagtgcataccgatgagcctgaggatttcattagtaaggtgttttttgacccatgttcttaccagtgtcttgaaaactgtggcgctgtgttgctaactgtagtcaggaaaggcggtgatatgagtaaaaccatgtatgtcgactataaaaccgaggacgggtctgctaacgcaggggcagattacgagtttactgagggaactgtcgtgctaaaacccggagaaacacaaaaggagttttcagttgggatcatcgatgatgatattttcgaagaagatgaacattttttcgtgaggttatcaaacgtgagaattgaagaggaacaaccagaagaggggatgcccccagccatattcaactccctgccattgccaagggctgttctggcctctccatgcgttgctacagtcactatcctggatgatgaccacgccggaatcttcactttcgagtgcgacaccatacacgtgagcgaatccatcggcgtgatggaagtaaaagtactgcggactagcggcgcaagggggactgttattgtgcccttcaggacagttgagggcaccgccaaaggcggaggggaagattttgaggacacttacggtgagctcgaattcaagaatgacgaaaccgtcaagaccatacgggtcaagatcgttgatgaggaagaatacgagcggcaagagaacttcttcattgctctcggcgaacccaagtggatggagcggggaatcagcgatgtaaccgatcggaagctgactatggaggaggaagaagccaaaagaattgccgagatgggtaagccggtccttggcgaacatcccaaattggaggttatcattgaagaaagttacgagttcaagaccacggtggacaaactaattaaaaaaaccaacctggccctggtggttgggacacattcgtggagggatcagtttatggaggcgataaccgtgtcagctgctggagatgaggacgaagacgagagtggggaggagcggttgcccagctgctttgactacgtgatgcatttcctgaccgtgttctggaaagttctgttcgcgtgcgtgccccctactgaatattgtcacgggtgggcctgctttgctgtgagtatcctaatcatcggcatgctgacagcaatcataggtgatttggccagccatttcggatgtaccatcggccttaaagactcggttaccgctgttgtgtttgtagcattcggtacgtctgtgcccgatacctttgccagtaaggccgcagccctgcaagacgtgtacgcagatgcgagcatcggaaatgtgaccgggtccaatgctgtaaatgttttcctgggaattggcctagcgtggagtgtagccgctatctactgggcactgcaaggccaagaatttcatgtgtctgcaggcacgttggcttttagcgtaactctcttcacaatctttgcattcgtatgcattagcgtactgctatatcgcaggcggccacatctgggtggagagctgggcggacccaggggatgtaaactggcaaccacctggctcttcgtctcactgtggttactgtatattctttttgctactctcgaagcttattgctacattaaaggcttttag

SEQ ID NO: 257344 - DNA, 2916 bp, Artificial Sequence
  derived and/or modified sequence
gagtatcaactcttccagcatggagccgaaaacctagggaatgacagctagaggcatccagacgataactggcagccaggagggtggataagtcaaaggaaggggtcaaggaaagaggggaaggaaagggaaccatcacttgctgagcctgctgcctgtgctttctcatgtcacccgcacgacaacccaatgtgaatgttatcatctccaggtaactgctgaagaaacggaagctcaaagaggaaaaccataagggttaaaatagtagatgaggaggaatacgaaaggcaagagaatttcttcattgcccttggtgaaccgaaatggatggaacgtggaatatcagatgtgacagacaggaagctgactatggaagaagaggaggccaagaggatagcagagatgggaaagccagtattgggtgaacaccccaaactagaagtcatcattgaagagtcctatgagttcaagactacggtggacaaactgatcaagaagacaaacctggccttggttgtggggacccattcctggagggaccagttcatggaggccatcaccgtcagtgcagcaggggatgaggatgaggatgaatccggggaggagaggctgccctcctgctttgactacgtcatgcacttcctgactgtcttctggaaggtgctgtttgcctgtgtgccccccacagagtactgccacggctgggcctgcttcgccgtctccatcctcatcattggcatgctcaccgccatcattggggacctggcctcgcacttcggctgcaccattggtctcaaagattcagtcacagctgttgttttcgtggcatttggcacctctgtcccagatacgtttgccagcaaagctgctgccctccaggatgtatatgcagacgcctccattggcaacgtgacgggcagcaacgccgtcaatgtcttcctgggcatcggcctggcctggtccgtggccgccatctactgggctctgcagggacaggagttccacgtgtcggccggcacactggccttctccgtcaccctcttcaccatctttgcatttgtctgcatcagcgtgctcttgtaccgaaggcggccgcacctgggaggggagcttggtggcccccgtggctgcaagctcgccacaacatggctctttgtgagcctgtggctcctctacatactctttgccacactagaggcctattgctacatcaaggggttctaagccacacaacagagcctccagcagggcaggcctaggacttctcctaagagaagggcacttccccaccagtgatctctcccgactgcactgccctggagaggcagcatcaggacctaagccccaggaacttcacccaacttaggccctggcaattaactgaaagggcaaagtcttaatcaatcaaacaatggaggaatcaccgactttacacagtatttaattgaatacaaacaagcaacagcaacaaatccacctccaccccatctccccctcatatccctgacccaaagcaaaggtcagagcctttcgcctccttctattccatcttttgattattcctttgcctctcatttctttggaagcagggtttctcctctctgcccaattccatatgtccctattatctcactcagctgacaagacgtgaaaatgagtcacattcatgtggctggggtggggttcttttttcattgtaatcattattgtggttgctttcgttttgccattaggttttgcttattattttgttttgtcttttttttctgaagtgagtgaaaaaggtgccacaaaggaattccaggtccgagccaacagagagaaacatgaatttttagacacatgctctcctgccacctcttggctccatcaagatccagttccccatctcactgttttctctgagttcttgggaggagtgatggtgttggggtagaaataagctcactcacccacgcagggtactaaagatcttacaggagcttcaactggagcaggaggagctttttatgcttatgttgaatcaagtcagatacaaaaagcaattgtccctctttgcccaagcctttccaattctgtgtgtcttgttgtgtcagtgtccacttgtgtatccttctgcaggaagacccgccaaatagaagagatgggacaaaaataggaatggtgtgtgacgacaaagggctactggaagaacaaaagggatacaggccttcttgattatctttggctttgtacctgaggcaggagagaagagatgtccaaccagtgagatctttaagagaaaagtttgtattttaaatgtcaatgtgcctgagaaatgtcagcttcaccacgctcttgcttcctaatgctctatacaaagagggctgactatatttcttgaagtggtgtaaaaacttagagattttataagagaaccaggggctcccttcacctctcctggtccctcaggtcacatatgaaagcatttttacaagataggaactggaattcctcatttctcccatgttcctgcttgttcttaaacttcatgaagctatttttccagcctatggggtagttcttgctccagtaagaggaatcttagttgtcataatcccttggagcctgggtttttggagaaagagatctccgtgccctacagaccttttctcaacgaatgtgggaaggacctggctttaaaacacgcacacaaacacacaaataaacagacataagatgtcatcacgaaactgcccacggatctttaggctttctgcattgacataaatacattttctaagggggggggggaagaaattaaaaaacacctgttaattttaaacacattttttaagaaaaaaataattaaaaaagaaacagtgctcatgtcataagctatgttgacagttgccagtggaaatgttgggttggttc

SEQ ID NO: 257345 - DNA, 5250 bp, Artificial Sequence
  derived and/or modified sequence
cggcgctgtctcccagctgatagggtgacgttccgtttggaggcttggagattggctttttgatttggcttcttccggcagcttaatgggcaaagctctccgctcgcccagaaaccagcctctccgcgcgtcccctctgcgcgcggcgaggccgagacgtctcccgcggtgacagcgtgcaaggcggagacccggcgcgctcccagcccagggaaagcccaggcgacgcgaccgcaagcccgagcccaggtccctcggagccgccagggcgcgccgggctgcttgccttcctgccccttcctgcaggaatcccccgccgcccgcggccgggactccgggcctctcccgggcgtagattccagtcaccgctctgggtcggggtttccctctttctgaaatccgtgcggaaggacccctcccggggcccctcgccctggccccagacaccctccctcccagaccccgcgctccagatgcgctgccccgcagctccctgacagctgcgagcccacgaaccccggcgggagggcggcggcggcggactgacatgccccggacgcggctgcggccggcgggcagcccgcgggggcgatgagccgctgcgaccggtgaggcgccgggcggcgggggcatcgcgtaccttcctcacccccctcccttgcccactccgctcgggaggccgagaggaaacggtctctggcctatcaggaggacaactggtgctgcaatagaagccagtggctaagtctcgtgtatggcgtggttaaggttgcagcctctcacctctgccttcctccattttgggctggttacctttgtgctcttcctgaatggtcttcgagcagaggctggtggctcaggggacgtgccaagcacagggcagaacaatgagtcctgttcagggtcatcggactgcaaggagggtgtcatcctgccaatctggtacccggagaacccttcccttggggacaagattgccagggtcattgtctattttgtggccctgatatacatgttccttggggtgtccatcattgctgaccgcttcatggcatctattgaagtcatcacctctcaagagagggaggtgacaattaagaaacccaatggagaaaccagcacaaccactattcgggtctggaatgaaactgtctccaacctgacccttatggccctgggttcctctgctcctgagatactcctctctttaattgaggtgtgtggtcatgggttcattgctggtgatctgggaccttctaccattgtagggagtgcagccttcaacatgttcatcatcattggcatctgtgtctacgtgatcccagacggagagactcgcaagatcaagcatctacgagtcttcttcatcaccgctgcttggagtatctttgcctacatctggctctatatgattctggcagtcttctcccctggtgtggtccaggtttgggaaggcctcctcactctcttcttctttccagtgtgtgtccttctggcctgggtggcagataaacgactgctcttctacaaatacatgcacaaaaagtaccgcacagacaaacaccgaggaattatcatagagacagagggtgaccaccctaagggcattgagatggatgggaaaatgatgaattcccattttctagatgggaacctggtgcccctggaagggaaggaagtggatgagtcccgcagagagatgatccggattctcaaggatctgaagcaaaaacacccagagaaggacttagatcagctggtggagatggccaattactatgctctttcccaccaacagaagagccgtgccttctaccgtatccaagccactcgtatgatgactggtgcaggcaatatcctgaagaaacatgcagcagaacaagccaagaaggcctccagcatgagcgaggtgcacaccgatgagcctgaggactttatttccaaggtcttctttgacccatgttcttaccagtgcctggagaactgtggggctgtactcctgacagtggtgaggaaagggggagacatgtcaaagaccatgtatgtggactacaaaacagaggatggttctgccaatgcaggggctgactatgagttcacagagggcacggtggttctgaagccaggagagacccagaaggagttctccgtgggcataattgatgacgacatttttgaggaggatgaacacttctttgtaaggttgagcaatgtccgcatagaggaggagcagccagaggaggggatgcctccagcaatattcaacagtcttcccttgcctcgggctgtcctagcctccccttgtgtggccacagttaccatcttggatgatgaccatgcaggcatcttcacttttgaatgtgatactattcatgtcagtgagagtattggtgttatggaggtcaaggttctgcggacatcaggtgcccggggtacagtcatcgtcccctttaggacagtagaagggacagccaagggtggcggtgaggactttgaagacacatatggggagttggaattcaagaatgatgaaactgtgaaaaccataagggttaaaatagtagatgaggaggaatacgaaaggcaagagaatttcttcattgcccttggtgaaccgaaatggatggaacgtggaatatcagatgtgacagacaggaagctgactatggaagaagaggaggccaagaggatagcagagatgggaaagccagtattgggtgaacaccccaaactagaagtcatcattgaagagtcctatgagttcaagactacggtggacaaactgatcaagaagacaaacctggccttggttgtggggacccattcctggagggaccagttcatggaggccatcaccgtcagtgcagcaggggatgaggatgaggatgaatccggggaggagaggctgccctcctgctttgactacgtcatgcacttcctgactgtcttctggaaggtgctgtttgcctgtgtgccccccacagagtactgccacggctgggcctgcttcgccgtctccatcctcatcattggcatgctcaccgccatcattggggacctggcctcgcacttcggctgcaccattggtctcaaagattcagtcacagctgttgttttcgtggcatttggcacctctgtcccagatacgtttgccagcaaagctgctgccctccaggatgtatatgcagacgcctccattggcaacgtgacgggcagcaacgccgtcaatgtcttcctgggcatcggcctggcctggtccgtggccgccatctactgggctctgcagggacaggagttccacgtgtcggccggcacactggccttctccgtcaccctcttcaccatctttgcatttgtctgcatcagcgtgctcttgtaccgaaggcggccgcacctgggaggggagcttggtggcccccgtggctgcaagctcgccacaacatggctctttgtgagcctgtggctcctctacatactctttgccacactagaggcctattgctacatcaaggggttctaagccacacaacagagcctccagcagggcaggcctaggacttctcctaagagaagggcacttccccaccagtgatctctcccgactgcactgccctggagaggcagcatcaggacctaagccccaggaacttcacccaacttaggccctggcaattaactgaaagggcaaagtcttaatcaatcaaacaatggaggaatcaccgactttacacagtatttaattgaatacaaacaagcaacagcaacaaatccacctccaccccatctccccctcatatccctgacccaaagcaaaggtcagagcctttcgcctccttctattccatcttttgattattcctttgcctctcatttctttggaagcagggtttctcctctctgcccaattccatatgtccctattatctcactcagctgacaagacgtgaaaatgagtcacattcatgtggctggggtggggttcttttttcattgtaatcattattgtggttgctttcgttttgccattaggttttgcttattattttgttttgtcttttttttctgaagtgagtgaaaaaggtgccacaaaggaattccaggtccgagccaacagagagaaacatgaatttttagacacatgctctcctgccacctcttggctccatcaagatccagttccccatctcactgttttctctgagttcttgggaggagtgatggtgttggggtagaaataagctcactcacccacgcagggtactaaagatcttacaggagcttcaactggagcaggaggagctttttatgcttatgttgaatcaagtcagatacaaaaagcaattgtccctctttgcccaagcctttccaattctgtgtgtcttgttgtgtcagtgtccacttgtgtatccttctgcaggaagacccgccaaatagaagagatgggacaaaaataggaatggtgtgtgacgacaaagggctactggaagaacaaaagggatacaggccttcttgattatctttggctttgtacctgaggcaggagagaagagatgtccaaccagtgagatctttaagagaaaagtttgtattttaaatgtcaatgtgcctgagaaatgtcagcttcaccacgctcttgcttcctaatgctctatacaaagagggctgactatatttcttgaagtggtgtaaaaacttagagattttataagagaaccaggggctcccttcacctctcctggtccctcaggtcacatatgaaagcatttttacaagataggaactggaattcctcatttctcccatgttcctgcttgttcttaaacttcatgaagctatttttccagcctatggggtagttcttgctccagtaagaggaatcttagttgtcataatcccttggagcctgggtttttggagaaagagatctccgtgccctacagaccttttctcaacgaatgtgggaaggacctggctttaaaacacgcacacaaacacacaaataaacagacataagatgtcatcacgaaactgcccacggatctttaggctttctgcattgacataaatacattttctaagggggggggggaagaaattaaaaaacacctgttaattttaaacacattttttaagaaaaaaataattaaaaaagaaacagtgctcatgtcataagctatgttgacagttgccagtggaaatgttgggttggttcaaaaaaaaaataaaagctatactatatctctctacata

SEQ ID NO: 257346 - protein, 81 aa, Artificial Sequence
  derived and/or modified sequence
MSQKPAKEGPRLSKNQKYSEHFSIHCCPPFTFLNSKKEIVDRKYSICKSGCFYQKKEEDWICCACQKTRLKRKIRPTPKKK

SEQ ID NO: 257347 - DNA, 552 bp, Artificial Sequence
  derived and/or modified sequence
atgtcccagaagccggccaaggaggggcccaggctcagcaagaaccagaagtactcagagcatttttcaattcactgttgccctcccttcacgtttttaaactctaagaaagaaattgtcgacaggaaatattctatctgtaaaagcgggtgcttttaccagaaaaaggaagaagattggatctgttgcgcatgtcaaaagacacggactagccgacgggctaaatccccacagcgacctaagcaacagcccgccgcgccgcccgccgtggtcagggctcccgccaagcctcgatcaccaccccggagcgaacggcaaccccgatctcctccacggagcgagcgtcagcctaggagtccaccaaggtccgagcggcagcctcgtagccctcctagaagcgagcgtcaacctcgccctcggcctgaagttcgtccaccgccggccaagcaaaggccaccacagaagtccaagcagcaaccaaggagctccccacttcgaggccctggcgcttctcgcgggggtagtccagtcaaggctagtcggttctggtag

SEQ ID NO: 257348 - DNA, 246 bp, Artificial Sequence
  derived and/or modified sequence
atgtctcagaaacctgccaaagaaggtccgcggctgagtaaaaatcagaaatattcagagcattttagtattcactgttgtcctccgtttacttttctgaactctaagaaagaaatcgtggaccggaaatatagcatctgcaaaagtggctgcttttatcaaaagaaagaggaggattggatttgttgcgcctgtcagaaaactcggctgaaacgcaagatccgccccacacccaagaaaaagtag

SEQ ID NO: 257349 - DNA, 246 bp, Artificial Sequence
  derived and/or modified sequence
atgagccagaagccagcaaaagagggcccccggctgtcaaagaatcagaagtattctgagcactttagcattcactgctgcccccctttcactttcctaaactctaagaaagagattgtcgatcggaaatacagcatctgtaagtctggttgtttttaccaaaaaaaagaggaagactggatctgttgtgcctgccagaagacacggctgaaaaggaagataagaccaacgccgaagaaaaaatag

SEQ ID NO: 257350 - DNA, 246 bp, Artificial Sequence
  derived and/or modified sequence
atgagccagaagcccgccaaagagggccctcgcctgtcaaagaatcagaagtactctgagcacttttcaatccactgctgtcccccttttacatttctgaactcaaaaaaggagattgtggaccgtaagtactcaatctgcaaatcggggtgtttttatcaaaaaaaagaagaagattggatctgttgcgcttgccagaagacaaggctcaaacggaagatacgccctacccccaagaagaaatag

SEQ ID NO: 257351 - DNA, 552 bp, Artificial Sequence
  derived and/or modified sequence
atgtcacagaagccggctaaagagggccccagactctcaaagaatcaaaagtattcagaacacttcagcattcactgctgtccaccatttacgttcctgaactctaagaaagagattgtagatcgtaaatactcaatctgtaaatcaggttgcttctaccagaaaaaagaagaagactggatctgttgcgcttgccagaagacacgcacttccaggcgggccaaatccccacagcggcccaagcagcagccagccgcccctcccgccgtcgtcagagctcctgcaaagcctagatctccaccgaggtcagagcgacagccccgctctcctccccggtcggaacgacagccaagaagccccccccggtcagaaaggcaaccccgcagccctcccaggtccgagcggcagcctcgccctcgccccgaagtgcgacctcctccagctaagcagaggccaccgcagaaatcaaaacagcagcctaggtcatccccgttacggggccctggggccagtcgcggcgggagtccagtaaaggcgagcaggttttggtag

SEQ ID NO: 257352 - DNA, 552 bp, Artificial Sequence
  derived and/or modified sequence
atgagccaaaaacccgcaaaggaggggcctagattatctaagaatcagaagtactccgaacacttttcgatccactgttgcccaccgttcacttttttgaactccaagaaagaaattgtggaccgcaaatattccatctgtaagagcgggtgtttctaccagaaaaaggaggaagattggatttgttgcgcttgccaaaaaacccgcacctccaggcgagccaagtcccctcagcgacctaaacagcagcccgccgccccccccgctgtagtcagagcccctgctaaacctcggtcccctcctagatcagagaggcagccccgatccccaccccgctctgaacggcagcctcgatccccaccgagaagtgagagacagcctcgttcgccgccccgcagtgagcggcagcccagacccaggcctgaagtacgccctccccctgctaaacagcgccccccccagaagagtaagcagcagccacgaagctccccactgagaggcccaggcgctagccgagggggctcacctgttaaagcctcaagattctggtag

SEQ ID NO: 257353 - DNA, 246 bp, Artificial Sequence
  derived and/or modified sequence
atgagccagaagccagccaaagaaggccccaggctgtctaaaaatcagaagtattcggagcatttctccatacattgttgtcctccgtttacgtttctgaacagtaagaaggagatcgtggatagaaaatatagtatttgtaagtcaggatgcttttaccagaagaaggaggaagactggatctgctgcgcgtgccaaaagacacgcttgaagcgtaagattcggcctacacctaagaagaaatag

SEQ ID NO: 257354 - DNA, 552 bp, Artificial Sequence
  derived and/or modified sequence
atgagtcagaagcccgcgaaggaagggccacggctctctaaaaaccagaagtattcagaacatttttcaattcattgttgccccccattcacctttctaaactcaaagaaggaaatcgtagatagaaagtacagcatctgcaaatctggctgcttctaccagaagaaggaagaagactggatttgctgtgcttgtcagaaaactagaacctcacggcgggcaaaatctcctcaacgcccaaagcagcagcctgctgcgccacctgctgtggtgagggcacccgcgaaaccgagaagccccccacgcagcgagcggcagccacgctctccccctcgatccgaaaggcagcccaggtcccctcctagaagcgagagacagcctaggagcccccctcggtccgagagacaaccacggccccgtcctgaggttcgtcctcctccagcgaagcagcgcccgccccagaaatcaaagcagcagccccgctcatcccctttacgcggtccaggagcctccagaggtggctcaccagttaaggctagtcggttttggtag

SEQ ID NO: 257355 - DNA, 246 bp, Artificial Sequence
  derived and/or modified sequence
atgagccaaaaacccgccaaagaggggcccagactcagcaagaatcaaaagtactccgagcacttcagtatacactgctgtcccccgtttacctttcttaacagtaagaaggagattgtcgaccgcaagtactccatttgcaagagcggatgcttttaccagaaaaaagaagaggactggatctgctgcgcatgccaaaaaactcgcctcaaacggaagattcgcccaaccccgaagaaaaaatag

SEQ ID NO: 257356 - DNA, 177 bp, Artificial Sequence
  derived and/or modified sequence
atgtcacaaaagcctgccaaggaaggacctaggctatcaaagaatcagaaatattctgagcacttcagcattcattgttgccctcctttcaccttcttgaattccaaaaaggagattgtcgacagaaaatattcaatctgtaaaagcgggtgcttctaccagaaaaaggaggagtag

SEQ ID NO: 257357 - DNA, 552 bp, Artificial Sequence
  derived and/or modified sequence
atgagccagaagccagccaaggagggcccccggctgagcaagaaccagaagtacagcgagcacttcagcatccactgctgcccccccttcaccttcctgaacagcaagaaggagatcgtggacaggaagtacagcatctgcaagagcggctgcttctaccagaagaaggaggaggactggatctgctgtgcctgccagaagaccaggaccagccggcgggccaagagcccccagaggcccaagcagcagcctgctgcccctcctgctgtggtgcgggccccagccaagcccaggagcccccccaggtctgagcggcagcccaggagcccccccaggtctgagcggcagcccaggagcccccccaggtctgagcggcagcccaggagcccccccaggtctgagcggcagccccggcccaggcctgaggtgcggcccccaccagccaagcagaggcctccccagaagagcaagcagcagcccaggagcagccccctgcggggccctggggccagcagaggaggcagccctgtgaaggccagccgcttctggtag

SEQ ID NO: 257358 - DNA, 246 bp, Artificial Sequence
  derived and/or modified sequence
atgagccagaagccagccaaggagggcccccggctgagcaagaaccagaagtacagcgagcacttcagcatccactgctgcccccccttcaccttcctgaacagcaagaaggagatcgtggacaggaagtacagcatctgcaagagcggctgcttctaccagaagaaggaggaggactggatctgctgtgcctgccagaagacccggctgaagaggaagatccggcccacccccaagaagaagtag

SEQ ID NO: 257359 - DNA, 177 bp, Artificial Sequence
  derived and/or modified sequence
atgagccagaagccagccaaggagggcccccggctgagcaagaaccagaagtacagcgagcacttcagcatccactgctgcccccccttcaccttcctgaacagcaagaaggagatcgtggacaggaagtacagcatctgcaagagcggctgcttctaccagaagaaggaggagtag

SEQ ID NO: 257360 - DNA, 802 bp, Artificial Sequence
  derived and/or modified sequence
aagtggatcttcgctgaggactcatcaaaaacaccttgtgtaatgaaaaacccagatctataacctctccctatatattctgcatgcattgaagtaggctcaaaccctcagggacctggtatagacgcagaatctgtttcacacaacaactgctatttgaaggaaaaaaaaaaaaagaagcaaatgataccaagacaagctcataacagagatccaatcagcagatgtgtacggatgaaaatacagtgagatgagtcagaaaccggccaaggagggtcccagactctccaaaaaccagaagtactccgaacacttcagcatacactgctgcccgccgttcaccttcctcaattccaagaaggagatagtggatcggaaatacagcatctgtaagagcggctgcttctaccagaagaaagaggaggactggatctgctgcgcctgccagaagaccagaaccagccgccgtgccaagtcccctcagaggcccaagcaacagccagctgcgccccccgcggtggtcagagcgccagccaagccacggtcccctccgaggtctgagcgtcagccacggtcccctccgaggtctgagcgtcagccacggtcccctccgaggtctgagcgtcagccacggtcccctccgaggtctgagcgtcagccacgtccccgcccagaggtccgaccaccgccagccaagcagcgtccccctcagaagtccaagcaacagccgcgcagcagccccctcagagggccaggcgccagccgtggggggtcccccgtcaaagcttctaggttctggtaa

SEQ ID NO: 257361 - DNA, 3051 bp, Artificial Sequence
  derived and/or modified sequence
aaaaacaccttgtgtaatgaaaaacccagatctataacctctccctatatattctgcatgcattgaagtaggctcaaaccctcagggacctggtatagacgcagaatctgtttcacacaacaactgctatttgaaggaaaaaaaaaaaaagaagcaaatgataccaagacaagctcataacagagatccaatcagcagatgtgtacggatgaaaatacagtgagatgagtcagaaaccggccaaggagggtcccagactctccaaaaaccagaagtactccgaacacttcagcatacactgctgcccgccgttcaccttcctcaattccaagaaggagatagtggatcggaaatacagcatctgtaagagcggctgcttctaccagaagaaagaggaggactggatctgctgcgcctgccagaagaccagattgaaaaggaagatcaggccaaccccaaagaagaagtgaccaaggaggagtttaaactgaatgaacaacctcggctcctggactcattgcttcacaacccatctacccctggatgaagttatctggcttcaaatattatgcaggggcaaacacctgctgatgtggcaactgctgatgctcatggtccccatggcatgggggcctcagggcagcctgcctggaggtgagcagggctatctctgtgtgttgtactccagtcagggggttccagcagcacccgcaggctctagagctcaatgcacagttctttttgtttcacctgcagtcctttcttctccaggatatgcacaggcctccagggtctttcatggctcagggtcagggtggctcaagtgccaacccacatgttgtcctccaaatattcccttctatccctggcatgctgttgctgagctcaacttttaatttttgactttctcctttgtaattaatctctatctgggtttctctctttctctgtgccatttggtttccttaattagttccctgtgccagcccatagtcagagccataattggctctggggaagatccaagttattttctgagtaagatattaggcttccatatgatccagagatgcaaagaaatccctagagagtgtaggagttgtctaaatccatgtgtcagatgtagccaacgaattatgtcagaagcagagagaaaaggcctgaaaagcagctctctcccactcctcaggcccttgtctccaaccttacatgaggctttttgaacatctcctcctggcccagctggggtgagagcaagtcctcgaaggcactgcctttgagccttgctcagcccatctgaactatcccaactctagaattgactgctttcgaattgtgtgaccttgggaatgttatctggcttcaaccacaatgccctacccccagctcctctcccaaatgatcctagatacagggctgcttccccccgaccctaccccacctcgggacacaggctcatggcctcatggcacttcaccaccagaagtggtgctcagagttcctatttccacatctaaccccctaattcctgggaaagtctgaggcctggtccccccagtgctttccctggctggcctctccacattttcatctgatggtggagtgagatcaggaaaaataggacaggagctttgccttgggggagaagagagttaagtgtggaaaggggtgagttataggaggttaagcagtccaagatttctctctctgtgtaggaggccatttcctgatgtgaggggtctgaacccaattatgatgggacagggttgggcattgacttcccatctcttctctctgtttttctcccactatctgtagcccaaaactcttatggaggactttgatctttagtataggctattggtcagggccataggaactaaccccgatcctcactccaccaggatctaccacatcccctacacacaaacacatgctgtggggagggagttttcccctgggtcaagttgaggatccttagatcaccttgtgctcctgtggactggtgtgtgcgtgtgtgtgtgtgtgtgtgtgtgtgtgtgtgtgtgtgtgtgtgtgtgtgtatgttgggaaacttagctttcagagaatgtctatgggctctcattttctctctcacacaaaaatactcgggacttctccaagtccctgaggagcctgaccactgaagctgatcatgagatgactgtatgctgacacacccccttcaggggcctggccttgacttagggctgcactgtatcctcagcaacggccttgcaggagccccttttggactgctttccctattcagcccagagttggggtggtgggagaagaggggttggagtgaatccatctctattcaaattccagctgggattactctaggagtcttcctggcttgttttgggcccaaacttagctacattgtttattggctcccaaagtcgggattgaagagtgaaaagatgcaggcaatgaatccttctgcacactcctccccaacctttccagcgcttttctacttaggaggccagtggaagggaggagaggccatgccctagcccacaggggacaaggttcattgttcttccaggcttggttcactctgcttttgattcagaagctctttccctacccagcaagactacactttcttgccttctttctattttttctttttgtgcgtataaatggtatgttgtgatatattctcagtgcttgtgcccaccttggaactctgttcttgctcttcattccgcatgtgatactctggtccaagatcttggccaggtgccttctgctcaaatatcgtctcagaggtgcttcccttgaaaactcggtgctgtttccatagttactctatttgatcactctaagtttggttgtcttcatagcacttgtcaccctctggaactattctattcatttatttacttgtttaatgcttggctcttttcccctcctaacgtaaactccatgattgccaacacctgtttacttactacagttccccctccccccacattcctgacactagtaagaaccaataaacacttgttgacggaa

SEQ ID NO: 257362 - DNA, 1714 bp, Artificial Sequence
  derived and/or modified sequence
tcagcagatgtgtacggatgaaaatacagtgagatgagtcagaaaccggccaaggagggtcccagactctccaaaaaccagaagtactccgaacacttcagcatacactgctgcccgccgttcaccttcctcaattccaagaaggagatagtggatcggaaatacagcatctgtaagagcggctgcttctaccagaagaaagaggaggactggatctgctgcgcctgccagaagaccagattgaaaaggaagatcaggccaaccccaaagaagaagtgaccaaggaggagtttaaactgaatgaacaacctcggctcctggactcattgcttcacaacccatctacccctggatgaagttatctggcttcaaatattatgcaggggcaaacacctgctgatgtggcaactgctgatgctcatggtccccatggcatgggggcctcagggcagcctgcctggagtactttgaagatgtcatcccattgtcttctgacctctataattgccactgagagatctgctgtcagtctgcttatccttccacggactcaagtttcttcaatctgaagatacatgtctttctccagggacatgtggaaaaaaaaaagatgttatacaaccatcaaagtggcaaaaataaaaaaaatcaagtattggcaaagatgtggggaaaattctcataagctactgatgagaatttataaattattatgacacctttgggttgcaatctggggatactggcaaagcagaaaattgtacaacctgtgatcaagcaataataattttaggcacccatcctagagaaaacttgaattcatagaaaaagtaggtacacgtaaatctgttcaaggaatcattgtttggcattgaaaataggagagagatcatgagaaattaccaaaatgtccaccaatagaatgagtgaatcacctgtggtatatttataaataaaaatattaaatagaaggtaaaacaaatcagacatacacacattagatagataaatttagaggacaaaataaggaacatgaaaagcaaatagtagatggcaaatgtaatataatatactatgcataaattttaacaacacacaatattatattgcatattgcccaataagcagaagccataaggtctcacacttttcttataatgcaatagaataaaaatgacaacaaagtaaaagggtatcccaaaaataaaactatccttttggaaaaaaaaagatttaaaataattcctggtttgaagaaataacaaattaaaagctatatataaacggttaacaatattaggtggacatatttgtttgaagagataggtgaaagatagttgaaaagcctgggggtatattcaaggttatatgtcttagaaaacaaaaatacttgtttgggttcagttttggatctgggcttgttcttgtggcttctgatgatttctgacttggggaaaaatggggaagagttgaaatacgtccttccacccaaacctttgtttagtaataggtaggaaaatgaagaagaaaatagaatgttgcagaatgtggagggatgtaaaatggacagtactagggtagaggggaagtcagattagaggaaagaaagagcatcaggaacagtcttgtgctaggagctggtgtggccaagcacagtcggatgcccaaagatccaacaaggccatggctctgtgtccttgagtgggcacaacca

SEQ ID NO: 257363 - DNA, 577 bp, Artificial Sequence
  derived and/or modified sequence
aaaaacaccttgtgtaatgaaaaacccagatctataacctctccctatatattctgcatgcattgaagtaggctcaaaccctcagggacctggtatagacgcagaatctgtttcacacaacaactgctatttgaagcttgaaggcaggtccacgcctcctcctggaagccttcccttgactgactcctcgctgagttcacagtgagatgagtcagaaaccggccaaggagggtcccagactctccaaaaaccagaagtactccgaacacttcagcatacactgctgcccgccgttcaccttcctcaattccaagaaggagatagtggatcggaaatacagcatctgtaagagcggctgcttctaccagaagaaagaggaggactggatctgctgcgcctgccagaagaccagattgaaaaggaagatcaggccaaccccaaagaagaagtgaccaaggaggagtttaaactgaatgaacaacctcggctcctggactcattgcttcacaacccatctacccctggatgaagttatctggcttcaaatattatgcaggggcaaacacctgctgatgtg

SEQ ID NO: 257364 - DNA, 940 bp, Artificial Sequence
  derived and/or modified sequence
aaaaacaccttgtgtaatgaaaaacccagatctataacctctccctatatattctgcatgcattgaagtaggctcaaaccctcagggacctggtatagacgcagaatctgtttcacacaacaactgctatttgaaggaaaaaaaaaaaaagaagcaaatgataccaagacaagctcataacagagatccaatcagcagatgtgtacggatgaaaatacagtgagatgagtcagaaaccggccaaggagggtcccagactctccaaaaaccagaagtactccgaacacttcagcatacactgctgcccgccgttcaccttcctcaattccaagaaggagatagtggatcggaaatacagcatctgtaagagcggctgcttctaccagaagaaagaggaggactggatctgctgcgcctgccagaagaccagaaccagccgccgtgccaagtcccctcagaggcccaagcaacagccagctgcgccccccgcggtggtcagagcgccagccaagccacggtcccctccgaggtctgagcgtcagccacggtcccctccgaggtctgagcgtcagccacggtcccctccgaggtctgagcgtcagccacggtcccctccgaggtctgagcgtcagccacgtccccgcccagaggtccgaccaccgccagccaagcagcgtccccctcagaagtccaagcaacagccgcgcagcagccccctcagagggccaggcgccagccgtggggggtcccccgtcaaagcttctaggttctggtaacaccatctcttcccttttgttccccagccctaagattgaaaaggaagatcaggccaaccccaaagaagaagtgaccaaggaggagtttaaactgaatgaacaacctcggctcctggactcattgcttcacaacccatctacccctggatgaagttatctggctt

SEQ ID NO: 257365 - DNA, 1340 bp, Artificial Sequence
  derived and/or modified sequence
cagtgagatgagtcagaaaccggccaaggagggtcccagactctccaaaaaccagaagtactccgaacacttcagcatacactgctgcccgccgttcaccttcctcaattccaagaaggagatagtggatcggaaatacagcatctgtaagagcggctgcttctaccagaagaaagaggaggactggatctgctgcgcctgccagaagaccagaaccagccgccgtgccaagtcccctcagaggcccaagcaacagccagctgcgccccccgcggtggtcagagcgccagccaagccacggtcccctccgaggtctgagcgtcagccacggtcccctccgaggtctgagcgtcagccacggtcccctccgaggtctgagcgtcagccacggtcccctccgaggtctgagcgtcagccacgtccccgcccagaggtccgaccaccgccagccaagcagcgtccccctcagaagtccaagcaacagccgcgcagcagccccctcagagggccaggcgccagccgtggggggtcccccgtcaaagcttctaggttctggtaacaccatctcttcccttttgttccccagccctaagattgaaaaggaagatcaggccaaccccaaagaagaagtgaccaaggaggagtttaaactgaatgaacaacctcggctcctggactcattgcttcacaacccatctacccctggatgaagttatctggcttcaaatattatgcaggggcaaacacctgctgatgtggcaactgctgatgctcatggtccccatggcatgggggcctcagggcagcctgcctggagtactttgaagatgtcatcccattgtcttctgacctctataattgccactgagagatctgctgtcagtctgcttatccttccacggactcaagtttcttcaatctgaagatacatgtctttctccagggacatgtggaaaaaaaaaagatgttatacaaccatcaaagtggcaaaaataaaaaaaatcaagtattggcaaagatgtggggaaaattctcataagctactgatgagaatttataaattattatgacacctttgggttgcaatctggggatactggcaaagcagaaaattgtacaacctgtgatcaagcaataataattttaggcacccatcctagagaaaacttgaattcatagaaaaagtaggtacacgtaaatctgttcaaggaatcattgtttggcattgaaaataggagagagatcatgagaaattaccaaaatgtccaccaatagaatgagtgaatcacctgtggtatatttataaataaaaatattaaatagaaggtaaaacaaatcag

SEQ ID NO: 257366 - DNA, 561 bp, Artificial Sequence
  derived and/or modified sequence
aaaaacaccttgtgtaatgaaaaacccagatctataacctctccctatatattctgcatgcattgaagtaggctcaaaccctcagggacctggtatagacgcagaatctgtttcacacaacaactgctatttgaaggaaaaaaaaaaaaagaagcaaatgataccaagacaagctcataacagagatccaatcagcagatgtgtacggatgaaaatacagcttgaaggcaggtccacgcctcctcctggaagccttcccttgactgactcctcgctgagttcacagtgagatgagtcagaaaccggccaaggagggtcccagactctccaaaaaccagaagtactccgaacacttcagcatacactgctgcccgccgttcaccttcctcaattccaagaaggagatagtggatcggaaatacagcatctgtaagagcggctgcttctaccagaagaaagaggaggactggatctgctgcgcctgccagaagaccagattgaaaaggaagatcaggccaaccccaaagaagaagtgaccaaggaggagtttaaactgaatga

SEQ ID NO: 257367 - DNA, 830 bp, Artificial Sequence
  derived and/or modified sequence
aaaccctcagggacctggtatagacgcagaatctgtttcacacaacaactgctatttgaagcttgaaggcaggtccacgcctcctcctggaagccttcccttgactgactcctcgctgagttcacagtgagatgagtcagaaaccggccaaggagggtcccagactctccaaaaaccagaagtactccgaacacttcagcatacactgctgcccgccgttcaccttcctcaattccaagaaggagatagtggatcggaaatacagcatctgtaagagcggctgcttctaccagaagaaagaggaggactggatctgctgcgcctgccagaagaccagaaccagccgccgtgccaagtcccctcagaggcccaagcaacagccagctgcgccccccgcggtggtcagagcgccagccaagccacggtcccctccgaggtctgagcgtcagccacggtcccctccgaggtctgagcgtcagccacggtcccctccgaggtctgagcgtcagccacggtcccctccgaggtctgagcgtcagccacgtccccgcccagaggtccgaccaccgccagccaagcagcgtccccctcagaagtccaagcaacagccgcgcagcagccccctcagagggccaggcgccagccgtggggggtcccccgtcaaagcttctaggttctggtaacaccatctcttcccttttgttccccagccctaaggttagtagttgcttcctgtgtttactaacaccgggctgtctccatggccctcttcagccttattacccaacctgtgtaatcagctccctccattaaatcccctctgtttgaaa

SEQ ID NO: 257368 - DNA, 566 bp, Artificial Sequence
  derived and/or modified sequence
aaaaacaccttgtgtaatgaaaaacccagatctataacctctccctatatattctgcatgcattgaagtaggctcaaaccctcagggacctggtatagacgcagaatctgtttcacacaacaactgctatttgaagtgagatgagtcagaaaccggccaaggagggtcccagactctccaaaaaccagaagtactccgaacacttcagcatacactgctgcccgccgttcaccttcctcaattccaagaaggagatagtggatcggaaatacagcatctgtaagagcggctgcttctaccagaagaaagaggaggactggatctgctgcgcctgccagaagaccagattgaaaaggaagatcaggccaaccccaaagaagaagtgaccaaggaggagtttaaactgaatgaacaacctcggctcctggactcattgcttcacaacccatctacccctggatgaagttatctggcttcaaatattatgcaggggcaaacacctgctgatgtggcaactgctgatgctcatggtccccatggcatgggggcctcagggcagcctgcct

SEQ ID NO: 257369 - DNA, 567 bp, Artificial Sequence
  derived and/or modified sequence
gtggtttggtagggtgagctggtgtgtggtgtggttggacctggcatggaacttaactggagtttatgtggaatgaaccttgagggccttttgtttaaactttgtgtggcctttttgtagtctttgtgtagcttttgtttttaagtggatcttcgctgaggactcatcaaaaacaccttgtgtaatgaaaaacccagatctataacctctccctatatattctgcatgcattgaagtaggctcaaaccctcagggacctggtatagacgcagaatctgtttcacacaacaactgctatttgaaggaaaaaaaaaaaaagaagcaaatgataccaagacaagctcataacagagatccaatcagcagatgtgtacggatgaaaatacagtgagatgagtcagaaaccggccaaggagggtcccagactctccaaaaaccagaagtactccgaacacttcagcatacactgctgcccgccgttcaccttcctcaattccaagaaggagatagtggatcggaaatacagcatctgtaagagcggctgcttctaccagaagaaagaggagg

SEQ ID NO: 257370 - DNA, 552 bp, Artificial Sequence
  derived and/or modified sequence
atgagccagaagcccgccaaggagggcccccggctgagcaagaaccagaagtattctgagcacttctctatccactgctgccctccattcacttttctaaattcaaagaaggagatagttgacaggaagtatagtatctgtaagagcggctgtttctatcagaaaaaagaggaagactggatctgctgcgcctgccagaagacacgcactagtcggcgcgcaaagagtccacagaggcctaagcaacaacccgccgcccccccggcggtcgtgagagcacctgcaaagccccgcagccccccacgctcagaaaggcaaccccggagccctccccggtccgagaggcagcctcgcagtccgcctaggagcgagcgacagccaagatcccccccgcgttctgagcggcagccacggcccagaccagaggtgcgacccccacctgcgaaacaacggcccccccagaagagcaaacagcagcctcggagcagcccattgcggggtccaggagcctctagaggtggttctccagtaaaggcatcccggttttggtag

SEQ ID NO: 257371 - DNA, 246 bp, Artificial Sequence
  derived and/or modified sequence
atgagccagaagcccgccaaggagggcccccggctgagcaagaaccagaagtattctgaacatttttccatacactgctgtccccccttcacctttctaaattccaaaaaggagatcgtggataggaagtattccatttgtaaaagtggatgtttctatcagaagaaagaggaggactggatttgttgtgcctgtcagaaaactcgcctaaagcggaagattcggccgactccaaagaagaagtag

SEQ ID NO: 257372 - DNA, 246 bp, Artificial Sequence
  derived and/or modified sequence
atgagccagaagcccgccaaggagggcccccggctgagcaagaaccagaaatacagcgagcacttctccatacactgttgtcctcccttcacgttcctcaattctaagaaggagatcgtcgatcggaaatactccatctgcaagagtgggtgtttctatcagaagaaggaggaggattggatatgttgcgcatgccaaaagacccgcctgaaacgaaagatcagacccacccctaaaaaaaagtag

SEQ ID NO: 257373 - DNA, 246 bp, Artificial Sequence
  derived and/or modified sequence
atgagccagaagcccgccaaggagggcccccggctgagcaagaaccaaaagtactcggagcatttctctatacattgttgtcccccgttcaccttcctgaacagcaaaaaagaaatagtggaccgcaaatactctatctgtaagagtggatgcttttatcaaaagaaggaggaagactggatctgctgtgcctgccagaaaaccaggttgaaaagaaagatccgacctaccccgaagaagaagtag

SEQ ID NO: 257374 - DNA, 552 bp, Artificial Sequence
  derived and/or modified sequence
atgagccagaagcccgccaaggagggcccccggctgagcaagaaccagaaatacagtgaacatttcagcatacactgttgcccgcctttcaccttcctaaacagcaaaaaagagattgttgatcggaaatacagcatctgtaagagtgggtgcttctatcagaagaaggaggaggactggatatgctgcgcttgtcagaagaccagaacgtccagacgggcaaagtcgccacagaggcctaaacaacaaccagccgccccacccgctgtcgtgcgtgcgcccgctaagcctcgaagtccaccccgatctgagagacagcctcgatctccacccagaagtgagagacagcccagatcaccccctaggagtgagcgccaaccgcggtcaccccccagatccgagaggcagcctaggccaagaccagaagtccggccccccccggcaaaacagcgaccacctcagaaatctaaacagcaacctaggagctcaccccttagagggccgggcgcctcccgtggcggctctccagtgaaagcatctcgtttctggtag

SEQ ID NO: 257375 - DNA, 552 bp, Artificial Sequence
  derived and/or modified sequence
atgagccagaagcccgccaaggagggcccccggctgagcaagaaccagaaatatagcgaacatttctcaatacactgttgcccgcctttcacatttcttaactcgaagaaagagattgtggaccgaaaatacagcatctgtaaaagcggttgcttttaccagaagaaggaggaggattggatatgctgtgcgtgccagaagacccggaccagccggcgggcaaagtcaccacagcggcctaaacaacaacctgccgcaccaccagcagtcgttagggcccctgcaaagcccaggtctcccccaagatccgaacgacaaccaagatctcctccgagaagcgagcgtcaacctcgcagcccacctcggagtgaacgccagccaagatccccaccacggagcgagagacagccgagaccgcgacccgaggtgcgacctccgcctgctaaacagcggcctccgcagaagagcaagcaacaaccgcgatccagcccccttcggggcccgggcgcgagccggggagggagtccagttaaggctagtaggttttggtag

SEQ ID NO: 257376 - DNA, 246 bp, Artificial Sequence
  derived and/or modified sequence
atgagccagaagcccgccaaggagggcccccggctgagcaagaaccagaaatatagtgaacacttctccattcattgctgtccgccctttacctttctgaattccaagaaggaaattgttgaccgaaagtacagcatctgcaagtcgggctgcttctaccaaaaaaaggaagaggactggatttgttgcgcgtgtcagaaaactaggctaaagcgaaagattcgaccgaccccaaagaagaagtag

SEQ ID NO: 257377 - DNA, 552 bp, Artificial Sequence
  derived and/or modified sequence
atgagccagaagcccgccaaggagggcccccggctgagcaagaaccaaaagtattctgagcacttcagcatacactgctgcccaccttttacctttcttaactccaagaaggagatcgtggatcgtaagtattccatttgcaaaagtggatgtttttatcagaagaaggaggaagactggatctgctgcgcctgccaaaagacaaggactagtcgccgcgccaaatcaccccagcggccaaagcagcagccagctgctccacctgccgtggtgcgggcacctgccaagccacgcagcccccctaggagcgagaggcagcctaggtccccgccccgatctgagagacagccaagatctccccctagatctgagaggcagcctagatccccaccaaggtctgagcggcagccccgtcccaggccagaggttcgccctccacctgctaaacaacgtccgccccaaaagtccaaacagcagccacgttccagtcctttaagagggcccggagcctctcgggggggaagtccggtaaaggcctctaggttctggtag

SEQ ID NO: 257378 - DNA, 246 bp, Artificial Sequence
  derived and/or modified sequence
atgagccagaagcccgccaaggagggcccccggctgagcaagaaccagaagtacagtgaacattttagtatccattgttgcccaccctttactttcctcaatagcaaaaaagagattgtggatcggaaatactccatctgcaaaagcggatgcttctaccagaaaaaggaggaggactggatctgttgcgcctgccaaaaaactcgacttaagcgaaagatccgcccaacacctaagaaaaagtag

SEQ ID NO: 257379 - DNA, 177 bp, Artificial Sequence
  derived and/or modified sequence
atgagccagaagcccgccaaggagggcccccggctgagcaagaaccagaagtattcagagcatttctccatacactgctgccccccttttacttttctgaactccaaaaaagaaatagtggatagaaagtactcaatttgtaaatctggatgcttttatcagaaaaaggaagagtag

SEQ ID NO: 257380 - DNA, 552 bp, Artificial Sequence
  derived and/or modified sequence
atgagccagaaacctgctaaagagggcccacggctttcaaaaaaccagaagtactccgaacacttttcaatccactgttgtcctccctttacatttctcaattctaagaaagagatagtagacagaaaatactccatatgcaagtctgggtgtttctaccaaaagaaggaggaggactggatttgctgcgcctgccaaaagaccaggacctcccgcagggctaagagtccccaacgtcccaagcagcagcccgctgccccacccgcagtagtgcgggcaccggctaagcctcggtcccctcctcgaagcgaacggcagccacgctctccccctagatccgagagacagcctagatcgcctcctcgatctgaaagacagcctcggagtccaccaaggtccgaaaggcaacctcgcccaagacccgaggtcagaccacctcctgctaagcagcggccacctcagaagtcaaagcagcaaccacggagtagtccactgagaggccctggggcttcacgaggtggctcccctgttaaagcatccaggttttggtag

SEQ ID NO: 257381 - DNA, 246 bp, Artificial Sequence
  derived and/or modified sequence
atgagccaaaaacccgctaaggaaggcccacggctgtcgaagaaccagaaatattccgaacacttttctattcattgctgcccccctttcaccttcttaaactcgaagaaggaaatcgtagaccgcaaatactcgatctgtaaatcggggtgcttttaccagaaaaaggaggaggactggatatgttgtgcatgccagaagacgcgcctgaagaggaagattcggcctacaccgaaaaaaaagtag

SEQ ID NO: 257382 - DNA, 246 bp, Artificial Sequence
  derived and/or modified sequence
atgagtcaaaagccggctaaggaaggtccacgcttgtctaagaaccagaaatatagtgaacactttagcattcactgctgtccaccgtttacctttcttaattctaagaaagaaatagtagatcgtaaatattcgatatgcaaatcagggtgtttttaccagaaaaaggaagaggactggatctgttgtgcttgccagaagacgcgcctcaaaagaaaaataaggcccacgcctaaaaaaaagtag

SEQ ID NO: 257383 - DNA, 246 bp, Artificial Sequence
  derived and/or modified sequence
atgtcacaaaagcccgcaaaggaaggccctagacttagtaagaatcagaaatactcggagcacttcagcatccactgttgccctccattcacctttttgaattccaagaaagagattgttgatagaaaatacagtatctgcaaaagcggctgcttctaccagaagaaggaggaagactggatttgctgtgcctgccaaaagacacgtttaaaacgaaagattcgacctacccctaagaagaagtag

SEQ ID NO: 257384 - DNA, 552 bp, Artificial Sequence
  derived and/or modified sequence
atgtctcaaaaaccagccaaggaggggccaagattgagtaaaaaccagaaatactctgaacactttagcatccattgttgcccaccattcaccttcctaaactccaaaaaagagatcgttgatcggaagtattccatctgtaagtcaggctgtttttatcaaaaaaaggaagaggactggatctgctgcgcttgtcagaaaaccaggacgtctagacgcgctaaatccccgcagcgtcccaaacagcagcctgccgcaccaccagctgtggtccgcgctccagccaagccccgttctcctccccgttcagaacgccaacccaggtctccccctcgaagcgaaaggcaaccacggagcccaccccgttctgaaaggcagccacgttccccaccccgaagcgaaagacagcccaggccccgtcctgaggtgcgtcctcctcccgcaaaacagcgtccccctcaaaaatctaaacagcagcctcgttcctcaccgctccgcggtcccggtgcttcaaggggagggagtcccgttaaagcctctcgattttggtag

SEQ ID NO: 257385 - DNA, 552 bp, Artificial Sequence
  derived and/or modified sequence
atgtcacagaaaccggctaaggagggaccacgcctgtctaaaaaccaaaaatactccgagcacttctccattcactgctgccccccatttaccttccttaacagtaagaaagaaattgtagatcggaaatacagcatctgcaagtctggctgtttttatcagaaaaaagaggaggattggatttgttgtgcctgccagaagacaaggactagccgcagagccaaatcccctcagagacccaaacagcagccagccgctcccccagccgtggtgagggcccctgcaaagcctaggagcccccctcgtagcgagcgacaaccgcgaagccctccaaggtccgagcggcagccacggtcaccaccgcgatccgagcggcagcctcgttctccacctcggtctgagcgccagccaaggcctaggcctgaggtacgcccacctccagcgaagcagcgccctcctcaaaagagcaaacagcaacctcgttcatcccccctcagaggcccaggagcgagccgcggaggaagccccgtcaaagctagccggttctggtag

SEQ ID NO: 257386 - DNA, 246 bp, Artificial Sequence
  derived and/or modified sequence
atgtcccaaaagcctgcgaaagagggccctcgcctgtctaagaaccagaagtactcagaacacttttccattcattgctgtcctcctttcacctttttgaatagcaaaaaggagatagtggacagaaagtattctatctgcaaaagcggctgcttctaccaaaagaaggaagaagactggatctgctgtgcttgccagaaaacccgtcttaaaaggaagatacgtccgacacctaaaaagaagtag

SEQ ID NO: 257387 - DNA, 552 bp, Artificial Sequence
  derived and/or modified sequence
atgagccagaaacctgctaaggagggtccacggctgtctaagaatcagaagtactcggagcatttttccattcattgttgtccacctttcacattcctgaacagcaagaaggagatcgtggatcgcaagtatagtatttgtaagtcagggtgcttttaccaaaagaaagaggaagactggatatgttgtgcgtgccagaagactagaacgagtaggcgggcaaagagcccccaacgcccaaagcagcaaccggctgcaccacctgccgtcgtccgcgcaccagcaaagcctagatctccgccacgaagcgaaagacaacctcggtcaccccctcgtagcgagcgacagccacgatcaccacccagaagtgaaagacaacctcgtagcccccctagaagtgaacgccagccccgaccgaggcctgaagtcaggccccctcctgccaaacagcgcccaccgcagaagagcaagcagcaacctagatcatcccccctgagggggcctggagcttctaggggaggctcaccggttaaggcttcccggttttggtag

SEQ ID NO: 257388 - DNA, 246 bp, Artificial Sequence
  derived and/or modified sequence
atgtcccagaaacccgctaaggagggcccacggctatccaagaaccagaaatattctgaacatttctcaatccattgttgtcccccattcacatttctaaatagcaagaaggaaatcgttgatcggaaatactctatatgcaaatccggttgtttctaccagaaaaaggaagaggattggatttgttgtgcctgccagaagacccgcttaaaacgcaaaatccggccaactcctaaaaaaaagtag

SEQ ID NO: 257389 - DNA, 177 bp, Artificial Sequence
  derived and/or modified sequence
atgagtcagaagccggctaaagaaggtcctcggctgtctaaaaaccagaagtattccgagcacttcagtattcactgttgtcctccctttacttttctgaacagcaaaaaggagatagtcgaccgcaagtattctatatgtaaaagcgggtgtttttatcaaaagaaggaagagtag

SEQ ID NO: 257390 - DNA, 246 bp, Artificial Sequence
  derived and/or modified sequence
atgagccagaagcccgccaaggagggccccagactgagcaagaaccagaagtacagcgagcacttcagcatccactgctgcccccccttcaccttcctgaacagcaagaaggagatcgtggacagaaagtacagcatctgcaagagcggctgcttctaccagaagaaggaggaggactggatctgctgcgcctgccagaagaccagactgaagagaaagatcagacccacccccaagaagaagtag

SEQ ID NO: 257391 - DNA, 177 bp, Artificial Sequence
  derived and/or modified sequence
atgagccagaagcccgccaaggagggccccagactgagcaagaaccagaagtacagcgagcacttcagcatccactgctgcccccccttcaccttcctgaacagcaagaaggagatcgtggacagaaagtacagcatctgcaagagcggctgcttctaccagaagaaggaggagtag

SEQ ID NO: 257392 - DNA, 855 bp, Artificial Sequence
  derived and/or modified sequence
atggaggaggaggaggccaagagaatcgccgagatgggcaagcccgtgctgggcgagcaccccaagctggaggtgatcatcgaggagagctacgagttcaagaccaccgtggacaagctgatcaagaagaccaacctggccctggtggtgggcacccacagctggagagaccagttcatggaggccatcaccgtgagcgccgccggcgacgaggacgaggacgagagcggcgaggagagactgcccagctgcttcgactacgtgatgcacttcctgaccgtgttctggaaggtgctgttcgcctgcgtgccccccaccgagtactgccacggctgggcctgcttcgccgtgagcatcctgatcatcggcatgctgaccgccatcatcggcgacctggccagccacttcggctgcaccatcggcctgaaggacagcgtgaccgccgtggtgttcgtggccttcggcaccagcgtgcccgacaccttcgccagcaaggccgccgccctgcaggacgtgtacgccgacgccagcatcggcaacgtgaccggcagcaacgccgtgaacgtgttcctgggcatcggcctggcctggagcgtggccgccatctactgggccctgcagggccaggagttccacgtgagcgccggcaccctggccttcagcgtgaccctgttcaccatcttcgccttcgtgtgcatcagcgtgctgctgtacagaagaagaccccacctgggcggcgagctgggcggccccagaggctgcaagctggccaccacctggctgttcgtgagcctgtggctgctgtacatcctgttcgccaccctggaggcctactgctacatcaagggcttctag

SEQ ID NO: 257393 - DNA, 855 bp, Artificial Sequence
  derived and/or modified sequence
atggaggaggaggaggcaaagcggatcgccgaaatgggaaaacctgtgttgggagagcatccgaagctagaggtcatcatagaagagtcttacgaattcaagaccacagtggataagttgatcaagaagacaaacttagcgctcgtagtgggaacacacagctggcgggaccagtttatggaggctataacagtctccgcggccggtgatgaggacgaggatgagtcgggtgaagagcgactccctagctgctttgattacgttatgcatttccttacagtgttctggaaagtgctgttcgcgtgcgttcctccgacagagtactgccacggttgggcgtgcttcgccgtgtccatacttatcatcggcatgctcactgctataattggggaccttgcctcccatttcggctgtactatcggcctgaaggacagtgttacggccgtggttttcgttgccttcggcacttccgtcccggatacctttgctagcaaagcggccgctctccaggatgtatacgcagatgcctctattggcaatgtcaccggcagcaatgccgtcaatgtgttcctaggcatcggcttggcttggtcagtagccgcgatttattgggctttacagggacaggaatttcatgtgagcgccgggacgcttgctttctccgtgacccttttcaccattttcgccttcgtctgcatttctgtgctgctatacaggcggaggcctcatctggggggggagctgggcggaccgcgaggctgtaaactggctacgacttggttgtttgtcagcctgtggttgctgtatatcctattcgccacactcgaggcatattgctacatcaaaggtttttag

SEQ ID NO: 257394 - DNA, 855 bp, Artificial Sequence
  derived and/or modified sequence
atggaggaggaggaggccaagagaattgctgagatgggcaagcctgtgctgggggagcaccccaagctggaggtgatcatcgaggagagctatgagttcaagaccaccgtggacaagctgatcaagaagaccaacctggccctggtggtgggcacccacagctggagggaccagttcatggaggccatcaccgtgtctgctgctggagatgaagatgaagatgagagcggggaggagcggctgcccagctgctttgattatgtgatgcacttcctgactgtgttctggaaggtgctgtttgcctgtgtgcccccaacagagtactgccacggctgggcctgctttgctgtgtccatcctgatcatcggcatgctgacagccatcattggagacctggccagccacttcggctgcaccatcggcctgaaggacagcgtgacagctgtggtgtttgtggccttcggcacctctgtgcctgacacctttgccagcaaggctgctgccctgcaggatgtgtatgcagatgccagcattggaaatgtgacaggcagcaatgctgtgaatgtgttcctgggcatcggcctggcctggagcgtggccgccatctactgggccctgcagggccaggagttccacgtgtctgctggcaccctggccttctctgtgaccctcttcaccatctttgcctttgtgtgcatctctgtgctgctgtacagaagaagaccccacctgggcggggagctgggcggcccccggggctgcaagctggccaccacctggctgtttgtgtccctgtggctgctgtacatcctgtttgccaccctggaggcctactgctacatcaagggcttctag

SEQ ID NO: 257395 - DNA, 855 bp, Artificial Sequence
  derived and/or modified sequence
atggaggaggaggaggccaagcggatcgccgagatgggcaagcccgtactgggcgagcaccccaagctcgaagtaattatagaagaaagctatgagttcaagactaccgttgataagctcatcaagaagactaatctggcgttggtggttggtactcacagttggcgggaccagttcatggaggctatcacagtatccgccgctggtgacgaggacgaggacgagtccggggaggagcgattgccttcctgttttgattacgttatgcacttcctgacagtgttctggaaagtgctgttcgcctgtgtgccccctacagaatactgtcatggctgggcttgttttgcggtctcgatactgatcataggaatgctaacagcaattataggggatctagccagccactttggatgtactatcgggctgaaggacagcgtcacagcagttgtgttcgtggccttcgggactagtgtgccagacacatttgcttcaaaagccgcggctctgcaggacgtctacgccgatgcatcaattggcaatgtcactggaagtaacgccgtgaatgtatttctgggaatcgggttggcctggtccgtcgctgcaatttattgggctctccaaggccaggaatttcacgtgtcagcaggcacgctcgccttttctgttacactgttcactatttttgcatttgtgtgcatatcagtcttgctctatagaagacggccccacctgggcggcgaacttggcggcccaagggggtgcaaactggcaactacctggctgtttgtgtccctctggctgctctacatcttatttgccactctggaggcctactgctacatcaaggggttctag

SEQ ID NO: 257396 - DNA, 855 bp, Artificial Sequence
  derived and/or modified sequence
atggaggaggaagaggccaaacgcattgccgagatggggaagcccgtcctaggcgaacacccaaagttagaagtcattatagaagaaagctacgaattcaagacaaccgtggacaaactgatcaagaaaactaacttagctttagtcgtggggacgcatagctggagggaccagtttatggaagctatcacagtctccgccgcaggggacgaggatgaagacgaatcaggcgaggaacggctacctagttgcttcgactacgttatgcacttcctcaccgtgttttggaaggtgcttttcgcatgcgtgcctcccactgagtactgtcacgggtgggcatgttttgccgtcagcatactcattattggcatgctcaccgccattatcggcgatttggcctcccatttcggctgcacgatcggtctgaaggattccgtgacagcagtcgtgtttgtagcttttggcacatcggtccccgatacttttgctagcaaggctgcagctctccaggacgtgtacgccgacgcctccatcggtaacgtgacaggctctaacgctgtcaatgtattcctcggcatcggcctggcatggtctgttgccgctatctactgggccctccagggccaagagttccacgttagcgctgggaccttggccttcagcgtaacattgtttacaatcttcgcttttgtgtgcatcagtgtgcttctctataggcggaggccccaccttggaggagagttggggggaccccgtggttgtaagctggcaacgacctggctgttcgtgagcctatggctcctttacattctcttcgcaacgttggaagcttactgttacataaaaggtttctag

SEQ ID NO: 257397 - protein, 758 aa, Artificial Sequence
  derived and/or modified sequence
MGGCTVKPQLLLLALVLHPWNPCLGADSEKPSSIPTDKLLVITVATKESDGFHRFMQSAKYFNYTVKVLGQGEEWRGGDGINSIGGGQKVRLMKEVMEHYADQDDLVVMFTECFDVIFAGGPEEVLKKFQKANHKVVFAADGILWPDKRLADKYPVVHIGKRYLNSGGFIGYAPYVNRIVQQWNLQDNDDDQLFYTKVYIDPLKREAINITLDHKCKIFQTLNGAVDEVVLKFENGKARAKNTFYETLPVAINGNGPTKILLNYFGNYVPNSWTQDNGCTLCEFDTVDLSAVDVHPNVSIGVFIEQPTPFLPRFLDILLTLDYPKEALKLFIHNKEVYHEKDIKVFFDKAKHEIKTIKIVGPEENLSQAEARNMGMDFCRQDEKCDYYFSVDADVVLTNPRTLKILIEQNRKIIAPLVTRHGKLWSNFWGALSPDGYYARSEDYVDIVQGNRVGVWNVPYMANVYLIKGKTLRSEMNERNYFVRDKLDPDMALCRNAREMTLQREKDSPTPETFQMLSPPKGVFMYISNRHEFGRLLSTANYNTSHYNNDLWQIFENPVDWKEKYINRDYSKIFTENIVEQPCPDVFWFPIFSEKACDELVEEMEHYGKWSGGKHHDSRISGGYENVPTDDIHMKQVDLENVWLHFIREFIAPVTLKVFAGYYTKGFALLNFVVKYSPERQRSLRPHHDASTFTINIALNNVGEDFQGGGCKFLRYNCSIESPRKGWSFMHPGRLTHLHEGLPVKNGTRYIAVSFIDP

SEQ ID NO: 257398 - protein, 418 aa, Artificial Sequence
  derived and/or modified sequence
MLENHILHKRIYILTFFSQQIFILCHAHFIFFFTVRDFCRQDEKCDYYFSVDADVVLTNPRTLKILIEQNRKIIAPLVTRHGKLWSNFWGALSPDGYYARSEDYVDIVQGNRVGVWNVPYMANVYLIKGKTLRSEMNERNYFVRDKLDPDMALCRNAREMTLQREKDSPTPETFQMLSPPKGVFMYISNRHEFGRLLSTANYNTSHYNNDLWQIFENPVDWKEKYINRDYSKIFTENIVEQPCPDVFWFPIFSEKACDELVEEMEHYGKWSGGKHHDSRISGGYENVPTDDIHMKQVDLENVWLHFIREFIAPVTLKVFAGYYTKGFALLNFVVKYSPERQRSLRPHHDASTFTINIALNNVGEDFQGGGCKFLRYNCSIESPRKGWSFMHPGRLTHLHEGLPVKNGTRYIAVSFIDP

SEQ ID NO: 257399 - protein, 703 aa, Artificial Sequence
  derived and/or modified sequence
MQSAKYFNYTVKVLGQGEEWRGGDGINSIGGGQKVRLMKEVMEHYADQDDLVVMFTECFDVIFAGGPEEVLKKFQKANHKVVFAADGILWPDKRLADKYPVVHIGKRYLNSGGFIGYAPYVNRIVQQWNLQDNDDDQLFYTKVYIDPLKREAINITLDHKCKIFQTLNGAVDEVVLKFENGKARAKNTFYETLPVAINGNGPTKILLNYFGNYVPNSWTQDNGCTLCEFDTVDLSAVDVHPNVSIGVFIEQPTPFLPRFLDILLTLDYPKEALKLFIHNKEVYHEKDIKVFFDKAKHEIKTIKIVGPEENLSQAEARNMGMDFCRQDEKCDYYFSVDADVVLTNPRTLKILIEQNRKIIAPLVTRHGKLWSNFWGALSPDGYYARSEDYVDIVQGNRVGVWNVPYMANVYLIKGKTLRSEMNERNYFVRDKLDPDMALCRNAREMTLQREKDSPTPETFQMLSPPKGVFMYISNRHEFGRLLSTANYNTSHYNNDLWQIFENPVDWKEKYINRDYSKIFTENIVEQPCPDVFWFPIFSEKACDELVEEMEHYGKWSGGKHHDSRISGGYENVPTDDIHMKQVDLENVWLHFIREFIAPVTLKVFAGYYTKGFALLNFVVKYSPERQRSLRPHHDASTFTINIALNNVGEDFQGGGCKFLRYNCSIESPRKGWSFMHPGRLTHLHEGLPVKNGTRYIAVSFIDP

SEQ ID NO: 257400 - DNA, 2277 bp, Artificial Sequence
  derived and/or modified sequence
atgggcggctgcactgttaaacctcagttactgctgctggccctcgttctgcatccctggaacccttgtctcggcgccgactctgagaagccatctagtattccgacagacaaattgctggtgatcacagtggctactaaggaatccgacggattccatagatttatgcagtctgctaagtattttaattacacggtgaaggtgctcggccagggcgaagaatggaggggaggggacggaatcaattctataggaggggggcaaaaagtacgtctgatgaaagaggttatggaacattacgcagaccaagacgatctggtcgtcatgtttactgaatgtttcgacgtgatttttgctgggggtccagaggaggtcctgaaaaaatttcagaaagccaaccacaaggtcgtattcgcggcagatggaattctgtggccagataagcgcctggctgacaaatacccggtagttcatatcgggaagcggtacctgaacagcgggggattcatcggctatgctccctacgtaaacagaatagtgcagcagtggaacctgcaggataacgacgacgaccagctgttttatacaaaggtgtacatagatcctttgaagcgagaagctattaacatcacccttgatcacaaatgcaaaatttttcagactctgaatggcgcagtggacgaggtcgtactgaaatttgaaaacggcaaggcccgcgccaagaataccttttacgaaactctgcctgtcgcgataaatggcaatggtcctacaaaaatccttctaaactacttcgggaattacgtgccaaattcctggactcaggataatgggtgcaccttatgcgagttcgataccgtggacctgtccgccgtcgatgtgcaccctaatgtttcaatcggcgtcttcattgagcagccgactccattccttccgagattcctcgacatcctactcacgcttgactatccaaaggaagccctcaagctgtttattcataataaagaggtttaccatgagaaagacataaaggtgtttttcgacaaggccaagcatgagattaaaactatcaagatcgtgggtccagaagaaaatttgagccaggctgaagcccgcaacatgggcatggatttctgtcggcaggatgaaaagtgtgactattatttttccgttgacgcggatgtcgtcctgacgaacccccggacgctgaaaatcctgattgaacaaaaccgcaaaatcatcgctccattagtcactcgacacggcaagctctggtcaaatttttggggggcactttccccagatggttattatgctcgcagtgaggactacgtcgacattgtgcagggtaatcgcgtgggcgtgtggaacgttccctacatggcaaatgtgtacctgatcaaggggaaaacactgcgaagcgaaatgaatgagcgcaattacttcgtccgagacaagttggacccagacatggccctgtgtcggaacgctcgagagatgacactccagcgggagaaggactcacctacaccggaaacatttcagatgttgagcccgcccaaaggcgtctttatgtacatcagtaatcgacacgaattcggacggctgttgtccactgctaattataacacctcccattacaacaatgatctctggcagattttcgaaaaccccgttgactggaaagaaaaatatatcaaccgggattatagtaaaatatttaccgaaaatatcgtcgagcagccctgtcccgacgtcttttggttcccaatcttttcagaaaaagcctgcgacgagttagttgaggaaatggagcactacggcaagtggagcggaggtaagcaccacgattcacggatatccggaggatacgagaacgtgccaacggatgacatccacatgaagcaagtggacctggagaacgtgtggctgcacttcattagagaatttatagctcctgtgacactgaaggtgttcgccgggtactacaccaagggcttcgccctgcttaattttgtggttaagtacagtcccgagagacagagaagcctccggccccaccacgacgctagcacgttcaccatcaacatagccttaaacaacgtgggcgaagacttccagggaggtggctgtaagtttctgaggtacaactgctcaattgagtccccacgcaaagggtggtcatttatgcaccctggccggctcacacaccttcacgaaggacttcctgtcaagaatggcacacgctatatcgcagtgagttttattgacccctag

SEQ ID NO: 257401 - DNA, 2112 bp, Artificial Sequence
  derived and/or modified sequence
atgcagagcgctaagtactttaactacacagtgaaggtgctgggccagggagaggaatggcggggtggcgacggcattaacagcattggtggcggccaaaaagtcaggctgatgaaggaagtgatggagcactatgcagaccaagatgacctggtggtcatgttcaccgaatgttttgacgtcattttcgctgggggccctgaagaagtgttaaagaaattccaaaaggctaaccataaagtcgtcttcgccgcggatggcatcctgtggcccgataagcggcttgccgataaatatccagtggtacacatagggaaaagatacctcaacagcggcggcttcattggttatgcgccttatgtcaatcggattgtccagcagtggaacctccaggataatgacgatgatcagctattctacactaaggtctacatagacccactgaagcgcgaggctatcaatattacactggaccacaagtgcaagatttttcaaacgttaaacggggccgtggacgaagtggtcctgaaatttgagaacggtaaggcaagggcgaagaacacgttctacgagacgctccccgtcgccatcaacggcaacggtcccacaaaaattttgctcaactatttcggtaactacgtacctaatagctggacacaagacaacggctgtacactctgtgagttcgataccgtggatctttccgccgtcgacgtccacccgaatgtgtctattggtgttttcatcgagcagcccactcccttcttgccaaggtttttggatatcctgctgaccctggactacccgaaagaagccttaaagctctttatccataataaggaagtgtatcatgaaaaggatatcaaggtcttcttcgacaaagccaagcatgagataaagacaataaagattgtaggccctgaggagaatctgtcccaggctgaagccaggaacatgggaatggacttctgccgtcaggatgaaaaatgcgattactacttctccgtcgacgccgacgttgttttgacaaatccacgcaccctcaaaatcctgatcgagcaaaatcgaaagatcattgcacccttagtgacgaggcatggcaagctctggagcaacttctggggcgcattgtctcccgacggttattatgcacggagcgaggattatgtcgatatcgtccaaggcaaccgcgtgggggtttggaatgttccctatatggcaaacgtgtatcttattaaggggaagactctcaggagcgagatgaatgaacgtaactatttcgtgcgggacaaactggatcctgatatggctctgtgtcgcaacgcccgtgagatgaccctccagcgggagaaggatagccctactccagagaccttccagatgctatccccgcccaaaggcgtgtttatgtatatcagtaatagacatgagtttgggcggctgctctccacagctaattataacacatcccattataataatgacttgtggcaaatcttcgaaaatccagtggactggaaggagaagtacatcaaccgcgactatagcaagattttcactgagaacattgttgaacagccctgccctgatgtgttctggttccctatctttagcgagaaggcgtgtgatgaactggttgaggagatggagcactatgggaaatggtcgggagggaagcatcatgacagcaggatctctggagggtacgagaacgtccctacagacgatatccatatgaagcaggtggatttggagaacgtttggcttcatttcatcagggaattcattgcaccagtaactctcaaggtgttcgccggctactacaccaaaggatttgccctattgaattttgtggttaaatattctcctgagagacagcgctctctaagacctcatcacgacgcctccacattcactattaacattgccctgaataatgtcggggaggactttcagggcggaggatgcaaattcctgcggtataattgctcaatagagtctccaagaaagggctggagtttcatgcaccctggccgtctcacacacctgcacgaaggactacccgtgaaaaatgggaccaggtacatcgctgtttctttcatcgatccatag

SEQ ID NO: 257402 - DNA, 2277 bp, Artificial Sequence
  derived and/or modified sequence
atgggcggctgcaccgtgaagccccagctgctgctgctggccctggtgctgcacccctggaacccctgcctgggcgctgacagcgagaagcccagcagcatccccacagacaagctgctggtgatcaccgtggccaccaaggagagtgatggcttccaccgcttcatgcagagcgccaagtacttcaactacacagtgaaggtgctgggccagggcgaggagtggagaggaggagatggcatcaacagcatcggcggcggccagaaggtgcggctgatgaaggaggtgatggagcactatgctgaccaggatgacctggtggtgatgttcacagagtgctttgatgtgatctttgctgggggccctgaggaggtgctgaagaagttccagaaggccaaccacaaggtggtgtttgctgctgatggcatcctgtggccagacaagaggctggccgacaagtaccctgtggtgcacatcggcaagcgctacctgaacagcggcggcttcatcggctacgccccctacgtgaacagaattgtgcagcagtggaacctgcaggacaatgatgatgaccagctgttctacaccaaggtgtacatcgaccccctgaagcgggaggccatcaacatcaccctggaccacaagtgcaagatcttccagaccctgaatggagctgtggatgaggtggtgctgaagtttgaaaatggcaaggcccgggccaagaacaccttctatgagaccctgcctgtggccatcaatggaaatggccccaccaagatcctgctgaactactttggaaactacgtgcccaacagctggacccaggacaatggctgcaccctgtgtgaatttgacacagtggacctgtctgctgtggatgtgcaccccaacgtgtccattggagtcttcatcgagcagcccacccccttcctgccccgcttcctggacatcctgctgaccctggactaccccaaggaggccctgaagctgttcatccacaacaaggaggtgtaccacgagaaggacatcaaggtgttctttgacaaggccaagcatgagatcaagaccatcaagatcgtgggccctgaggagaacctgagccaggccgaggccaggaacatgggcatggacttctgccggcaggatgagaagtgtgactactacttctctgtggatgctgatgtggtgctgaccaaccccaggaccctgaagatcctgattgagcagaacaggaagatcatcgcccccctggtgaccaggcatggcaagctgtggagcaacttctggggcgccctgagcccagatggctactatgcccggtctgaggactatgtggacatcgtgcagggcaacagagtgggcgtgtggaatgtgccctacatggccaacgtgtacctgatcaagggcaagaccctgcggtctgagatgaatgaaagaaactactttgtgcgggacaagctggaccctgacatggccctgtgcagaaatgcccgggagatgaccctgcagcgggagaaggacagccccaccccagagaccttccagatgctgagcccccccaagggcgtcttcatgtacatcagcaacagacatgaatttggccgcctgctgagcacagccaactacaacaccagccactacaacaatgacctgtggcagatctttgagaaccctgtggactggaaggagaagtacatcaacagagactacagcaagatcttcacagagaacatcgtggagcagccctgcccagatgtgttctggttccccatcttcagcgagaaggcctgtgatgagctggtggaggagatggagcactacggcaagtggagcggcggcaagcaccacgacagccgcatcagcggcggctatgaaaatgtgcccacagatgacatccacatgaagcaggtggacctggagaatgtgtggctgcacttcatccgggagttcatcgcccctgtgaccctgaaggtgtttgctggctactacaccaagggctttgccctgctgaactttgtggtgaagtacagccctgagcggcagaggagcctgcggccccaccatgatgccagcaccttcaccatcaacatcgccctgaacaacgtgggggaggacttccagggcggcggctgcaagttcctgcgctacaactgcagcattgagagccccaggaagggctggagcttcatgcaccctggccgcctgacccacctgcacgagggcctgcctgtgaagaatggcacccgctacatcgctgtgtccttcatcgacccctag

SEQ ID NO: 257403 - DNA, 2112 bp, Artificial Sequence
  derived and/or modified sequence
atgcagagcgccaagtacttcaactacacagtgaaggtgctgggccagggcgaggagtggagaggaggagatggcatcaacagcattggaggcggccagaaggtgcggctgatgaaggaggtgatggagcactacgccgaccaggatgacctggtggtgatgttcacagaatgttttgatgtgatctttgctgggggccctgaggaggtgctgaagaagttccagaaggccaaccacaaggtggtgtttgctgctgatggcatcctgtggccagacaagaggctggccgacaagtaccctgtggtgcacatcggcaagcgctacctgaacagcggcggcttcatcggctacgccccctacgtgaaccgcatcgtgcagcagtggaacctgcaggacaatgatgatgaccagctgttctacaccaaggtgtacatcgaccccctgaagcgggaggccatcaacatcaccctggaccacaagtgcaagatcttccagaccctgaatggagctgtggatgaggtggtgctgaagtttgaaaatggcaaggcccgggccaagaacaccttctatgagaccctgcctgtggccatcaatggaaatggccccaccaagatcctgctgaactacttcggcaactacgtgcccaacagctggacccaggacaatggctgcaccctgtgtgaatttgacacagtggacctgtctgctgtggatgtgcaccccaacgtgtccattggagtcttcatcgagcagcccacccccttcctgccccgcttcctggacatcctgctgaccctggactaccccaaggaggccctgaagctgttcatccacaacaaggaggtgtaccacgagaaggacatcaaggtgttctttgacaaggccaagcatgagatcaagaccatcaagatcgtgggccctgaggagaacctgagccaggccgaggccaggaacatgggcatggacttctgccggcaggatgagaagtgtgactactacttctctgtggatgctgatgtggtgctgaccaaccccaggaccctgaagatcctgattgagcagaacaggaagatcatcgcccccctggtgaccaggcatggcaagctgtggagcaacttctggggcgccctgagcccagatggctactatgcccggagtgaagattatgtggacatcgtgcagggcaacagagtgggcgtgtggaatgtgccctacatggccaacgtgtacctgatcaagggcaagaccctgcggtctgagatgaatgaaagaaactactttgtgcgggacaagctggaccctgacatggccctgtgcagaaatgcccgggagatgaccctgcagcgggagaaggacagccccaccccagagaccttccagatgctgagcccccccaagggcgtcttcatgtacatcagcaacagacatgaatttggccgcctgctgagcacagccaactacaacaccagccactacaacaatgacctgtggcagatctttgaaaatcctgtggactggaaggagaagtacatcaacagagactacagcaagatcttcacagaaaatattgtggagcagccctgcccagatgtgttctggttccccatcttcagcgagaaggcctgtgatgagctggtggaggagatggagcactacggcaagtggagcggcggcaagcaccacgacagccgcatcagcggcggctatgaaaatgtgcccacagatgacatccacatgaagcaggtggacctggagaatgtgtggctgcacttcatccgggagttcatcgcccctgtgaccctgaaggtgtttgctggctactacaccaagggctttgccctgctgaactttgtggtgaagtacagccctgagcggcagaggagcctgcggccccaccatgatgccagcaccttcaccatcaacatcgccctgaacaacgtgggggaggacttccagggcggcggctgcaagttcctgcgctacaactgcagcattgagagccccaggaagggctggagcttcatgcaccctggccgcctgacccacctgcacgagggcctgcctgtgaagaatggcacccgctacatcgctgtgtccttcatcgacccctag

SEQ ID NO: 257404 - DNA, 2277 bp, Artificial Sequence
  derived and/or modified sequence
atgggcggctgcaccgtgaagccccagctgctgctgctggccctggttctgcacccgtggaacccatgcctgggcgccgacagtgagaagcccagtagcatcccgacagataagctgctggtcatcactgttgccacaaaggaatcagatgggtttcaccggtttatgcagtctgccaagtactttaattatacagtcaaggttctggggcaaggtgaggagtggaggggcggcgacggcatcaacagcatcggcggcgggcagaaggtgcgcctaatgaaggaggtcatggagcactacgcggaccaggacgacctggtggttatgttcactgagtgtttcgacgtgattttcgccgggggacctgaggaagtgctcaaaaagtttcagaaggcaaatcacaaggtcgtgttcgccgccgatggcatcctctggcctgacaaacggctggccgacaagtatcccgtggtgcacatagggaaacgatacctgaactctggggggtttatcggttacgcaccatatgtaaaccggatcgtccaacaatggaatctgcaagacaatgatgatgatcaattattctacaccaaagtttacattgaccccctgaaaagagaggcgattaacatcaccctcgatcacaaatgcaagatatttcagacacttaacggtgcagtggatgaggtggtgctgaaatttgagaacggcaaagccagggccaaaaacacattctacgagactttaccagtggctatcaatggtaatggcccaacgaagatccttctaaactactttggcaactatgtgcctaattcatggacacaggacaacggctgcaccctttgcgagtttgatacagttgacttgagcgcagtggacgtccaccctaatgtgagcatcggagtgtttattgagcaacctaccccctttctgccaagattcctagatattctgctcacactggactaccctaaggaagccctgaagttgttcattcacaataaagaggtgtatcacgagaaggacatcaaagtcttctttgataaagcaaaacacgagatcaaaacgatcaaaattgttggcccagaggaaaacctctcccaagccgaagcaagaaacatgggaatggacttctgccgacaagatgaaaaatgcgactactatttctccgtggatgctgacgtagttctaacaaatccaaggacactgaaaatacttattgaacagaatcgtaagattatcgctcccctggttacgagacacggaaagttatggtcaaacttctggggagcactgtcccctgatggctactacgcgagatccgaggattatgtcgatatcgttcagggcaatagagttggcgtttggaacgtgccttacatggcaaacgtctatctcatcaaggggaagactctacgcagcgaaatgaacgagagaaattacttcgtgagggacaagctggaccccgatatggccttatgtcggaacgccagagagatgacacttcagcgggagaaggattcgcccacacccgagacttttcaaatgctgagccccccgaagggggtgttcatgtatatttcaaaccgccatgaattcggacggctcctatccacggccaattacaacacctctcactacaacaatgatctgtggcagatcttcgagaaccctgtggactggaaggagaaatatattaatagggactactcgaagatttttaccgagaacatagtcgaacagccctgcccagacgttttctggtttcccatcttttcagagaaggcatgtgacgagctcgtggaggagatggaacattacgggaaatggagtgggggcaagcaccatgattcccgcatttcgggcggctacgagaacgttccaaccgacgacattcacatgaagcaggtggatctagagaacgtatggctacattttatccgggaattcatcgcacccgtgacgctgaaagtgtttgcaggatattacaccaagggttttgccttattaaacttcgttgttaaatactcccctgaacggcagcgttctctgaggccccatcacgacgcatctacatttaccataaatatagccctgaacaatgtgggggaagacttccaggggggtggatgcaaattcctgcgctacaactgtagcattgagtctccacgaaagggctggtcattcatgcatcccgggagactgacgcacctgcacgaggggctgcccgtaaaaaatggcacaagatatattgcggtgtcctttatcgacccctag

SEQ ID NO: 257405 - DNA, 2112 bp, Artificial Sequence
  derived and/or modified sequence
atgcagagcgccaagtacttcaactacaccgtgaaggtgctgggccagggcgaagagtggaggggtggagacggtattaattcaataggcggtgggcagaaggttcgattgatgaaggaagtgatggagcactatgccgaccaggacgatctcgtagttatgttcactgagtgctttgacgtgatcttcgccggaggcccggaagaggtgctcaaaaagttccagaaggcgaaccacaaggtggtcttcgctgccgatggaatcttgtggccagacaagcgcttagcagacaaatacccagtggtgcacatagggaagaggtatctcaattcaggtgggtttatcggctacgctccctatgtcaataggatcgtgcagcagtggaatctgcaggataacgacgacgatcaactattttacaccaaagtttacatcgatcccctgaagagagaagccattaatataaccctggatcacaaatgtaagatattccagaccctgaatggcgccgtcgacgaggtagtgctgaagtttgaaaacggcaaagcacgtgcaaagaataccttttatgagaccctcccagtggccatcaatggcaacggtcccaccaaaattttgctgaactattttggcaattatgtgccaaattcttggacccaggacaatggatgtaccctttgcgagttcgacaccgtggatctgagcgccgttgatgtgcatcccaatgtgagtattggtgtgttcatcgaacaaccaacacccttcctgccccgcttcctggacattctattgactcttgactaccccaaagaagccttgaaactattcattcacaataaagaggtgtaccatgaaaaggatattaaagtgttttttgataaggccaaacacgagattaaaactatcaaaatagtgggccctgaagaaaatctgagtcaggccgaagcccggaacatgggtatggatttttgtcggcaagacgagaaatgtgactactatttctctgtggacgcagatgtggtccttaccaatcctagaaccctcaagattcttatagaacagaataggaaaattatagctcccctggtaacacgacacggtaagctctggtcaaacttttggggggcactctctccggatgggtattacgctcgttctgaagactatgtagacattgtccagggcaacagggtgggagtctggaacgtgccatacatggcgaacgtctacctcattaaaggcaagaccctgcggagcgaaatgaacgagcggaattactttgtgagggataagctggacccggacatggcactttgcagaaatgccagggagatgacactacaacgcgagaaagactctcctactcccgagacatttcagatgctgagtccaccgaagggagtctttatgtatataagtaatcgccacgagtttggcagattactcagcaccgccaattataacacttcccattataataatgatctctggcagatcttcgagaatccagtcgattggaaagaaaaatatattaatcgggactactcaaaaatatttacagagaatatagtggaacagccatgtcccgacgtgttctggttccccattttcagcgaaaaggcctgcgatgagttggtggaggagatggagcattacgggaagtggtccggagggaaacaccacgattcccggattagcggcggatatgagaacgtaccaactgacgatatccatatgaagcaagtcgacctggaaaacgtctggttacacttcatccgcgagttcatcgcgcccgtgaccctgaaggtgttcgccggctactacacaaaaggatttgctctgttgaattttgtcgtgaagtacagcccagagaggcagcgatcactgagaccacaccatgatgccagtactttcactataaacatagccctgaacaacgtgggagaggacttccaaggcggtgggtgtaaattcctccgctacaactgctcaatcgagtcaccccggaaaggctggtcattcatgcacccaggcagattaacccacctgcacgagggcctgccagttaagaacggcactcggtacatcgctgtgagctttatagatccctag

SEQ ID NO: 257406 - DNA, 2277 bp, Artificial Sequence
  derived and/or modified sequence
atggggggatgtacagtgaagccccagctactcctgctggcccttgtcctacatccttggaatccgtgccttggcgcagacagtgagaagccaagttccataccgactgataagttacttgtgattactgtcgcaactaaagagagcgacgggtttcacagattcatgcagtctgccaagtactttaattataccgtgaaagtgttaggccagggagaagagtggagagggggtgacgggataaatagtatcggaggcggtcagaaggtacgcctgatgaaagaagtcatggagcactatgcggatcaggacgatctggtggttatgttcacagagtgtttcgacgtgattttcgccggtgggcctgaggaagtcctgaaaaagttccagaaagccaatcacaaggttgtctttgctgcagacggaatcctctggcctgataagcggctggctgataagtacccagttgtccatatcggcaaaagatacctcaactctggtggatttattggatatgcaccatacgtgaatcgcatagtgcaacaatggaatctccaggataacgacgacgatcagcttttctacaccaaggtttatatcgatccactgaagagagaggctatcaatatcaccctggaccacaaatgtaagatcttccagaccctcaacggtgcagtggatgaagtcgtgttgaagtttgagaacggtaaagctcgcgcaaaaaatacgttctacgaaaccctgcctgtagccattaatggcaacggacccactaagatactgctaaattactttggcaattacgtacccaatagctggactcaggacaatggctgcacactttgtgaatttgacacagttgatctgtcagcggtcgacgtccatccaaacgtgtctattggcgtgtttatagaacagcctactccatttttaccaagattcctggacattctcctgacgctggattaccccaaggaagccctaaagcttttcatacataacaaggaagtgtaccacgaaaaagacatcaaagtgttctttgataaggccaaacacgagattaagacaatcaagatagtgggacctgaagaaaatctatctcaggcagaagctcgaaacatggggatggatttttgtaggcaagacgagaagtgcgactactacttttccgttgatgccgacgttgtactgactaaccctcgaacattgaaaatcctcattgagcagaatcgcaagatcatagctccgttggtcaccaggcacggaaagctctggagcaacttctggggtgctctctcaccagatgggtactacgccaggtctgaagactacgtggacatcgtccaaggtaaccgggtgggggtgtggaacgtcccttacatggcaaatgtgtatctcattaagggcaagactcttcggtcagagatgaatgaaaggaactactttgtacgggataaacttgaccctgatatggctctttgtcgtaacgcccgagaaatgaccttgcaaagagaaaaggatagcccaacaccagagaccttccagatgctctctccgcctaaaggagtctttatgtacataagcaacagacatgagtttgggaggctgctctcaacagccaattacaacaccagtcactacaataatgacttgtggcagatctttgaaaatccggtcgactggaaggagaaatacataaaccgcgactacagcaaaatctttactgaaaatattgtggagcagccttgccctgacgtcttttggtttccgattttttccgaaaaagcttgtgatgagctcgtcgaagagatggaacattacggcaaatggtccggcggaaagcaccatgactcaaggatttccggcggatacgaaaacgtcccgacagatgacatccacatgaaacaggttgacctcgagaatgtgtggctacactttattcgagaattcattgcaccagttaccctgaaggttttcgcgggttactataccaagggcttcgcactccttaacttcgttgtcaagtactctcccgagaggcagcggtctctgcggccacaccatgatgcaagcactttcactattaatatagcactcaacaacgtcggagaggacttccagggcggaggatgtaagttcctgcggtataattgctccattgagtccccgcgtaaagggtggagttttatgcaccctggcagactgacacatctccatgaaggattgcctgttaagaatggcactcgctacattgccgtttccttcattgatccttag

SEQ ID NO: 257407 - DNA, 2112 bp, Artificial Sequence
  derived and/or modified sequence
atgcaaagcgctaagtactttaattatacggtcaaagtgctgggacaaggcgaggaatggcggggtggggatggcattaattctatcggagggggacagaaagtacgactgatgaaagaggtgatggaacactacgctgaccaggacgacctcgtagtcatgtttacggagtgctttgatgtgatctttgccggtggcccagaagaagtgctcaagaagttccaaaaagccaaccacaaagttgtgtttgccgcagacggaattctgtggccagacaagcgtttggcagacaagtatcctgtggttcacattggcaagagataccttaattccggagggttcatcggctacgctccttacgtcaacagaatcgtgcaacagtggaatctgcaagacaatgacgacgaccaactgttttacacaaaggtttacatcgaccctctgaagagggaggcaattaatattaccttggatcacaaatgtaagatcttccagacactgaacggggctgtggacgaggtcgtgctgaagttcgagaacggcaaagcgagggcaaagaataccttctacgagacgctgccggttgcaattaacggtaacgggccaaccaagatattgctcaactacttcggaaattacgtcccgaattcctggacccaggacaatggctgtactctctgcgaattcgatactgtagatctgagcgctgtggacgtgcacccaaacgtgagtattggagtcttcatcgaacagccgacccccttcttacctcggtttctcgacattcttttgactctggactaccccaaagaggctttgaaactgtttatacacaataaggaagtgtaccacgagaaagatattaaggtgtttttcgacaaagcgaagcacgaaatcaagactatcaagattgtgggccctgaggagaacctgagccaggcagaagcacggaacatgggcatggacttctgccgacaggacgaaaaatgcgactattacttctccgtcgacgccgatgttgtcctaacaaaccctcgtacactcaaaattctgatcgagcagaatcggaaaataatagcacctctcgtgactaggcatggcaaactttggtccaacttctggggcgcactaagtcccgacggttattacgcacggagtgaggactatgttgatatagtgcagggcaaccgagttggcgtatggaatgtcccctacatggctaacgtgtacctgattaagggcaaaaccctgaggtctgaaatgaacgagcgtaattacttcgtccgcgataaactggacccagatatggccttgtgcaggaacgctagagagatgactcttcagcgagaaaaggattcacctacacccgagacgttccagatgttgtcacctccaaagggtgtgttcatgtacatctcaaacaggcatgaattcgggcgacttctctcgacagccaactataatacatcacactacaacaatgatctatggcagatcttcgagaatcctgtggactggaaggagaaatacattaatcgtgactactccaaaatctttacggagaatatcgtcgaacagccctgcccagacgttttctggttccctatttttagcgagaaagcctgtgacgagctggtcgaggagatggaacactatggaaagtggagcggcggtaaacaccatgattctagaatctcggggggttacgaaaatgtccctacggacgacatccatatgaagcaggtggatcttgagaacgtgtggttgcatttcatacgggaatttatcgcacccgtgaccttgaaggtgtttgcagggtactacacgaagggctttgccttgctgaacttcgtcgttaaatactcccctgagaggcagaggtcgctgagaccccatcacgatgccagcaccttcaccatcaacatcgccctgaacaacgtgggggaggattttcaaggcggaggctgcaagtttctgcgatacaattgttctattgagagccctaggaagggatggtcttttatgcaccctgggaggttgactcatctccatgagggcctgccggtgaagaacggcacacggtatatcgctgtttccttcattgatccttag

SEQ ID NO: 257408 - DNA, 3732 bp, Artificial Sequence
  derived and/or modified sequence
ccgacgacctcactcagctgcgttacgcgccgctccggctgccggccgcgcgccttgcccgccggctcccgcccgcaatcggcggctcagggcggacccgggtctctgcgttctcgcgagaagcgcggcgctgcggggccgtgggcgcctgagcccgcgcggccctcgagggccgaatatggggggatgcacggtgaagcctcagctgctgctcctggcgctcgtcctccacccctggaatccctgtctgggtgcggactcggagaagccctcgagcatccccacagataaattattagtcataactgtagcaacaaaagaaagtgatggattccatcgatttatgcagtcagccaaatatttcaattatactgtgaaggtccttggtcaaggagaagaatggagaggtggtgatggaattaatagtattggagggggccagaaagtgagattaatgaaagaagtcatggaacactatgctgatcaagatgatctggttgtcatgtttactgaatgctttgatgtcatatttgctggtggtccagaagaagttctaaaaaaattccaaaaggcaaaccacaaagtggtctttgcagcagatggaattttgtggccagataaaagactagcagacaagtatcctgttgtgcacattgggaaacgctatctgaattcaggaggatttattggctatgctccatatgtcaaccgtatagttcaacaatggaatctccaggataatgatgatgatcagctcttttacactaaagtttacattgatccactgaaaagggaagctattaacatcacattggatcacaaatgcaaaattttccagaccttaaatggagctgtagatgaagttgttttaaaatttgaaaatggcaaagccagagctaagaatacattttatgaaacattaccagtggcaattaatggaaatggacccaccaagattctcctgaattattttggaaactatgtacccaattcatggacacaggataatggctgcactctttgtgaattcgatacagtcgacttgtctgcagtagatgtccatccaaacgtatcaataggtgtttttattgagcaaccaaccccttttctacctcggtttctggacatattgttgacactggattacccaaaagaagcacttaaactttttattcataacaaagaagtttatcatgaaaaggacatcaaggtattttttgataaagctaagcatgaaatcaaaactataaaaatagtaggaccagaagaaaatctaagtcaagcggaagccagaaacatgggaatggacttttgccgtcaggatgaaaagtgtgattattactttagtgtggatgcagatgttgttttgacaaatccaaggactttaaaaattttgattgaacaaaacagaaagatcattgctcctcttgtaactcgtcatggaaagctgtggtccaatttctggggagcattgagtcctgatggatactatgcacgatctgaagattatgtggatattgttcaagggaatagagtaggagtatggaatgtcccatatatggctaatgtgtacttaattaaaggaaagacactccgatcagagatgaatgaaaggaactattttgttcgtgataaactggatcctgatatggctctttgccgaaatgctagagaaatgactttacaaagggaaaaagactcccctactccggaaacattccaaatgctcagccccccaaagggtgtatttatgtacatttctaatagacatgaatttggaaggctattatccactgctaattacaatacttcccattataacaatgacctctggcagatttttgaaaatcctgtggactggaaggaaaagtatataaaccgtgattattcaaagattttcactgaaaatatagttgaacagccctgtccagatgtcttttggttccccatattttctgaaaaagcctgtgatgaattggtagaagaaatggaacattacggcaaatggtctgggggaaaacatcatgatagccgtatatctggtggttatgaaaatgtcccaactgatgatatccacatgaagcaagttgatctggagaatgtatggcttcattttatccgggagttcattgcaccagttacactgaaggtctttgcaggctattatacgaagggatttgcactactgaattttgtagtaaaatactcccctgaacgacagcgttctcttcgtcctcatcatgatgcttctacatttaccataaacattgcacttaataacgtgggagaagactttcagggaggtggttgcaaatttctaaggtacaattgctctattgagtcaccacgaaaaggctggagcttcatgcatcctgggagactcacacatttgcatgaaggacttcctgttaaaaatggaacaagatacattgcagtgtcatttatagatccctaagttatttacttttcattgaattgaaatttattttggatgaatgactggcatgaacacgtctttgaagttgtggctgagaagatgagaggaatatttaaataacatcaacagaacaacttcactttgggccaaacatttgaaaaactttttataaaaaattgtttgatatttcttaatgtctgctctgagccttaaaacacagattgaagaagaaaagaaagaaaaaacttaaatatttatttctatgctttgttgcctctgagaataatgacaatttatgaatttgtgtttcaaattgataaaatatttaggtacaaataacaagactaataatattttcttatttaaaaaaagcatgggaagatttttatttatcaaaatatagaggaaatgtagacaaaatggatataaatgaaaattaccatgttgtaaaaccttgaaaatcagattctaactggatttgtatgcaactaagtatttttctgaacacctatgcaggtcttatttacagtagttactaagggaacacacaaagaattacacaacgttttcctcaagaaaatggtacaaaacacaaccgaggagcgtatacagttgaaaacatttttgttttgattggaaggcagattattttatattagtattaaaaatcaaaccctatgtttctttcagatgaatcttccaaagtggattatattaagcaggtattagatttaggaaaacctttccatttcttaaagtattatcaagtgtcaagatcagcaagtgtccttaagtcaaacaggttttttttgttgttgtttttgctttgtttccttttttagaaagttctagaaaataggaaaacgaaaaatttcattgagatgagtagtgcatttaattattttttaaaaaactttttaagtacttgaattttatatcaggaaaacaaagttgttgagccttgcttcttccgttttgccctttgtctcgctccttattctttttttggggggagggttatttgcttttttatcttcctggcataatttccattttattcttctgagtgtctatgttaacttccctctatcccgcttataaaaaaattctccaacaaaaatacttgttgacttgatgttttatcacttctctaagtaaggttgaaatatccttattgtagctactgtttttaatgtaaaggttaaacttgaaaagaaattcttaatcacggtgccaaaattcattttctaacaccatgtgttagaaaattataaaaaataaaataattttagaaa

SEQ ID NO: 257409 - DNA, 2908 bp, Artificial Sequence
  derived and/or modified sequence
aatatggggggatgcacggtgaagcctcagctgctgctcctggcgctcgtcctccacccctggaatccctgtctgggtgcggactcggagaagccctcgagcatccccacaggtgagcaccccgcggtccgccgctgtcccgcgaggctcggccggcgggggggcagttcattcatccaccagcccttccgcggggctggccagataaattattagtcataactgtagcaacaaaagaaagtgatggattccatcgatttatgcagtcagccaaatatttcaattatactgtgaaggtccttggtcaaggagaagaatggagaggtggtgatggaattaatagtattggagggggccagaaagtgagattaatgaaagaagtcatggaacactatgctgatcaagatgatctggttgtcatgtttactgaatgctttgatgtcatatttgctggtggtccagaagaagttctaaaaaaattccaaaaggcaaaccacaaagtggtctttgcagcagatggaattttgtggccagataaaagactagcagacaagtatcctgttgtgcacattgggaaacgctatctgaattcaggaggatttattggctatgctccatatgtcaaccgtatagttcaacaatggaatctccaggataatgatgatgatcagctcttttacactaaagtttacattgatccactgaaaagggaagctattaacatcacattggatcacaaatgcaaaattttccagaccttaaatggagctgtagatgaagttgttttaaaatttgaaaatggcaaagccagagctaagaatacattttatgaaacattaccagtggcaattaatggaaatggacccaccaagattctcctgaattattttggaaactatgtacccaattcatggacacaggataatggctgcactctttgtgaattcgatacagtcgacttgtctgcagtagatgtccatccaaacgtatcaataggtgtttttattgagcaaccaaccccttttctacctcggtttctggacatattgttgacactggattacccaaaagaagcacttaaactttttattcataacaaagaagtttatcatgaaaaggacatcaaggtattttttgataaagctaagcatgaaatcaaaactataaaaatagtaggaccagaagaaaatctaagtcaagcggaagccagaaacatgggaatggacttttgccgtcaggatgaaaagtgtgattattactttagtgtggatgcagatgttgttttgacaaatccaaggactttaaaaattttgattgaacaaaacagaaagatcattgctcctcttgtaactcgtcatggaaagctgtggtccaatttctggggagcattgagtcctgatggatactatgcacgatctgaagattatgtggatattgttcaagggaatagagtaggagtatggaatgtcccatatatggctaatgtgtacttaattaaaggaaagacactccgatcagagatgaatgaaaggaactattttgttcgtgataaactggatcctgatatggctctttgccgaaatgctagagaaatgactttacaaagggaaaaagactcccctactccggaaacattccaaatgctcagccccccaaagggtgtatttatgtacatttctaatagacatgaatttggaaggctattatccactgctaattacaatacttcccattataacaatgacctctggcagatttttgaaaatcctgtggactggaaggaaaagtatataaaccgtgattattcaaagattttcactgaaaatatagttgaacagccctgtccagatgtcttttggttccccatattttctgaaaaagcctgtgatgaattggtagaagaaatggaacattacggcaaatggtctgggggaaaacatcatgatagccgtatatctggtggttatgaaaatgtcccaactgatgatatccacatgaagcaagttgatctggagaatgtatggcttcattttatccgggagttcattgcaccagttacactgaaggtctttgcaggctattatacgaagggatttgcactactgaattttgtagtaaaatactcccctgaacgacagcgttctcttcgtcctcatcatgatgcttctacatttaccataaacattgcacttaataacgtgggagaagactttcagggaggtggttgcaaatttctaaggtacaattgctctattgagtcaccacgaaaaggctggagcttcatgcatcctgggagactcacacatttgcatgaaggacttcctgttaaaaatggaacaagatacattgcagtgtcatttatagatccctaagttatttacttttcattgaattgaaatttattttggatgaatgactggcatgaacacgtctttgaagttgtggctgagaagatgagaggaatatttaaataacatcaacagaacaacttcactttgggccaaacatttgaaaaactttttataaaaaattgtttgatatttcttaatgtctgctctgagccttaaaacacagattgaagaagaaaagaaagaaaaaacttaaatatttatttctatgctttgttgcctctgagaataatgacaatttatgaatttgtgtttcaaattgataaaatatttaggtacaaataacaagactaataatattttcttatttaaaaaaagcatgggaagatttttatttatcaaaatatagaggaaatgtagacaaaatggatataaatgaaaattaccatgttgtaaaaccttgaaaatcagattctaactggatttgtatgcaactaagtatttttctgaacacctatgcaggtcttatttacagtagttactaagggaacacacaaaga

SEQ ID NO: 257410 - DNA, 2277 bp, Artificial Sequence
  derived and/or modified sequence
atgggcggctgcaccgtaaaaccccaacttcttctgctcgcactggtgcttcacccctggaacccttgcctgggcgccgacagcgaaaagccttcaagcattcctaccgataagctcctggtgatcaccgtggcaactaaagaatcagacggcttccataggttcatgcagtcagctaagtattttaactacactgtcaaagtcctagggcagggagaagagtggcggggaggagacggaataaacagcattggggggggacaaaaagtcaggctcatgaaggaggtgatggaacactacgccgatcaagacgacctggtggtgatgtttacagagtgttttgatgtgatttttgctggtggcccagaagaggttttaaagaagttccagaaagcgaatcacaaagttgtgttcgcagctgatggtatcctgtggccagacaaacgactcgccgataagtatcctgtcgtgcatataggaaagcgctacctcaattccggcgggttcatcggctacgctccctacgtgaacaggatagtgcagcaatggaacctccaagataacgatgacgaccagctattttatacaaaagtttacatagaccctttgaagcgcgaggcaataaacataacgctggatcacaagtgtaaaatcttccagacactcaacggagccgtagatgaagttgtcctgaaatttgaaaatggaaaagctagagctaaaaatactttctacgaaacactgcccgtggccatcaacggtaatggcccaactaaaatattgttgaactattttgggaattatgtgcctaattcctggacacaagataacgggtgcacactctgcgaattcgacaccgtggatttgtccgccgttgatgtgcaccctaatgtgagtatcggggttttcattgagcagcctacaccatttctccccagattccttgatatcctgctaacgctggactatcccaaagaagccttaaagctctttatccataacaaggaggtctaccatgagaaggacatcaaggtgttcttcgacaaggccaaacatgagattaaaacaattaagattgtgggccccgaggagaatctgtcgcaggccgaagcccgaaatatgggcatggatttttgccgacaggacgagaaatgcgattattattttagtgtggacgcagacgtagtcctcaccaatccacgcaccctgaagatattaatcgagcagaatcggaaaatcattgcgcccctggtcactcgacatggaaagctgtggagcaatttctggggtgcactctctcctgacggctactacgccaggtccgaagattacgttgacatcgtgcaggggaaccgcgtcggagtgtggaacgtgccctacatggcaaatgtctatctaatcaagggcaaaaccctccgaagtgaaatgaatgaaagaaattactttgttagggataaactggaccctgacatggccctgtgtagaaacgctagggagatgacactacaaagagaaaaagacagtccgactccagagacgttccagatgctgagcccaccgaagggagtgttcatgtacatctctaataggcacgagtttggacggctcctgagtacagccaattacaacaccagtcattataacaacgatctgtggcagattttcgagaatccagtggactggaaggagaaatatatcaaccgtgactacagtaagatctttaccgaaaacatcgtcgagcaaccctgccctgatgtgttctggttccccatattctccgaaaaggcctgcgacgagctagtggaagaaatggagcactacggcaaatggagcggcgggaaacaccatgacagtaggattagtggaggttacgagaatgttccaactgacgatatacatatgaaacaagtcgacctcgaaaacgtttggctgcattttattcgggagttcatcgcccctgtcacccttaaggttttcgcaggctattatacaaaagggtttgctctgctaaactttgtcgtcaagtactcaccagagagacaacgaagcttgaggccacatcacgacgcgagcacattcactatcaacatcgccctgaataatgtcggcgaagatttccaaggcggggggtgcaagtttctccggtacaattgtagcatcgaatctccaagaaaaggctggtcttttatgcatcccggcaggctcacccacctccacgaaggactgccagtgaaaaatggaacacggtacatcgccgtgtcatttattgacccctag

SEQ ID NO: 257411 - DNA, 2112 bp, Artificial Sequence
  derived and/or modified sequence
atgcagtctgccaaatactttaattacactgtcaaggtccttggacagggggaggaatggcgcggcggggacgggattaacagcattggaggaggccagaaagtgagattaatgaaggaggtgatggagcattatgcagatcaagatgatttggtagtcatgttcacagagtgtttcgatgtgatcttcgcaggcggacctgaagaggtcctaaaaaagtttcagaaggctaaccacaaggtagtttttgctgccgatggcattttatggccagataagcgcctcgccgataaatatcccgtggttcacattggaaaacggtatctcaactccggtggcttcatcggctatgctccttacgtgaacagaattgttcagcaatggaacctacaggataatgacgacgaccagttgttttacaccaaagtgtacattgatcctcttaaaagagaggccatcaacatcacgttagaccacaaatgtaaaatttttcaaactttgaatggagcagttgacgaggtcgttctgaagtttgaaaatggtaaagccagggcaaagaacaccttttatgagacacttccagtcgccattaacgggaatggacctaccaaaattttactgaattatttcggcaactacgtccccaactcatggacgcaagacaacggttgcacgctctgtgaatttgataccgtggacctcagcgctgtcgatgtgcacccaaacgtcagcatcggtgtgttcatagaacaacccacccctttcttgccaagattcctggacatcctactgacactcgattaccccaaagaagcattgaagctcttcatacacaacaaagaggtataccatgaaaaggatattaaggtgtttttcgataaggctaaacacgagatcaaaacaattaaaatcgtcggccccgaggagaatctgtcacaggccgaggcacgaaatatgggcatggacttttgtagacaggatgagaagtgcgactactactttagtgtggatgcagacgttgtcctcaccaacccaagaaccctgaagatcttaatagagcagaataggaaaattattgccccactagtgacaagacacggcaaactgtggagtaatttctggggggccctctcgcctgacggctattatgccaggtccgaagactatgttgatatagtccagggtaatcgagtgggcgtgtggaacgtcccctacatggctaatgtgtatctgatcaaagggaagacgctcaggagtgaaatgaatgaacgaaactacttcgttcgcgacaaactagatcccgatatggccttatgtagaaacgcccgagagatgacgctccagagggagaaagacagtccaaccccggagactttccagatgctgtccccgcccaagggcgtgtttatgtacatttctaacagacacgagtttggccggctactgtctacagctaactataatacgtctcactacaacaacgacttatggcagattttcgagaatccggtggactggaaagaaaaatatatcaatagggactatagtaagattttcactgaaaacattgtggagcagccgtgtccagacgtcttctggtttccaatattcagcgagaaggcctgtgatgagttggtggaagaaatggagcactacggtaaatggagcggggggaaacatcacgacagccggatcagcggtgggtacgaaaacgtgcccacagacgacatccacatgaagcaggtggacctggaaaatgtttggctccactttattagggagttcattgcacctgttaccctgaaggtgtttgcaggctactatacaaagggattcgccttactgaattttgtggttaagtactctcctgagcgccagaggtctttgcggccacaccatgacgcatctacttttactatcaatattgcacttaataatgtcggcgaggattttcagggaggcggatgcaagtttcttcgatacaactgttctatcgaaagccccaggaaaggatggtcctttatgcacccagggagactgacacatcttcacgaagggttgcctgtgaagaatggaacaagatatatcgctgtgagcttcatcgatccttag

SEQ ID NO: 257412 - DNA, 2277 bp, Artificial Sequence
  derived and/or modified sequence
atgggaggctgtacggttaaaccccaactgctgctattagccttagtccttcatccctggaacccatgtctgggcgcagactccgagaagccctcttctattccaaccgacaaactgctcgtcattacagttgccactaaagagagcgatgggtttcacaggttcatgcagagcgccaagtatttcaactacacggtgaaggtgttgggtcaaggggaagaatggagagggggagacggaataaacagcataggcggtgggcagaaggtcagactaatgaaagaagtcatggagcactacgccgatcaagacgatttagtagtgatgttcacagaatgcttcgacgtgatattcgccggaggcccagaggaggtgctaaaaaagttccagaaagcaaaccataaggtcgtcttcgctgctgacggtattttgtggcccgataagcggttggctgataaatatcctgtggtccatattggtaagcggtacttaaactccggtggctttatcggctacgctccatacgtgaaccgaattgtacagcagtggaatctgcaggacaacgacgatgatcagctgttctataccaaagtctacattgaccctctgaagagagaagctataaatatcacactggaccacaaatgcaagatttttcagacccttaacggggccgttgatgaagtagtgttgaagtttgaaaacgggaaagctcgcgccaaaaacactttttatgaaacactgcctgtggcgatcaatggaaatggacccactaagatcctcttgaactacttcggaaattacgtgcctaacagctggacacaggacaatggttgcaccttatgcgagtttgatactgtcgacctgagcgcggtggacgttcatcccaatgtgagtattggtgttttcatagaacagcctacgccattccttccacggtttctagacatcctgctgactctggattaccccaaggaagctcttaaattgttcatccataataaggaggtatatcatgagaaagacatcaaggttttcttcgacaaggcaaagcatgaaatcaagacaattaagatagtgggacctgaagaaaatctctcccaagcagaagcgcgcaatatgggaatggacttctgcaggcaggacgaaaaatgcgactattatttctccgtggatgctgacgtggttttgacaaatccgagaaccttgaagatactcattgagcagaaccggaaaatcatagcccctttggtaacgagacatggcaaattgtggagcaatttttggggggccctcagtcccgatggttattatgctcgtagcgaggactacgtggatattgtccaagggaacagagtaggcgtgtggaacgtaccttacatggctaatgtgtacttaatcaaaggaaaaacattaagatccgaaatgaacgaaagaaattattttgtgcgagacaagctggaccccgatatggcactgtgcaggaatgcgagagagatgacactgcagagagagaaagattccccaacaccggagacattccagatgctcagccccccgaaaggagtatttatgtacatatctaaccggcacgaatttggaagattgctcagcaccgccaactacaatacatcccactacaataacgatctgtggcagattttcgagaaccctgtagactggaaagagaagtatataaacagagactattctaagatatttaccgaaaacatcgtggaacaaccttgccccgacgtgttttggttccccattttcagcgagaaggcctgcgatgagctggtggaagaaatggagcactacggcaaatggagcggcgggaaacaccatgacagtaggattagtggaggttacgagaatgttccaactgacgatatacatatgaaacaagtcgacctcgaaaacgtttggctgcattttattcgggagttcatcgcccctgtcacccttaaggttttcgcaggctattatacaaaagggtttgctctgctaaactttgtcgtcaagtactcaccagagagacaacgaagcttgaggccacatcacgacgcgagcacattcactatcaacatcgccctgaataacgtcggcgaggattttcagggaggagggtgcaagtttctaaggtacaactgctctattgaatccccccgcaaaggttggtcatttatgcaccccggcagacttactcacttacacgaagggctgcccgtcaagaatggaactaggtacattgcagtgagttttatcgatccgtag

SEQ ID NO: 257413 - DNA, 2112 bp, Artificial Sequence
  derived and/or modified sequence
atgcaatcagctaagtacttcaactatacagtcaaggtgctgggtcagggagaagagtggcgaggtggcgatggtatcaactccattgggggtgggcaaaaggtgcgattaatgaaagaggttatggagcactatgctgatcaggatgatttggtagtcatgtttacagaatgtttcgatgtgatttttgccggtggccccgaagaagttttgaaaaaatttcagaaggctaaccacaaggtcgtctttgctgcagacggaatcctgtggcccgataagagattagccgacaaatatccagtggtgcacatcggaaagcgatacctgaactccggcggcttcataggatacgccccctacgtgaacagaatcgtacaacagtggaacctgcaggataatgacgacgatcaactcttctataccaaagtgtatatcgacccattaaagagagaagctatcaacataacacttgaccacaagtgcaaaatttttcagacactgaacggcgcggtagatgaggtggttttgaagttcgagaacgggaaagcacgagctaagaacacattttacgagaccctgcctgtagctatcaacgggaatggacccaccaagattcttctgaactactttggcaactacgttcctaactcttggacccaggacaatggctgtactttatgtgagtttgatactgtggatcttagcgctgtagatgtgcaccctaacgtctcaatcggtgtgtttattgaacagccaaccccttttctgcccagattcctcgatattttgctcacccttgactatcctaaggaagccctcaagctgtttattcataacaaagaagtctatcacgagaaggatataaaggtattctttgataaagcaaagcacgagattaaaaccattaagatagtcggaccagaagaaaatctctcacaggctgaggcgcgtaatatgggtatggacttttgccggcaggacgaaaaatgcgattactatttttcagtcgacgctgatgttgtcctcacaaatccccggaccctaaagatcctcattgaacagaacaggaagataattgctcccctggtgaccagacacggaaaactctggagtaatttttggggggcacttagccccgacggatattatgcaaggagtgaagattatgtggacatcgtgcaaggaaaccgagtgggtgtgtggaatgtcccttatatggccaacgtttacctcatcaaaggtaagaccttgcgctcagagatgaatgagcgaaactacttcgtacgggataaactggatccggatatggccctgtgtagaaacgccagggaaatgacactgcagcgcgaaaaagatagtccaacaccagaaaccttccagatgctgagccctccaaaaggtgtgtttatgtatatttccaacaggcatgaattcggtcgcctcctatcaacagcgaattacaataccagccactacaacaacgacctatggcagatctttgagaatccggtcgattggaaggagaagtatatcaatcgagactatagcaagatttttacggaaaatattgtcgagcagccctgcccagacgtgttttggtttccaatcttttcagaaaaggcatgtgacgagttagtggaggaaatggaacattatggcaaatggtcaggcgggaagcatcatgactcaagaatttctggaggttacgagaacgtaccaactgacgacattcacatgaaacaagtggatctagaaaatgtgtggttacattttattagggaatttatagctcctgttaccctgaaggtgttcgccggttattacactaaaggatttgctctgctaaatttcgtggttaagtactctcccgaaaggcagcgatccctccgacctcaccacgatgccagtacatttacaataaacattgctcttaataatgttggggaggatttccaaggtggcggctgtaagtttttgcgttataactgctccatcgagtcacctcgcaaaggctggagtttcatgcaccccggtagactgacccacttgcacgaaggattgcccgttaaaaacggcactcgatatatcgccgtgtcctttatcgacccttag

SEQ ID NO: 257414 - DNA, 2277 bp, Artificial Sequence
  derived and/or modified sequence
atgggcggctgcaccgtgaagccccagctgctgctgctggccctggtgctgcacccctggaacccctgcctgggcgccgacagcgagaagcccagcagcatccccaccgacaagctgctggtgatcaccgtggccaccaaggagagcgacggcttccacagattcatgcagagcgccaagtacttcaactacaccgtgaaggtgctgggccagggcgaggagtggagaggcggcgacggcatcaacagcatcggcggcggccagaaggtgagactgatgaaggaggtgatggagcactacgccgaccaggacgacctggtggtgatgttcaccgagtgcttcgacgtgatcttcgccggcggccccgaggaggtgctgaagaagttccagaaggccaaccacaaggtggtgttcgccgccgacggcatcctgtggcccgacaagagactggccgacaagtaccccgtggtgcacatcggcaagagatacctgaacagcggcggcttcatcggctacgccccctacgtgaacagaatcgtgcagcagtggaacctgcaggacaacgacgacgaccagctgttctacaccaaggtgtacatcgaccccctgaagagagaggccatcaacatcaccctggaccacaagtgcaagatcttccagaccctgaacggcgccgtggacgaggtggtgctgaagttcgagaacggcaaggccagagccaagaacaccttctacgagaccctgcccgtggccatcaacggcaacggccccaccaagatcctgctgaactacttcggcaactacgtgcccaacagctggacccaggacaacggctgcaccctgtgcgagttcgacaccgtggacctgagcgccgtggacgtgcaccccaacgtgagcatcggcgtgttcatcgagcagcccacccccttcctgcccagattcctggacatcctgctgaccctggactaccccaaggaggccctgaagctgttcatccacaacaaggaggtgtaccacgagaaggacatcaaggtgttcttcgacaaggccaagcacgagatcaagaccatcaagatcgtgggccccgaggagaacctgagccaggccgaggccagaaacatgggcatggacttctgcagacaggacgagaagtgcgactactacttcagcgtggacgccgacgtggtgctgaccaaccccagaaccctgaagatcctgatcgagcagaacagaaagatcatcgcccccctggtgaccagacacggcaagctgtggagcaacttctggggcgccctgagccccgacggctactacgccagaagcgaggactacgtggacatcgtgcagggcaacagagtgggcgtgtggaacgtgccctacatggccaacgtgtacctgatcaagggcaagaccctgagaagcgagatgaacgagagaaactacttcgtgagagacaagctggaccccgacatggccctgtgcagaaacgccagagagatgaccctgcagagagagaaggacagccccacccccgagaccttccagatgctgagcccccccaagggcgtgttcatgtacatcagcaacagacacgagttcggcagactgctgagcaccgccaactacaacaccagccactacaacaacgacctgtggcagatcttcgagaaccccgtggactggaaggagaagtacatcaacagagactacagcaagatcttcaccgagaacatcgtggagcagccctgccccgacgtgttctggttccccatcttcagcgagaaggcctgcgacgagctggtggaggagatggagcactacggcaagtggagcggcggcaagcaccacgacagcagaatcagcggcggctacgagaacgtgcccaccgacgacatccacatgaagcaggtggacctggagaacgtgtggctgcacttcatcagagagttcatcgcccccgtgaccctgaaggtgttcgccggctactacaccaagggcttcgccctgctgaacttcgtggtgaagtacagccccgagagacagagaagcctgagaccccaccacgacgccagcaccttcaccatcaacatcgccctgaacaacgtgggcgaggacttccagggcggcggctgcaagttcctgagatacaactgcagcatcgagagccccagaaagggctggagcttcatgcaccccggcagactgacccacctgcacgagggcctgcccgtgaagaacggcaccagatacatcgccgtgagcttcatcgacccctag

SEQ ID NO: 257415 - DNA, 2112 bp, Artificial Sequence
  derived and/or modified sequence
atgcagagcgccaagtacttcaactacaccgtgaaggtgctgggccagggcgaggagtggagaggcggcgacggcatcaacagcatcggcggcggccagaaggtgagactgatgaaggaggtgatggagcactacgccgaccaggacgacctggtggtgatgttcaccgagtgcttcgacgtgatcttcgccggcggccccgaggaggtgctgaagaagttccagaaggccaaccacaaggtggtgttcgccgccgacggcatcctgtggcccgacaagagactggccgacaagtaccccgtggtgcacatcggcaagagatacctgaacagcggcggcttcatcggctacgccccctacgtgaacagaatcgtgcagcagtggaacctgcaggacaacgacgacgaccagctgttctacaccaaggtgtacatcgaccccctgaagagagaggccatcaacatcaccctggaccacaagtgcaagatcttccagaccctgaacggcgccgtggacgaggtggtgctgaagttcgagaacggcaaggccagagccaagaacaccttctacgagaccctgcccgtggccatcaacggcaacggccccaccaagatcctgctgaactacttcggcaactacgtgcccaacagctggacccaggacaacggctgcaccctgtgcgagttcgacaccgtggacctgagcgccgtggacgtgcaccccaacgtgagcatcggcgtgttcatcgagcagcccacccccttcctgcccagattcctggacatcctgctgaccctggactaccccaaggaggccctgaagctgttcatccacaacaaggaggtgtaccacgagaaggacatcaaggtgttcttcgacaaggccaagcacgagatcaagaccatcaagatcgtgggccccgaggagaacctgagccaggccgaggccagaaacatgggcatggacttctgcagacaggacgagaagtgcgactactacttcagcgtggacgccgacgtggtgctgaccaaccccagaaccctgaagatcctgatcgagcagaacagaaagatcatcgcccccctggtgaccagacacggcaagctgtggagcaacttctggggcgccctgagccccgacggctactacgccagaagcgaggactacgtggacatcgtgcagggcaacagagtgggcgtgtggaacgtgccctacatggccaacgtgtacctgatcaagggcaagaccctgagaagcgagatgaacgagagaaactacttcgtgagagacaagctggaccccgacatggccctgtgcagaaacgccagagagatgaccctgcagagagagaaggacagccccacccccgagaccttccagatgctgagcccccccaagggcgtgttcatgtacatcagcaacagacacgagttcggcagactgctgagcaccgccaactacaacaccagccactacaacaacgacctgtggcagatcttcgagaaccccgtggactggaaggagaagtacatcaacagagactacagcaagatcttcaccgagaacatcgtggagcagccctgccccgacgtgttctggttccccatcttcagcgagaaggcctgcgacgagctggtggaggagatggagcactacggcaagtggagcggcggcaagcaccacgacagcagaatcagcggcggctacgagaacgtgcccaccgacgacatccacatgaagcaggtggacctggagaacgtgtggctgcacttcatcagagagttcatcgcccccgtgaccctgaaggtgttcgccggctactacaccaagggcttcgccctgctgaacttcgtggtgaagtacagccccgagagacagagaagcctgagaccccaccacgacgccagcaccttcaccatcaacatcgccctgaacaacgtgggcgaggacttccagggcggcggctgcaagttcctgagatacaactgcagcatcgagagccccagaaagggctggagcttcatgcaccccggcagactgacccacctgcacgagggcctgcccgtgaagaacggcaccagatacatcgccgtgagcttcatcgacccctag

SEQ ID NO: 257416 - protein, 2046 aa, Artificial Sequence
  derived and/or modified sequence
MDEVEQDQHEARLKELFDSFDTTGTGSLGQEELTDLCHMLSLEEVAPVLQQTLLQDNLLGRVHFDQFKEALILILSRTLSNEEHFQEPDCSLEAQPKYVRGGKRYGRRSLPEFQESVEEFPEVTVIEPLDEEARPSHIPAGDCSEHWKTQRSEEYEAEGQLRFWNPDDLNASQSGSSPPQDWIEEKLQEVCEDLGITRDGHLNRKKLVSICEQYGLQNVDGEMLEEVFHNLDPDGTMSVEDFFYGLFKNGKSLTPSASTPYRQLKRHLSMQSFDESGRRTTTSSAMTSTIGFRVFSCLDDGMGHASVERILDTWQEEGIENSQEILKALDFSLDGNINLTELTLALENELLVTKNSIHQAALASFKAEIRHLLERVDQVVREKEKLRSDLDKAEKLKSLMASEVDDHHAAIERRNEYNLRKLDEEYKERIAALKNELRKEREQILQQAGKQRLELEQEIEKAKTEENYIRDRLALSLKENSRLENELLENAEKLAEYENLTNKLQRNLENVLAEKFGDLDPSSAEFFLQEERLTQMRNEYERQCRVLQDQVDELQSELEEYRAQGRVLRLPLKNSPSEEVEANSGGIEPEHGLGSEECNPLNMSIEAELVIEQMKEQHHRDICCLRLELEDKVRHYEKQLDETVVSCKKAQENMKQRHENETHTLEKQISDLKNEIAELQGQAAVLKEAHHEATCRHEEEKKQLQVKLEEEKTHLQEKLRLQHEMELKARLTQAQASFEREREGLQSSAWTEEKVRGLTQELEQFHQEQLTSLVEKHTLEKEELRKELLEKHQRELQEGREKMETECNRRTSQIEAQFQSDCQKVTERCESALQSLEGRYRQELKDLQEQQREEKSQWEFEKDELTQECAEAQELLKETLKREKTTSLVLTQEREMLEKTYKEHLNSMVVERQQLLQDLEDLRNVSETQQSLLSDQILELKSSHKRELREREEVLCQAGASEQLASQRLERLEMEHDQERQEMMSKLLAMENIHKATCETADRERAEMSTEISRLQSKIKEMQQATSPLSMLQSGCQVIGEEEVEGDGALSLLQQGEQLLEENGDVLLSLQRAHEQAVKENVKMATEISRLQQRLQKLEPGLVMSSCLDEPATEFFGNTAEQTEQFLQQNRTKQVEGVTRRHVLSDLEDDEVRDLGSTGTSSVQRQEVKIEESEASVEGFSELENSEETRTESWELKNQISQLQEQLMMLCADCDRASEKKQDLLFDVSVLKKKLKMLERIPEASPKYKLLYEDVSRENDCLQEELRMMETRYDEALENNKELTAEVFRLQDELKKMEEVTETFLSLEKSYDEVKIENEGLNVLVLRLQGKIEKLQESVVQRCDCCLWEASLENLEIEPDGNILQLNQTLEECVPRVRSVHHVIEECKQENQYLEGNTQLLEKVKAHEIAWLHGTIQTHQERPRVQNQVILEENTTLLGFQDKHFQHQATIAELELEKTKLQELTRKLKERVTILVKQKDVLSHGEKEEELKAMMHDLQITCSEMQQKVELLRYESEKLQQENSILRNEITTLNEEDSISNLKLGTLNGSQEEMWQKTETVKQENAAVQKMVENLKKQISELKIKNQQLDLENTELSQKNSQNQEKLQELNQRLTEMLCQKEKEPGNSALEEREQEKFNLKEELERCKVQSSTLVSSLEAELSEVKIQTHIVQQENHLLKDELEKMKQLHRCPDLSDFQQKISSVLSYNEKLLKEKEALSEELNSCVDKLAKSSLLEHRIATMKQEQKSWEHQSASLKSQLVASQEKVQNLEDTVQNVNLQMSRMKSDLRVTQQEKEALKQEVMSLHKQLQNAGGKSWAPEIATHPSGLHNQQKRLSWDKLDHLMNEEQQLLWQENERLQTMVQNTKAELTHSREKVRQLESNLLPKHQKHLNPSGTMNPTEQEKLSLKRECDQFQKEQSPANRKVSQMNSLEQELETIHLENEGLKKKQVKLDEQLMEMQHLRSTATPSPSPHAWDLQLLQQQACPMVPREQFLQLQRQLLQAERINQHLQEELENRTSETNTPQALLPEQRAVHADSYRRIGHL

SEQ ID NO: 257417 - DNA, 6141 bp, Artificial Sequence
  derived and/or modified sequence
atggacgaggtggagcaggaccagcacgaggccagactgaaggagctgttcgacagcttcgacaccaccggcaccggcagcctgggccaggaggagctgaccgacctgtgccacatgctgagcctggaggaggtggcccccgtgctgcagcagaccctgctgcaggacaacctgctgggcagagtgcacttcgaccagttcaaggaggccctgatcctgatcctgagcagaaccctgagcaacgaggagcacttccaggagcccgactgcagcctggaggcccagcccaagtacgtgagaggcggcaagagatacggcagaagaagcctgcccgagttccaggagagcgtggaggagttccccgaggtgaccgtgatcgagcccctggacgaggaggccagacccagccacatccccgccggcgactgcagcgagcactggaagacccagagaagcgaggagtacgaggccgagggccagctgagattctggaaccccgacgacctgaacgccagccagagcggcagcagccccccccaggactggatcgaggagaagctgcaggaggtgtgcgaggacctgggcatcaccagagacggccacctgaacagaaagaagctggtgagcatctgcgagcagtacggcctgcagaacgtggacggcgagatgctggaggaggtgttccacaacctggaccccgacggcaccatgagcgtggaggacttcttctacggcctgttcaagaacggcaagagcctgacccccagcgccagcaccccctacagacagctgaagagacacctgagcatgcagagcttcgacgagagcggcagaagaaccaccaccagcagcgccatgaccagcaccatcggcttcagagtgttcagctgcctggacgacggcatgggccacgccagcgtggagagaatcctggacacctggcaggaggagggcatcgagaacagccaggagatcctgaaggccctggacttcagcctggacggcaacatcaacctgaccgagctgaccctggccctggagaacgagctgctggtgaccaagaacagcatccaccaggccgccctggccagcttcaaggccgagatcagacacctgctggagagagtggaccaggtggtgagagagaaggagaagctgagaagcgacctggacaaggccgagaagctgaagagcctgatggccagcgaggtggacgaccaccacgccgccatcgagagaagaaacgagtacaacctgagaaagctggacgaggagtacaaggagagaatcgccgccctgaagaacgagctgagaaaggagagagagcagatcctgcagcaggccggcaagcagagactggagctggagcaggagatcgagaaggccaagaccgaggagaactacatcagagacagactggccctgagcctgaaggagaacagcagactggagaacgagctgctggagaacgccgagaagctggccgagtacgagaacctgaccaacaagctgcagagaaacctggagaacgtgctggccgagaagttcggcgacctggaccccagcagcgccgagttcttcctgcaggaggagagactgacccagatgagaaacgagtacgagagacagtgcagagtgctgcaggaccaggtggacgagctgcagagcgagctggaggagtacagagcccagggcagagtgctgagactgcccctgaagaacagccccagcgaggaggtggaggccaacagcggcggcatcgagcccgagcacggcctgggcagcgaggagtgcaaccccctgaacatgagcatcgaggccgagctggtgatcgagcagatgaaggagcagcaccacagagacatctgctgcctgagactggagctggaggacaaggtgagacactacgagaagcagctggacgagaccgtggtgagctgcaagaaggcccaggagaacatgaagcagagacacgagaacgagacccacaccctggagaagcagatcagcgacctgaagaacgagatcgccgagctgcagggccaggccgccgtgctgaaggaggcccaccacgaggccacctgcagacacgaggaggagaagaagcagctgcaggtgaagctggaggaggagaagacccacctgcaggagaagctgagactgcagcacgagatggagctgaaggccagactgacccaggcccaggccagcttcgagagagagagagagggcctgcagagcagcgcctggaccgaggagaaggtgagaggcctgacccaggagctggagcagttccaccaggagcagctgaccagcctggtggagaagcacaccctggagaaggaggagctgagaaaggagctgctggagaagcaccagagagagctgcaggagggcagagagaagatggagaccgagtgcaacagaagaaccagccagatcgaggcccagttccagagcgactgccagaaggtgaccgagagatgcgagagcgccctgcagagcctggagggcagatacagacaggagctgaaggacctgcaggagcagcagagagaggagaagagccagtgggagttcgagaaggacgagctgacccaggagtgcgccgaggcccaggagctgctgaaggagaccctgaagagagagaagaccaccagcctggtgctgacccaggagagagagatgctggagaagacctacaaggagcacctgaacagcatggtggtggagagacagcagctgctgcaggacctggaggacctgagaaacgtgagcgagacccagcagagcctgctgagcgaccagatcctggagctgaagagcagccacaagagagagctgagagagagagaggaggtgctgtgccaggccggcgccagcgagcagctggccagccagagactggagagactggagatggagcacgaccaggagagacaggagatgatgagcaagctgctggccatggagaacatccacaaggccacctgcgagaccgccgacagagagagagccgagatgagcaccgagatcagcagactgcagagcaagatcaaggagatgcagcaggccaccagccccctgagcatgctgcagagcggctgccaggtgatcggcgaggaggaggtggagggcgacggcgccctgagcctgctgcagcagggcgagcagctgctggaggagaacggcgacgtgctgctgagcctgcagagagcccacgagcaggccgtgaaggagaacgtgaagatggccaccgagatcagcagactgcagcagagactgcagaagctggagcccggcctggtgatgagcagctgcctggacgagcccgccaccgagttcttcggcaacaccgccgagcagaccgagcagttcctgcagcagaacagaaccaagcaggtggagggcgtgaccagaagacacgtgctgagcgacctggaggacgacgaggtgagagacctgggcagcaccggcaccagcagcgtgcagagacaggaggtgaagatcgaggagagcgaggccagcgtggagggcttcagcgagctggagaacagcgaggagaccagaaccgagagctgggagctgaagaaccagatcagccagctgcaggagcagctgatgatgctgtgcgccgactgcgacagagccagcgagaagaagcaggacctgctgttcgacgtgagcgtgctgaagaagaagctgaagatgctggagagaatccccgaggccagccccaagtacaagctgctgtacgaggacgtgagcagagagaacgactgcctgcaggaggagctgagaatgatggagaccagatacgacgaggccctggagaacaacaaggagctgaccgccgaggtgttcagactgcaggacgagctgaagaagatggaggaggtgaccgagaccttcctgagcctggagaagagctacgacgaggtgaagatcgagaacgagggcctgaacgtgctggtgctgagactgcagggcaagatcgagaagctgcaggagagcgtggtgcagagatgcgactgctgcctgtgggaggccagcctggagaacctggagatcgagcccgacggcaacatcctgcagctgaaccagaccctggaggagtgcgtgcccagagtgagaagcgtgcaccacgtgatcgaggagtgcaagcaggagaaccagtacctggagggcaacacccagctgctggagaaggtgaaggcccacgagatcgcctggctgcacggcaccatccagacccaccaggagagacccagagtgcagaaccaggtgatcctggaggagaacaccaccctgctgggcttccaggacaagcacttccagcaccaggccaccatcgccgagctggagctggagaagaccaagctgcaggagctgaccagaaagctgaaggagagagtgaccatcctggtgaagcagaaggacgtgctgagccacggcgagaaggaggaggagctgaaggccatgatgcacgacctgcagatcacctgcagcgagatgcagcagaaggtggagctgctgagatacgagagcgagaagctgcagcaggagaacagcatcctgagaaacgagatcaccaccctgaacgaggaggacagcatcagcaacctgaagctgggcaccctgaacggcagccaggaggagatgtggcagaagaccgagaccgtgaagcaggagaacgccgccgtgcagaagatggtggagaacctgaagaagcagatcagcgagctgaagatcaagaaccagcagctggacctggagaacaccgagctgagccagaagaacagccagaaccaggagaagctgcaggagctgaaccagagactgaccgagatgctgtgccagaaggagaaggagcccggcaacagcgccctggaggagagagagcaggagaagttcaacctgaaggaggagctggagagatgcaaggtgcagagcagcaccctggtgagcagcctggaggccgagctgagcgaggtgaagatccagacccacatcgtgcagcaggagaaccacctgctgaaggacgagctggagaagatgaagcagctgcacagatgccccgacctgagcgacttccagcagaagatcagcagcgtgctgagctacaacgagaagctgctgaaggagaaggaggccctgagcgaggagctgaacagctgcgtggacaagctggccaagagcagcctgctggagcacagaatcgccaccatgaagcaggagcagaagagctgggagcaccagagcgccagcctgaagagccagctggtggccagccaggagaaggtgcagaacctggaggacaccgtgcagaacgtgaacctgcagatgagcagaatgaagagcgacctgagagtgacccagcaggagaaggaggccctgaagcaggaggtgatgagcctgcacaagcagctgcagaacgccggcggcaagagctgggcccccgagatcgccacccaccccagcggcctgcacaaccagcagaagagactgagctgggacaagctggaccacctgatgaacgaggagcagcagctgctgtggcaggagaacgagagactgcagaccatggtgcagaacaccaaggccgagctgacccacagcagagagaaggtgagacagctggagagcaacctgctgcccaagcaccagaagcacctgaaccccagcggcaccatgaaccccaccgagcaggagaagctgagcctgaagagagagtgcgaccagttccagaaggagcagagccccgccaacagaaaggtgagccagatgaacagcctggagcaggagctggagaccatccacctggagaacgagggcctgaagaagaagcaggtgaagctggacgagcagctgatggagatgcagcacctgagaagcaccgccacccccagccccagcccccacgcctgggacctgcagctgctgcagcagcaggcctgccccatggtgcccagagagcagttcctgcagctgcagagacagctgctgcaggccgagagaatcaaccagcacctgcaggaggagctggagaacagaaccagcgagaccaacaccccccaggccctgctgcccgagcagagagccgtgcacgccgacagctacagaagaatcggccacctgtag

SEQ ID NO: 257418 - DNA, 6141 bp, Artificial Sequence
  derived and/or modified sequence
atggacgaggttgaacaggaccagcacgaggcacgcctgaaggagctttttgattccttcgataccacgggcactggaagtctgggccaggaggagctgaccgacctttgccatatgttatccttggaggaggtggcgccagtgctacagcaaacactgctgcaggataacctcctgggaagagtgcactttgaccagtttaaagaggccttgattcttatcctgtcccgcaccctgagcaatgaggaacatttccaggagcctgattgttccctggaagctcaacccaaatatgttcggggcggaaagaggtacggacggagatctttaccagaattccaagaaagtgtcgaagagtttccagaggtgacagttattgagccgttagatgaggaggcccgtccctctcacatcccagctggggattgctccgagcattggaaaacacaacgaagcgaggaatacgaggctgagggccagctgcgcttctggaatcccgacgacctcaatgctagccagtcaggttcaagtcccccccaggactggatcgaagaaaagctgcaggaagtatgtgaagatctcggtatcaccagagacggtcacctcaaccggaaaaaacttgtgtcaatatgtgaacagtacgggttgcagaatgtggacggcgaaatgctggaggaagtctttcacaatcttgatcccgatggcacgatgtctgtggaagatttcttctacggactattcaagaatggaaagtccctcaccccgtccgcgtctaccccgtaccgtcaacttaaaaggcatctgagtatgcaaagtttcgatgaatcaggaagaagaaccactacctcttctgcgatgacatcaacaattgggttccgagtgttctcatgtctcgacgatgggatggggcacgcctctgtagagaggattttagatacatggcaagaagaaggcatcgagaattcacaggagatcctgaaagccctggattttagcctcgatgggaacattaacctgactgaactcaccctggctctggaaaatgagttattagttaccaaaaacagtatccaccaggctgcacttgccagtttcaaagccgaaattagacatcttctcgagcgagtggatcaggttgttagggaaaaggaaaaactgcgctcggacctagacaaagctgaaaagttaaagagcctcatggccagtgaggtcgatgatcaccacgccgccatcgaacggaggaatgagtataacctgagaaaactcgatgaagagtacaaagaacgaatcgccgctttgaagaatgaactcagaaaggagcgcgaacagatattacagcaggccggaaagcagcggctagaacttgaacaggagatagaaaaagcaaagacagaagagaactacatcagagacagactggctctgtcgctgaaggagaattcccgactcgagaatgaactgttggagaatgcagaaaaattggctgaatatgagaacctgactaacaaactccaaagaaacttggagaatgtcctcgccgaaaaatttggagacctggacccttcctctgcagagttcttcctgcaagaagagcgccttactcagatgaggaatgagtacgagagacagtgccgggttcttcaggatcaggtagacgagctgcagagcgaactggaagagtaccgcgcccaaggcagagtcctgaggttgccactgaaaaactccccatcagaggaggtagaggctaatagcggagggattgaacctgagcacggcctggggtctgaagaatgcaaccctctgaatatgtctatcgaggccgaattggtaatcgagcagatgaaagagcagcaccacagagatatttgttgcctcaggctcgagcttgaggacaaggtgagacactatgaaaaacagctggatgagacggtagtgtcctgtaagaaggcacaggagaatatgaagcagagacatgagaacgaaacccataccctcgagaaacaaatttcagatctgaaaaacgaaatagctgaactgcaggggcaggccgccgtgttgaaagaggcacatcatgaggcgacctgtcgccatgaggaagagaagaagcaactgcaggtgaagctggaggaagaaaagacacacctgcaggaaaagctgagacttcagcacgaaatggagttgaaagcacgcctgacacaagcgcaggcttcctttgaacgcgagcgagaggggttacagtccagcgcctggaccgaagagaaggttcgtggcctcacccaggagcttgagcagtttcaccaagagcaactgacttcactggtagagaagcacacgcttgaaaaggaggaactcagaaaggagttgctggagaagcatcagcgggaactgcaggaaggacgggaaaaaatggaaaccgagtgcaatagaagaacaagccagatcgaggctcagtttcaatccgactgtcaaaaggtaaccgagaggtgtgagtccgcgttgcagagtctggaaggcagataccgccaggagctgaaggacttgcaagaacagcagcgggaggagaagagccaatgggagtttgaaaaggatgagctcacacaagagtgtgccgaggcccaagagctgctgaaggagaccttaaagagggaaaagaccacatcactcgtcctgacgcaggagagagagatgctggaaaagacatataaggagcacttgaattccatggtcgttgaacgacaacagctgctccaggacctagaggatctgcggaatgtctccgaaactcaacagtcgctgttgagcgatcagatcctcgagttgaaaagcagccacaagagagaacttcgggagagggaggaggtgttgtgtcaggctggtgccagtgagcagctcgccagccaacggttagaacgattagaaatggaacacgatcaggagaggcaggagatgatgtcaaaactcctagccatggagaacattcataaggccacatgcgagaccgcggacagggaacgggctgaaatgagcaccgaaatttcaagactgcagagcaaaattaaagaaatgcagcaggctactagcccattgtccatgttacagtcaggctgccaggtgatcggggaggaggaggtcgagggcgacggtgctctatccctcctccagcagggagaacagttgttggaagagaacggagatgtgctgctctcgctacagcgcgctcatgaacaggccgttaaggagaatgtcaagatggcgactgaaatttcaaggcttcagcagcggctgcagaagttggagcctggcttagttatgtctagttgcttggacgagcccgcaacagaatttttcggcaatacagctgaacagacagagcagtttctccaacagaaccggacgaaacaggttgagggcgttacaagacgccatgtgctaagcgacttagaagatgatgaagtaagagatcttgggtcaacaggcacctctagtgtgcaacggcaagaggtgaagatcgaagagagcgaggcctctgtggaagggttttccgaattagaaaactccgaagagacacggactgaaagctgggagctcaaaaaccagattagtcagctgcaggagcaacttatgatgctgtgtgcagactgtgatagagcttcggaaaaaaaacaggacctgctatttgatgtctccgtactaaagaaaaagctaaagatgctcgaacgaatccctgaagcatctcctaagtacaaactgctctatgaggatgtgtcgcgcgagaatgattgcctccaggaagaactgcggatgatggaaactcgctacgacgaggccttggagaataacaaagaactgactgccgaagttttccggctgcaagacgagttgaagaagatggaggaagttacagaaacattcctgagcctggaaaaatcatacgacgaggtgaagattgagaacgaagggctgaatgtactggtactgcgtctgcagggaaagatcgagaaactccaggagagtgtcgtgcagcgctgcgactgttgcttgtgggaggcaagccttgaaaatcttgagatagaacccgacggtaacatactacagctcaaccagacccttgaggaatgcgtgcccagagtgcgaagtgttcatcatgttatcgaggagtgcaaacaggaaaatcagtatctggaaggaaacacccagctcctggagaaggtcaaagcacacgaaatcgcctggctgcatgggactattcaaactcaccaggagcgcccacgagtgcagaaccaagtaattctggaggagaacaccactttgctgggatttcaggataagcattttcagcaccaggccactatcgccgagcttgaactggagaagacaaaactgcaggaattgacacgtaagcttaaggagagagtgaccatcttagtgaagcagaaagatgtgctgtcccatggggagaaagaagaagaattaaaagccatgatgcacgatctgcagattacgtgttcggagatgcagcagaaagtagagctgttgcggtatgagagcgaaaaactgcagcaagagaatagcatcctgagaaatgagattacgacgctgaatgaggaagatagtatctctaatttaaagttaggcaccctcaatggctctcaagaggaaatgtggcaaaagaccgagaccgtaaaacaggagaacgcagccgtccagaaaatggttgaaaacctgaaaaagcagatttcagaactgaagatcaaaaatcagcagctggacctggaaaacaccgaactcagtcagaaaaactcccagaatcaagagaagttgcaagagctcaaccagcgtctgactgagatgctgtgccagaaggagaaggaaccggggaattctgcattggaagagcgggagcaggaaaaatttaacttgaaagaggagctcgagcgatgcaaggtccagtcaagtacactcgtgagctcactggaggccgagctctccgaggtcaagattcagacacacattgtacagcaagagaatcacctactcaaggatgagctcgagaagatgaaacaactgcataggtgtccagatctgtctgatttccagcagaagatttcatccgtgctgagctataacgaaaagctactcaaagaaaaagaagcattatcagaagagctgaactcgtgtgtggacaagctggccaagtcctcgctgctggagcatagaatcgctactatgaagcaggagcagaagtcctgggaacatcaaagtgcctcccttaaatcacagctcgtcgccagtcaggaaaaagtccaaaatttagaggacaccgtgcagaacgtgaacctgcagatgtcgaggatgaagagcgatctacgggtgacccaacaggagaaagaggctctaaaacaggaggtgatgagcctacataaacagctgcagaatgcgggcggtaagtcatgggccccggaaatagcaactcatccatccggcctacataatcaacagaagcggctgagctgggacaagctcgatcatcttatgaacgaagagcagcaacttctgtggcaagagaatgaacgactacagaccatggtgcagaacacaaaggccgaactgacgcattcacgagagaaggttcgccagcttgaatcgaacctgctcccgaagcatcagaaacatttgaaccccagcggcaccatgaatccaacagaacaggagaaactttctctgaagagagaatgtgaccaattccagaaggaacagagtcctgcaaatcgaaaagtctcccaaatgaatagccttgaacaggagctggagacaatccatctggagaatgaaggcctgaaaaagaagcaggtcaagctggatgagcagctgatggagatgcagcatttgcggtcgaccgctacaccatccccaagcccgcatgcttgggatttgcagctcctccaacaacaagcctgccccatggtgcctagggaacagttccttcagttacagagacagttgcttcaagctgagaggatcaaccagcacctccaggaagaactggaaaatcgcacatctgagaccaacacaccccaggctctgctgcccgagcaaagagctgtgcacgccgattcatatcgcaggatcggccacctgtag

SEQ ID NO: 257419 - DNA, 6141 bp, Artificial Sequence
  derived and/or modified sequence
atggatgaggtggagcaggaccagcacgaggcccggctgaaggagctgtttgacagctttgacaccactggaacaggcagcctgggccaggaggagctgacagacctgtgccacatgctgagcctggaggaggtggcccctgtgctgcagcagaccctgctgcaggacaacctgctgggccgggtgcactttgaccagttcaaggaggccctgatcctgatcctgagcaggaccctgagcaatgaggagcacttccaggagccagactgcagcctggaggcccagcccaagtatgtgcggggcggcaagagatatggaagaagaagcctgcctgagttccaggagagcgtggaggagttccctgaggtgaccgtcatcgagcccctggatgaggaggcccggcccagccacatcccagctggggactgcagcgagcactggaagacccagaggtctgaggagtatgaagctgagggccagctgcgcttctggaacccagatgacctgaatgccagccagagcggcagcagccccccccaggactggattgaggagaagctgcaggaggtgtgtgaggacctgggcatcaccagagatggccacctgaacaggaagaagctggtgtccatctgtgagcagtatggcctgcagaatgtggatggagagatgctggaggaggtgttccacaacctggaccctgatggcaccatgtctgtggaggacttcttctacggcctcttcaagaatggcaagagcctgacccccagcgccagcaccccctaccggcagctgaagaggcacctgtccatgcagagctttgatgagagcggccgccgcaccaccaccagcagcgccatgaccagcaccatcggcttccgggtcttcagctgcctggatgatggcatgggccacgcctctgtggagcgcatcctggacacctggcaggaggagggcatcgagaacagccaggagatcctgaaggccctggacttcagcctggatggcaacatcaacctgacagagctgaccctggccctggagaatgagctgctggtgaccaagaacagcatccaccaggccgccctggccagcttcaaggccgagatccgccacctgctggagcgggtggaccaggtggtgcgggagaaggagaagctgcggagtgacctggacaaggccgagaagctgaagagcctgatggccagcgaggtggatgaccaccacgccgccattgaaagaagaaatgagtacaacctgaggaagctggatgaggagtacaaggagagaattgctgccctgaagaatgagctgaggaaggagcgggagcagatcctgcagcaggccggcaagcagaggctggagctggagcaggagattgagaaggccaagacagaggagaactacatccgggaccggctggccctgagcctgaaggagaacagccggctggagaatgagctgctggagaatgctgagaagctggccgagtatgagaacctgaccaacaagctgcagaggaacctggagaatgtgctggccgagaagtttggagacctggaccccagcagcgctgagttcttcctgcaggaggagcggctgacccagatgagaaatgaatatgaaaggcagtgccgggtgctgcaggaccaggtggatgagctgcagagcgagctggaggagtaccgggcccagggccgggtgctgcggctgcccctgaagaacagccccagcgaggaggtggaggccaacagcggcggcatcgagcctgagcacggcctgggcagcgaggagtgcaaccccctgaacatgagcattgaagctgagctggtgattgagcagatgaaggagcagcaccaccgggacatctgctgcctgcggctggagctggaggacaaggtgcgccactatgagaagcagctggatgaaacagtggtgtcctgcaagaaggcccaggagaacatgaagcagagacatgaaaatgagacccacaccctggagaagcagatcagtgacctgaagaatgaaattgctgagctgcagggccaggccgctgtgctgaaggaggcccaccacgaggccacctgcagacatgaggaggagaagaagcagctgcaggtgaagctggaggaggagaagacccacctgcaggagaagctgcggctgcagcacgagatggagctgaaggcccggctgacccaggcccaggccagctttgagcgggagcgggagggcctgcagagcagcgcctggacagaggagaaggtgcggggcctgacccaggagctggagcagttccaccaggagcagctgaccagcctggtggagaagcacaccctggagaaggaggagctgaggaaggagctgctggagaagcaccagcgggagctgcaggagggccgggagaagatggagacagagtgcaacagaaggaccagccagatcgaggcccagttccagagcgactgccagaaggtgacagagcgctgtgagagcgccctgcagagcctggagggccgctaccggcaggagctgaaggacctgcaggagcagcagcgggaggagaagagccagtgggagtttgagaaggatgagctgacccaggagtgtgccgaggcccaggagctgctgaaggagaccctgaagcgggagaagaccaccagcctggtgctgacccaggagcgggagatgctggagaagacctacaaggagcacctgaacagcatggtggtggagcggcagcagctgctgcaggacctggaggacctgagaaatgtgtctgagacccagcagagcctgctgagtgaccagatcctggagctgaagagcagccacaagcgggagctgcgggagcgggaggaggtgctgtgccaggccggggccagcgagcagctggccagccagaggctggagcggctggagatggagcatgaccaggagcggcaggagatgatgagcaagctgctggccatggagaacatccacaaggccacctgtgaaacagctgaccgggagcgggcagagatgagcacagagatcagccggctgcagagcaagatcaaggagatgcagcaggccaccagccccctgtccatgctgcagagcggctgccaggtgattggagaggaggaggtggagggagatggagccctgagcctgctgcagcagggcgagcagctgctggaggagaatggagatgtgctgctgagcctgcagagggcccacgagcaggccgtgaaggaaaatgtgaagatggccacagagatcagccggctgcagcagaggctgcagaagctggagcccggcctggtgatgagcagctgcctggatgagcccgccacagagttcttcggcaacacagctgagcagacagagcagttcctgcagcagaacagaaccaagcaggtggagggcgtgacccggcggcacgtgctgagtgacctggaggatgatgaggtgcgggacctgggcagcacaggcaccagctctgtgcagaggcaggaggtgaagattgaggagagcgaggcctctgtggagggcttcagcgagctggagaacagcgaggagaccaggacagagagctgggagctgaagaaccagatcagccagctgcaggagcagctgatgatgctgtgtgccgactgtgaccgggccagcgagaagaagcaggacctgctgtttgatgtgtctgtgctgaagaagaagctgaagatgctggagcgcatccctgaggccagccccaagtacaagctgctgtatgaagatgtgtcccgggagaatgactgcctgcaggaggagctgaggatgatggagaccaggtatgatgaggccctggagaacaacaaggagctgacagctgaggtgttccggctgcaggatgagctgaagaagatggaggaggtgacagagaccttcctgagcctggagaagagctatgatgaggtgaagattgaaaatgaaggcctgaatgtgctggtgctgcggctgcagggcaagattgagaagctgcaggagagcgtggtgcagagatgtgactgctgcctgtgggaggccagcctggagaacctggagattgaaccagatggcaacatcctgcagctgaaccagaccctggaggagtgtgtgccccgggtgcgctctgtgcaccacgtgattgaggagtgcaagcaggagaaccagtacctggagggcaacacccagctgctggagaaggtgaaggcccatgaaattgcctggctgcacggcaccatccagacccaccaggagcggccccgggtgcagaaccaggtgatcctggaggagaacaccaccctgctgggcttccaggacaagcacttccagcaccaggccaccatcgccgagctggagctggagaagaccaagctgcaggagctgaccaggaagctgaaggagcgggtgaccatcctggtgaagcagaaggatgtgctgagccacggggagaaggaggaggagctgaaggccatgatgcatgacctgcagatcacctgcagcgagatgcagcagaaggtggagctgctgcgctatgagagcgagaagctgcagcaggagaacagcatcctgagaaatgagatcaccaccctgaatgaggaggacagcatcagcaacctgaagctgggcaccctgaatggcagccaggaggagatgtggcagaagacagagaccgtgaagcaggagaatgctgctgtgcagaagatggtggagaacctgaagaagcagatcagcgagctgaagatcaagaaccagcagctggacctggagaacacagagctgagccagaagaacagccagaaccaggagaagctgcaggagctgaaccagaggctgacagagatgctgtgccagaaggagaaggagcccggcaacagcgccctggaggagcgggagcaggagaagttcaacctgaaggaggagctggagcgctgcaaggtgcagagcagcaccctggtgagcagcctggaggccgagctgtctgaggtgaagatccagacccacatcgtgcagcaggagaaccacctgctgaaggatgagctggagaagatgaagcagctgcaccgctgcccagacctgagtgacttccagcagaagatcagctctgtgctgagctacaatgagaagctgctgaaggagaaggaggccctgtctgaggagctgaacagctgtgtggacaagctggccaagagcagcctgctggagcaccgcatcgccaccatgaagcaggagcagaagtcctgggagcaccagagcgccagcctgaagagccagctggtggccagccaggagaaggtgcagaacctggaggacacagtgcagaatgtgaacctgcagatgagcaggatgaagagtgacctgcgggtgacccagcaggagaaggaggccctgaagcaggaggtgatgagcctgcacaagcagctgcagaatgccggcggcaagtcctgggcccctgagatcgccacccaccccagcggcctgcacaaccagcagaagaggctgtcctgggacaagctggaccacctgatgaatgaggagcagcagctgctgtggcaggagaatgaaaggctgcagaccatggtgcagaacaccaaggccgagctgacccacagccgggagaaggtgcggcagctggagagcaacctgctgcccaagcaccagaagcacctgaaccccagcggcaccatgaaccccacagagcaggagaagctgagcctgaagagagaatgtgaccagttccagaaggagcagagccctgccaacaggaaggtgtcccagatgaacagcctggagcaggagctggagaccatccacctggagaatgaaggcctgaagaagaagcaggtgaagctggatgagcagctgatggagatgcagcacctgcggagcacagccacccccagccccagcccccacgcctgggacctgcagctgctgcagcagcaggcctgccccatggtgccccgggagcagttcctgcagctgcagaggcagctgctgcaggccgagcgcatcaaccagcacctgcaggaggagctggagaacagaaccagcgagaccaacaccccccaggccctgctgcctgagcagagagctgtgcatgctgacagctacagaagaattggccacctgtag

SEQ ID NO: 257420 - DNA, 6141 bp, Artificial Sequence
  derived and/or modified sequence
atggacgaggtggagcaggaccagcacgaggcccggctgaaggagttgttcgatagctttgacacaacggggactggatccttaggtcaggaagaactgacagacctatgtcacatgctgtcactcgaggaagtggcacccgtgcttcagcagacactgcttcaggataacctgctggggagagttcatttcgaccaattcaaggaggctctgattctgatcctgtcccgtactctcagcaacgaagagcacttccaggaaccagactgtagcttggaggcacagcccaaatatgtgcgcggcggcaagaggtatggtcggaggagcttaccagaatttcaggagagtgttgaagagtttcctgaggttactgtgattgaaccgttggacgaggaggcacggccctcacacatccccgccggcgattgcagtgagcactggaaaactcagcggtccgaggagtatgaggcggagggacaattgcgcttctggaatcccgatgacctcaatgcgagtcagagtggcagttcgccacctcaggattggattgaagaaaagctgcaggaagtgtgtgaggatctaggaattactcgggatggccacttgaatcgcaaaaagcttgtgtcgatttgcgaacagtacgggttgcaaaacgtggacggggagatgttagaagaggttttccacaatcttgaccccgacggcactatgtccgtcgaggattttttctacggacttttcaagaatggaaaatcactcacgccaagtgcatctacaccctaccgacaactcaagcgccacctgtcaatgcagtctttcgatgagtcagggaggcggaccacgacctcatctgccatgacatccacgattggttttcgcgtgttctcttgtctggacgacgggatggggcacgccagtgtggagagaatcctggatacatggcaggaggagggcatcgaaaactctcaggagatcctgaaggcattggatttcagcttggatggtaacattaatctgaccgagcttactttggccctggagaatgagctgcttgtaacaaaaaattctatccaccaggcagccctcgcgagtttcaaagctgaaattaggcacctgttggagcgcgttgaccaggtggtgcgcgagaaagaaaaactccggagtgacctggacaaagctgaaaagcttaagtctctcatggccagtgaggtggatgaccatcacgcagctattgaacgccggaatgagtacaatctccggaaattggacgaggaatataaggaacggattgctgcactaaaaaacgagctgagaaaagagagggagcagatcctacagcaggctggaaagcagaggctcgagctggagcaggagattgagaaggcaaagaccgaggaaaattatatcagagacagacttgcactgtctctgaaggaaaactccagattggagaacgagctacttgagaatgcagaaaagcttgctgagtatgaaaaccttaccaacaagctccagcgcaacttagagaatgttttagcagagaaatttggagatttggatccctcatctgctgaattcttcctccaggaggaacgcctgacccagatgcgtaatgagtatgaacgtcagtgcagggttctgcaggatcaggtggacgagctgcagagtgagctagaggaataccgggctcaaggacgcgtccttcgactccctctaaagaattcaccctctgaggaagtcgaagctaacagcgggggcattgaacctgaacacgggctcgggagcgaggagtgcaatcctctgaatatgtctattgaagcggagttagtcattgaacagatgaaagagcagcatcacagggatatctgctgtctgaggctggaactggaagataaagtaaggcactatgaaaagcagctggatgagaccgtggtgtcatgtaagaaagcacaggagaatatgaagcagaggcacgagaatgaaactcacactctggagaaacaaatcagcgaccttaagaacgaaattgccgaactgcaaggtcaggcagccgtgctaaaggaggctcatcacgaggcaacgtgccggcacgaagaggagaaaaagcagctgcaggtgaagttggaagaggaaaagactcacctacaggagaagctcagactgcagcacgaaatggagctcaaagccagactgacccaggctcaggcttcattcgagagagaaagagaagggctacaatcatctgcatggactgaagagaaggtgcgtgggctgactcaggagttggaacagttccatcaggagcagctcacttcgcttgtagaaaagcatacactggaaaaggaggagctgagaaaggaacttctggaaaagcaccagcgcgagctgcaggagggtagggaaaaaatggagacggagtgtaatcgtcggacctcgcaaatcgaagcccagtttcagtctgactgtcagaaagtgaccgaacgttgtgagagtgctctacagtcgctcgagggtagatacaggcaagagctgaaggatctgcaggagcagcaacgagaggagaagagtcaatgggagttcgagaaggatgaattgactcaagaatgtgcggaagctcaggagttgttgaaggaaaccctaaaacgtgaaaaaaccacgagtctcgtgctgacacaggagcgggagatgttagagaaaacatataaagaacatctaaacagtatggtcgtggagaggcaacagctgctgcaggatctggaggatttaagaaatgtctctgagacgcagcagtcactgctgtctgatcaaatactggagctgaaaagttcccacaagcgcgaactgagggagcgggaagaagtgctctgtcaagcaggagccagcgaacagcttgcgtcacagcgcctagagcggttggagatggagcacgatcaagagagacaggaaatgatgagtaagcttctagcaatggaaaacatacacaaagccacttgtgaaaccgccgatagagagcgggcagagatgtcaacagaaatatccagactgcagtcaaaaatcaaggaaatgcagcaggctacgagccccttaagcatgctgcagagtggttgtcaagtgataggcgaagaggaggtggaaggagatggggctctatcactcctccagcagggcgaacagctgctggaggaaaatggggacgtgctgctcagtctgcagagagcccatgagcaagctgtgaaggaaaacgttaaaatggcaaccgaaatctctcgactccagcagcgattgcagaaactcgaacccggcttggtgatgagcagctgccttgacgaacccgcgactgaattcttcggaaacacagcggagcagactgaacagttcctgcagcagaacaggaccaaacaggttgagggtgttacccgcagacatgtgctttcagatctggaagatgatgaggttagagacctaggtagcaccggcacatcgtccgtgcaaagacaggaggttaagattgaggaaagtgaagcctctgttgaaggtttcagcgaactagagaacagtgaagagacgcgaaccgaaagctgggagctcaaaaaccaaatctcccaactccaggagcagctgatgatgctatgtgcggattgtgaccgggccagcgagaaaaaacaggacctgctattcgatgtaagtgtgctgaaaaagaaattgaaaatgttagagcgtatacccgaggcttcacctaagtacaaactcctgtatgaagatgtgtctcgcgagaacgactgtttgcaggaggagctcaggatgatggagaccagatatgacgaggcattagaaaacaataaggagctgacagccgaggtctttcggctccaggatgagctcaagaagatggaggaggtaacagaaacgttcctgtccctggagaagtcgtatgacgaagtcaagatcgaaaacgaagggttgaacgttttggttctgcgccttcagggcaaaattgaaaagctccaggaatctgtggtacagcgatgcgactgctgtctatgggaggcatccttagaaaatctggagatcgagcctgatggaaacattctgcaactgaaccaaacactggaagaatgtgtccccagagttagatccgtgcatcatgtgatagaggagtgtaaacaggagaaccagtacctcgaggggaacactcaactactggagaaggtgaaggcgcacgaaattgcgtggctgcacggcaccatccaaactcaccaggaacggccaagggtccagaatcaggtgatcctggaggagaacaccaccttgctgggatttcaggataagcatttccagcaccaagctactatcgctgagctggagctggaaaaaaccaaactgcaggagctgacacggaaactcaaggagagggttaccattctagtcaagcagaaggatgtcctctctcatggtgagaaggaggaggagttgaaggccatgatgcatgatctgcagataacatgctctgagatgcagcaaaaggtggagctcctgcggtatgagtctgaaaagcttcagcaagaaaacagtatccttaggaacgaaattacgaccctgaacgaggaagattcgatttcgaatttgaaacttggaaccctgaacggctctcaagaggagatgtggcagaaaacagagaccgtgaaacaggagaatgctgccgtccagaaaatggtggagaatctgaaaaagcagataagtgaacttaagatcaaaaaccagcaactggacctagagaatacagaactttcacagaaaaacagccaaaatcaggagaaactccaggaactgaatcagaggctgacagaaatgttgtgccagaaagagaaagagccaggtaactccgctctggaggaacgtgagcaggagaaattcaatctcaaggaagagttggagagatgtaaggtgcagtcctcaacactggtgagcagcctggaagctgagttaagcgaagttaaaattcagacacacatcgtccagcaagagaaccacctgctaaaagacgaactggagaagatgaagcagctccataggtgccccgacttgtcagattttcagcagaagatatcatcagtgctgtcctacaacgagaagcttctgaaggaaaaagaggctctctcagaagagctaaactcttgtgtcgacaagctagcaaagtcctcgctgctggagcatagaattgctaccatgaaacaggaacagaagagttgggagcatcagtctgcatccttaaagtcccagctggtggcaagccaggaaaaagtgcagaatctagaggatacagtgcagaatgttaacctgcagatgagccgcatgaagagcgatctgcgggttacgcagcaggaaaaggaagccctaaaacaggaggtcatgagcctccataaacagttgcagaacgcaggcgggaaatcctgggcccctgagattgccacccacccaagcggtctacataaccaacagaagcggctcagctgggataaattggatcaccttatgaatgaagagcagcaactgctgtggcaggaaaacgagcggctgcagacaatggttcaaaacactaaggcagaactgacacattcccgcgagaaggtcaggcagctcgagagcaacttgctgcccaaacatcagaagcatctgaacccatccggcaccatgaaccctactgaacaggaaaagctgtccctaaagagagagtgcgaccagtttcaaaaagagcagtcgcccgctaatcgtaaggtgtctcaaatgaacagcctggaacaggagctcgagaccatacacctggagaacgaaggcctgaagaagaaacaagtgaagcttgatgagcagctgatggagatgcagcacttaaggtcaacagccacaccgagtccttctcctcatgcatgggatctccagctgctgcaacagcaggcctgccctatggtacccagggaacagttcctgcagctgcagcgccaactgctccaggcggaaagaattaaccagcacttgcaggaggagctggagaatcgaactagtgagaccaatacccctcaagccctgcttcccgaacagcgggccgttcatgccgattcgtacagaaggatcgggcatctgtag

SEQ ID NO: 257421 - DNA, 6140 bp, Artificial Sequence
  derived and/or modified sequence
atggatgaagtcgagcaggatcagcatgaggccaggctgaaggaactctttgactcctttgacaccacaggcactggctccttgggccaggaggaactaaccgatctgtgtcacatgctgtccctggaggaggttgccccagtactgcaacaaacccttctgcaggataaccttctgggcagggtgcacttcgaccagttcaaggaagccctgatcctaatcctgtcccggaccctgagtaacgaggagcactttcaagaaccagactgcagcctcgaggctcaacccaagtatgttagagggggaaaacggtatggacgacgttctctgccagagttccaggagtctgtagaggaatttccggaagtgacagtgattgagccgctggatgaagaggctagacctagccatatcccagccggtgactgcagcgagcattggaaaacccagcgtagcgaggagtacgaagccgaaggtcagctaagattttggaaccctgatgatctgaatgcctcccaatcaggctccagtccccctcaggactggatagaggagaagctgcaggaagtgtgcgaggatctgggcattaccagggatggccacttgaatagaaagaaactcgtcagcatctgcgagcaatatggcctgcagaatgttgatggggaaatgctggaagaggttttccacaatctggacccggatggcacaatgtctgtcgaagatttcttttacggcctgttcaaaaatggtaagagcctcactccctcagcttcaacaccatacaggcaactgaaacggcacctgtcaatgcagtctttcgacgaatcggggaggagaacaacaactagttccgccatgacatccaccatcggttttcgcgtgttttcctgtctggatgacggcatggggcacgcatcggttgaaagaatcctggatacctggcaggaggaggggattgagaattctcaggaaatcctgaaggcactcgatttcagcttagacggaaatatcaaccttacagagcttactttggcacttgaaaacgaattgctggttaccaaaaacagtatccatcaggccgcactggcatccttcaaggccgaaattaggcacctgttagaaagggtggaccaagtagtgagggagaaggagaagctgcgctccgatctggacaaggcagaaaagctcaaaagcctcatggcctcagaagtggacgaccaccatgctgccattgagcgaaggaatgagtacaatctgcgaaagctggatgaagagtacaaggaaaggatcgctgccctgaagaacgaattacggaaggagagagagcagattcttcagcaggccggtaaacagaggttagagctggagcaagaaatcgaaaaggcaaagaccgaagagaactatatccgcgacaggcttgcgctttccttaaaagaaaactcgagactcgaaaatgaactgctggagaacgcagaaaagttggccgagtatgagaacctcactaataaacttcagcggaatttagaaaacgtccttgcggagaaattcggcgacctggatcccagctccgcagagttttttctgcaagaggaacggttgactcaaatgcgcaatgagtatgaacgccaatgtagagtgctgcaggaccaagtggatgaactccagtcagaacttgaagagtaccgtgcacagggcagagtgctccggctgcctctgaaaaactctccatccgaagaagtcgaagccaatagcggaggcatcgaacccgagcatgggctcggttcagaagagtgtaaccctctcaatatgtccattgaggccgagttggtgatcgaacagatgaaggaacaacatcacagggatatttgctgcctcaggttggaactggaagataaggtcaggcactacgaaaagcagctggacgaaacagtggtttcgtgtaagaaagctcaagaaaatatgaaacagcgtcacgagaacgagacacatacactggaaaagcaaatctcagatttaaaaaacgaaatcgccgagctacagggccaggctgcagtcttgaaagaagcccaccatgaggccacctgcaggcatgaagaggagaaaaagcagctacaagtcaaattagaggaggaaaaaactcacctccaggaaaaactgcggctccagcatgagatggaacttaaagcacgcttaactcaggcacaggcatcattcgagagggagcgcgaaggcctgcagagctcggcctggactgaagaaaaagtgagggggctcacccaggagcttgaacaatttcatcaagagcagctgacatctctggtggaaaagcatactttggagaaagaggagctgcgaaaggagctccttgaaaaacatcaacgcgaactccaggagggacgagaaaaaatggagaccgagtgcaacagacgcactagccagattgaagcacaatttcaaagtgactgccagaaggtgactgagagatgcgagtccgctttgcagtcactggaaggccgttaccggcaggagctgaaagatttgcaagagcagcagagggaagaaaagtcccagtgggagttcgaaaaagacgagctgacgcaggaatgtgccgaggcacaggagctgttaaaagagaccctgaagcgggagaaaacgacatccctggtcctgactcaggagagggaaatgttagagaagacatacaaggagcacctaaactctatggtggtggagcggcaacagttgctccaagacttggaagatctgagaaacgttagcgagacccagcaaagcctcctttccgaccagatcctggaactcaaaagctcccacaagagggagttgagagagagagaagaggtgctgtgtcaggctggagcaagtgagcagcttgccagccaaaggctggaacgcctggaaatggaacatgaccaggagcgacaggaaatgatgtcaaaactactggccatggagaatatccataaggcaacctgcgagacggcagacagggaacgcgctgagatgtctacagagatatcacgccttcagtctaaaatcaaagagatgcagcaggcgacttcgcctctcagcatgctgcaaagcgggtgtcaggttatcggagaggaggaggttgaaggggatggcgcactgtctctgcttcagcagggtgagcagcttcttgaggagaacggggatgtcctgttatcacttcagcgcgctcatgaacaggcggttaaggaaaatgtgaaaatggctaccgagattagcaggttgcaacagcgactgcaaaaactggaaccaggactcgtcatgtcttcttgcctcgatgagcccgctactgaatttttcggaaataccgcagagcagaccgaacaattcctgcagcagaatcgcacaaaacaggtggaaggcgtcaccagacggcatgtcctttctgatcttgaggacgatgaggtgagggacctcgggtccactgggacaagttccgtacaaaggcaagaggtgaaaatcgaggagtctgaggcctccgtagaaggcttcagcgaacttgaaaactccgaagaaacacgtacggaaagttgggagctgaagaatcagatctcgcagctccaggagcagttaatgatgctgtgtgccgactgtgatcgcgctagtgagaagaaacaggatctgttgttcgacgtctccgtcctcaagaaaaaactgaaaatgctggagcggattcccgaagcgagcccaaaatacaaactgctatacgaagacgtgagtagggagaacgattgtctgcaggaggagttgcggatgatggaaacgcgctatgacgaggctctcgagaataacaaggaattgacagccgaggtgttcaggttacaggatgaattaaaaaaaatggaggaggtgaccgaaacttttctgagccttgaaaagtcatacgacgaggtcaaaattgagaatgagggcctcaacgttctggtgctcagactccagggcaaaatcgagaagctgcaggaaagtgtggtacagcgatgcgattgctgcttgtgggaggcctctctggagaatcttgaaatcgagcccgacgggaatatattacaactgaaccagaccctggaggagtgtgtgcccagggtgagaagtgtgcatcatgtgattgaggaatgcaaacaggagaatcagtacctcgaggggaacacccagctgctcgagaaagtgaaggcccacgaaatcgcctggctccacggaacgatccagacacaccaggagagacccagagttcagaatcaggttatacttgaagaaaataccacactcctcggatttcaggataagcactttcaacatcaggcgactattgctgaattggagctcgaaaaaactaagctccaagagctcacccggaagctgaaggagagggtcaccatcctcgtgaagcagaaagacgttctgtcccacggcgaaaaggaagaggagcttaaggcaatgatgcatgatctgcagatcacatgttccgagatgcagcaaaaagtggaattgctccgatacgaatcggaaaagcttcaacaggagaacagcatactgcggaacgaaattacaactctcaatgaggaagatagcatctcaaatttaaagctcggcactctaaacggctctcaggaggaaatgtggcagaagacagaaactgtgaaacaggaaaatgctgctgttcaaaagatggtcgagaacctgaaaaaacagatcagtgaactgaaaataaagaaccagcagttggatttagagaacactgagctgagtcagaaaaacagtcagaatcaagaaaagttgcaggagctgaaccagaggctgacggagatgctctgccaaaaagagaaagaaccaggtaactccgccctagaggaaagagagcaggaaaagtttaatctgaaagaagaactggaaagatgcaaggtgcagagttctacactcgtttcctccctggaagcggaactctcggaggtaaaaattcaaactcatatcgtgcagcaagagaatcaccttcttaaagatgaactggagaaaatgaagcaacttcataggtgcccagatttaagtgattttcagcagaagattagctctgtgctcagctataacgagaaactgctgaaagagaaggaagccttgtcagaggagctgaactcttgcgttgataagctggccaagtcgtcactgctggaacaccgaattgctacaatgaagcaggagcagaaaagttgggagcatcagagcgcttcgttgaaaagtcagctggtagcaagccaagagaaagtccagaatcttgaggacacggtgcaaaatgtcaacctgcagatgagtaggatgaagagcgatctgagagtcactcaacaggaaaaagaagcactgaaacaggaagtgatgtccctgcacaagcagctgcagaatgcaggtggcaagagctgggctccagaaatcgcgacccacccgtccggactgcataaccagcagaagagactgtcctgggataagttagatcacctcatgaatgaggaacagcagctactgtggcaggaaaacgaacgtcttcagacaatggttcagaacaccaaagcagagctaacccatagtagagaaaaggtaagacagctggagagtaatctccttcctaagcatcagaagcacctgaacccgtcggggaccatgaatccaactgagcaggagaaactttccctgaaaagagaatgtgaccaattccagaaggaacagtctccagctaatagaaaagttagccaaatgaattccctcgaacaagaacttgaaaccattcatctggagaatgagggcctaaagaaaaaacaggtgaaactggacgaacagctaatggaaatgcagcatttaaggtctacggcaactcccagtcccagtccccatgcctgggatttacaactcttgcagcaacaggcatgcccaatggttccaagagagcaatttctgcagttgcaaaggcagctgctccaagccgaacggataaatcagcatttgcaagaggaactggaaaaccggaccagcgaaacaaacacaccgcaggccctgcttcccgagcagcgggctgtgcatgcagactcctatcgccgaatagggcacctgta

SEQ ID NO: 257422 - DNA, 6785 bp, Artificial Sequence
  derived and/or modified sequence
ccgagccgggagccgagcgcgctgggcgcggccgtcccgctgccgccgccaagcccggagtgcgccagcggccatggttcccgcggcggcgccgggcgcctgagccccgggacgcaagcgctggaggcgggctgccggctgtgcgggcgctccggagagaccgacagaaggtgagcactgtgggctatgggatggatgaggtggagcaggaccagcatgaggcccgactcaaggagctgtttgacagttttgacacgacgggcacagggtccctggggcaggaggaactcaccgacctttgccacatgttgagcttggaggaggtggccccagtgctgcagcagacattacttcaggacaacctcttgggcagggtacattttgaccaatttaaagaagcattaatactcatcttgtccagaactctgtcaaatgaagaacactttcaagaaccagactgctcactagaagctcagcccaaatatgttagaggtgggaagcgttacggacgaaggtccttgcccgagttccaagagtccgtggaggagtttcctgaagtgacggtgattgagccactggatgaagaagcgcggccttcacacatcccagccggtgactgcagtgagcactggaagacgcaacgcagtgaggagtatgaagcggaaggccagttaaggttttggaacccagatgacttgaatgcttcacagagtggatcttcccctccccaagactggatagaagagaaactgcaagaagtttgtgaagatttggggatcacccgtgatggtcacctgaaccggaagaagctggtctccatctgtgagcagtatggtttacagaatgtggatggagagatgctcgaggaagtattccataatcttgatcctgacggtacaatgagtgtagaagattttttctatggtttgtttaaaaatggaaaatctcttacaccatcagcatctactccatatagacaactaaaaaggcacctttccatgcagtctttcgatgagagtggacgacgtaccacaacctcatcagcaatgacaagtaccattggctttcgggtcttctcctgcctggatgatgggatgggccatgcatctgtggagagaatactggacacctggcaggaagagggcattgagaacagccaggagatcctgaaggccttggatttcagcctcgatggaaacatcaatttgacagaattaacactggcccttgaaaatgaacttttggttaccaagaacagcattcaccaggcggctctggccagctttaaggctgaaatccggcatttgttggaacgagttgatcaggtggtcagagaaaaagagaagctacggtcagatctggacaaggccgagaagctcaagtctttaatggcctcggaggtggatgatcaccatgcggccatagagcggcggaatgagtacaacctcaggaaactggatgaagagtacaaggagcgaatagcagccttaaaaaatgaactccgaaaagagagagagcagatcctgcagcaggcaggcaagcagcgtttagaacttgaacaggaaattgaaaaggcaaaaacagaagagaactatatccgggaccgccttgccctctctttaaaggaaaacagtcgtctggaaaatgagcttctagaaaatgcagagaagttggcagaatatgagaatctgacaaacaaacttcagagaaatttggaaaatgtgttagcagaaaagtttggtgacctcgatcctagcagtgctgagttcttcctgcaagaagagagactgacacagatgagaaatgaatatgagcggcagtgcagggtactacaagaccaagtagatgaactccagtctgagctggaagaatatcgtgcacaaggcagagtgctcaggcttccgttgaagaactcaccgtcagaagaagttgaggctaacagcggtggcattgagcccgaacacgggctcggttctgaagaatgcaatccattgaatatgagcattgaggcagagctggtcattgaacagatgaaagaacaacatcacagggacatatgttgcctcagactggagctcgaagataaagtgcgccattatgaaaagcagctggacgaaaccgtggtcagctgcaagaaggcacaggagaacatgaagcaaaggcatgagaacgaaacgcacaccttagaaaaacaaataagtgaccttaaaaatgaaattgctgaacttcaggggcaagcagcagtgctcaaggaggcacatcatgaggccacttgcaggcatgaggaggagaaaaaacaactgcaagtgaagcttgaggaggaaaagactcacctgcaggagaagctgaggctgcaacatgagatggagctcaaggctagactgacacaggctcaagcaagctttgagcgggagagggaaggccttcagagtagcgcctggacagaagagaaggtgagaggcttgactcaggaactagagcagtttcaccaggagcagctgacaagcctggtggagaaacacactcttgagaaagaggagttaagaaaagagctcttggaaaagcaccaaagggagcttcaggagggaagggaaaaaatggaaacagagtgtaatagaagaacctctcaaatagaagcccagtttcagtctgattgtcagaaagtcactgagaggtgtgaaagcgctctgcaaagcctggaggggcgctaccgccaagagctgaaggacctccaggaacagcagcgtgaggagaaatcccagtgggaatttgagaaggacgagctcacccaggagtgtgcggaagcccaggagctgctgaaagagactcttaagagagagaaaacaacttctctggtcctgacccaggagagagagatgctggagaaaacatacaaagaacatttgaacagcatggtcgtcgagagacagcagctactccaagacctggaagacctaagaaatgtatctgaaacccagcaaagcctgctgtctgaccagatacttgagctgaagagcagtcacaaaagggaactgagggagcgtgaggaggtcctgtgccaggcaggggcttcggagcagctggccagccagcggctggaaagactagaaatggaacatgaccaggaaaggcaggaaatgatgtccaagcttctagccatggagaacattcacaaagcgacctgtgagacagcagatcgagaaagagccgagatgagcacagaaatctccagacttcagagtaaaataaaggaaatgcagcaggcaacatctcctctctcaatgcttcagagtggttgccaggtgataggagaggaggaggtggaaggagatggagccctgtccctgcttcagcaaggggagcagctgttggaagaaaatggggacgtcctcttaagcctgcagagagctcatgaacaggcagtgaaggaaaatgtgaaaatggctactgaaatttctagattgcaacagaggctacaaaagttagagccagggttagtaatgtcttcttgtttggatgagccagctactgagttttttggaaatactgcggaacaaacagagcagtttttacagcaaaaccgaacgaagcaagtagaaggtgtgaccaggcggcatgtcctaagtgacctggaagatgatgaggtccgggacctgggaagtacagggacgagctctgttcagagacaggaagtcaaaatagaggagtctgaagcttcagtagagggtttttctgagcttgaaaacagtgaagagaccaggactgaatcctgggagctgaagaatcagattagtcagcttcaggaacagctaatgatgttatgtgcggactgtgatcgagcttctgaaaagaaacaggacctactttttgatgtttctgtgctaaaaaagaaactgaagatgcttgagagaatccctgaggcttctcccaaatataagctgttgtatgaagatgtgagccgagaaaatgactgccttcaggaagagctgagaatgatggagacacgctacgatgaggcactagaaaataacaaagaactcactgcagaggttttcaggttgcaggatgagctgaagaaaatggaggaagtcactgaaacattcctcagcctggaaaagagttacgatgaggtcaaaatagaaaatgaggggctgaatgttctggttttgagacttcaaggcaagattgagaagcttcaggaaagcgtggtccagcggtgtgactgctgcttatgggaagccagtttagagaacctggaaatcgaacctgatggaaatatactccagctcaatcagacactggaagagtgtgtgcccagggttaggagtgtacatcatgtcatagaggaatgtaagcaagaaaaccagtaccttgaggggaacacacagctcttggaaaaagtaaaagcacatgaaattgcctggttacatggaacaattcagacacatcaagaaaggccaagagtacagaatcaagttatactggaggaaaacactactctcctaggctttcaagacaaacattttcagcatcaggccaccatagcagagttagaactggagaaaacaaagttacaggagctgactaggaagttgaaggagagagtcactattttagttaagcaaaaagatgtactttctcacggagaaaaggaggaagagctgaaggcaatgatgcatgacttgcagatcacgtgcagtgagatgcagcaaaaagttgaacttctgagatatgaatctgaaaagcttcaacaggaaaattctattttgagaaatgaaattactactttaaatgaagaagatagcatttctaacctgaaattagggacattaaatggatctcaggaagaaatgtggcaaaaaacggaaactgtaaaacaagaaaatgctgcagttcagaagatggttgaaaatttaaagaaacagatttcagaattaaaaatcaaaaaccaacaattggatttggaaaatacagaacttagccaaaagaactctcaaaaccaggaaaaactgcaagaacttaatcaacgtctaacagaaatgctatgccagaaggaaaaagagccaggaaacagtgcattggaggaacgggaacaagagaagtttaatctgaaagaagaactggaacgttgtaaagtgcagtcctccactttagtgtcttctctggaggcggagctctctgaagttaaaatacagacccatattgtgcaacaggaaaaccaccttctcaaagatgaactggagaaaatgaaacagctgcacagatgtcccgatctctctgacttccagcaaaaaatctctagtgttctaagctacaacgaaaaactgctgaaagaaaaggaagctctgagtgaggaattaaatagctgtgtcgataagttggcaaaatcaagtcttttagagcatagaattgcgacgatgaagcaggaacagaaatcctgggaacatcagagtgcgagcttaaagtcacagctggtggcttctcaggaaaaggttcagaatttagaagacaccgtgcagaatgtaaacctgcaaatgtcccggatgaaatctgacctacgagtgactcagcaggaaaaggaggctttaaaacaagaagtgatgtctttacataagcaacttcagaatgctggtggcaagagctgggccccagagatagctactcatccatcagggctccataaccagcagaaaaggctgtcctgggacaagttggatcatctgatgaatgaggaacagcagctgctttggcaagagaatgagaggctccagaccatggtacagaacaccaaagccgaactcacgcactcccgggagaaggtccgtcagttggaatccaatcttcttcccaagcaccaaaaacatctaaacccatcaggtaccatgaatcccacagagcaagaaaaattgagcttaaagagagagtgtgatcagtttcagaaagaacaatctcctgctaacaggaaggtcagtcagatgaattcccttgaacaagaattagaaacaattcatttggaaaatgaaggcctgaaaaagaaacaagtaaaactggatgagcagctcatggagatgcagcacctgaggtccactgcgacgcctagcccgtcccctcatgcttgggatttgcagctgctccagcagcaagcctgtccgatggtgcccagggagcagtttctgcagcttcaacgccagctgctgcaggcagaaaggataaaccagcacctgcaggaggaacttgaaaacaggacctccgaaaccaacacaccacaggccttgctaccggagcagcgagcagtgcacgcagattcctacagaaggattgggcacctgtgaaaactgggctgctattgatggcatttcttaccatggcagacagatgcacacacccacccatgcacacacaccacacacagagacataagctaagatatgttggaattaagtgctcttttaaattattttattatttttactgttaaacctttgcagtattatgtctcttatttatttatgtagaaatgacagatcttgtgaatcaaattcacaaacatcagcttgttacaaatcattttatttataccctttaaagagtgtggatttaagattcttgaaaggatgtagtctatatattttctcattccatatgttgtaactatttttaaccaaaggtactacttttatatatggaatttgaagaaaaccaggggtatttatactgttttgtataagatgtacaaatctttttgacaggaaatttttgatgaaacaataaaataaattttaagt

SEQ ID NO: 257423 - protein, 2090 aa, Artificial Sequence
  derived and/or modified sequence
MDEVEQDQHEARLKELFDSFDTTGTGSLGQEELTDLCHMLSLEEVAPVLQQTLLQDNLLGRVHFDQFKEALILILSRTLSNEEHFQEPDCSLEAQPKYVRGGKRYGRRSLPEFQESVEEFPEVTVIEPLDEEARPSHIPAGDCSEHWKTQRSEEYEAEGQLRFWNPDDLNASQSGSSPPQDWIEEKLQEVCEDLGITRDGHLNRKKLVSICEQYGLQNVDGEMLEEVFHNLDPDGTMSVEDFFYGLFKNGKSLTPSASTPYRQLKRHLSMQSFDESGRRTTTSSAMTSTIGFRVFSCLDDGMGHASVERILDTWQEEGIENSQEILKALDFSLDGNINLTELTLALENELLVTKNSIHQAALASFKAEIRHLLERVDQVVREKEKLRSDLDKAEKLKSLMASEVDDHHAAIERRNEYNLRKLDEEYKERIAALKNELRKEREQILQQAGKQRLELEQEIEKAKTEENYIRDRLALSLKENSRLENELLENAEKLAEYENLTNKLQRNLENVLAEKFGDLDPSSAEFFLQEERLTQMRNEYERQCRVLQDQVDELQSELEEYRAQGRVLRLPLKNSPSEEVEANSGGIEPEHGLGSEECNPLNMSIEAELVIEQMKEQHHRDICCLRLELEDKVRHYEKQLDETVVSCKKAQENMKQRHENETHTLEKQISDLKNEIAELQGQAAVLKEAHHEATCRHEEEKKQLQVKLEEEKTHLQEKLRLQHEMELKARLTQAQASFEREREGLQSSAWTEEKVRGLTQELEQFHQEQLTSLVEKHTLEKEELRKELLEKHQRELQEGREKMETECNRRTSQIEAQFQSDCQKVTERCESALQSLEGRYRQELKDLQEQQREEKSQWEFEKDELTQECAEAQELLKETLKREKTTSLVLTQEREMLEKTYKEHLNSMVVERQQLLQDLEDLRNVSETQQSLLSDQILELKSSHKRELREREEVLCQAGASEQLASQRLERLEMEHDQERQEMMSKLLAMENIHKATCETADRERAEMSTEISRLQSKIKEMQQATSPLSMLQSGCQVIGEEEVEGDGALSLLQQGEQLLEENGDVLLSLQRAHEQAVKENVKMATEISRLQQRLQKLEPGLVMSSCLDEPATEFFGNTAEQTEQFLQQNRTKQVEGVTRRHVLSDLEDDEVRDLGSTGTSSVQRQEVKIEESEASVEGFSELENSEETRTESWELKNQISQLQEQLMMLCADCDRASEKKQDLLFDVSVLKKKLKMLERIPEASPKYKLLYEDVSRENDCLQEELRMMETRYDEALENNKELTAEVFRLQDELKKMEEVTETFLSLEKSYDEVKIENEGLNVLVLRLQGKIEKLQESVVQRCDCCLWEASLENLEIEPDGNILQLNQTLEECVPRVRSVHHVIEECKQENQYLEGNTQLLEKVKAHEIAWLHGTIQTHQERPRVQNQVILEENTTLLGFQDKHFQHQATIAELELEKTKLQELTRKLKERVTILVKQKDVLSHGEKEEELKAMMHDLQITCSEMQQKVELLRYESEKLQQENSILRNEITTLNEEDSISNLKLGTLNGSQEEMWQKTETVKQENAAVQKMVENLKKQISELKIKNQQLDLENTELSQKNSQNQEKLQELNQRLTEMLCQKEKEPGNSALEEREQEKFNLKEELERCKVQSSTLVSSLEAELSEVKIQTHIVQQENHLLKDELEKMKQLHRCPDLSDFQQKISSVLSYNEKLLKEKEALSEELNSCVDKLAKSSLLEHRIATMKQEQKSWEHQSASLKSQLVASQEKVQNLEDTVQNVNLQMSRMKSDLRVTQQEKEALKQEVMSLHKQLQNAGGKSWAPEIATHPSGLHNQQKRLSWDKLDHLMNEEQQLLWQENERLQTMVQNTKAELTHSREKVRQLESNLLPKHQKHLNPSGTMNPTEQEKLSLKRECDQFQKEQSPANRKVSQMNSLEQELETIHLENEGLKKKQVKLDEQLMEMQHLRSTATPSPSPHAWDLQLLQQQACPMVPREQFLQLQRQLLQAERINQHLQEELENRTSETNTPQGNQEQLVTVMEERMIEVEQKLKLVKRLLQEKVNQLKEQVSLPGHLCSPTSHSSFNSSFTSLYCH

SEQ ID NO: 257424 - DNA, 6273 bp, Artificial Sequence
  derived and/or modified sequence
atggacgaggtggagcaggaccagcacgaggccagactgaaggagctgttcgacagcttcgacaccaccggcaccggcagcctgggccaggaggagctgaccgacctgtgccacatgctgagcctggaggaggtggcccccgtgctgcagcagaccctgctgcaggacaacctgctgggcagagtgcacttcgaccagttcaaggaggccctgatcctgatcctgagcagaaccctgagcaacgaggagcacttccaggagcccgactgcagcctggaggcccagcccaagtacgtgagaggcggcaagagatacggcagaagaagcctgcccgagttccaggagagcgtggaggagttccccgaggtgaccgtgatcgagcccctggacgaggaggccagacccagccacatccccgccggcgactgcagcgagcactggaagacccagagaagcgaggagtacgaggccgagggccagctgagattctggaaccccgacgacctgaacgccagccagagcggcagcagccccccccaggactggatcgaggagaagctgcaggaggtgtgcgaggacctgggcatcaccagagacggccacctgaacagaaagaagctggtgagcatctgcgagcagtacggcctgcagaacgtggacggcgagatgctggaggaggtgttccacaacctggaccccgacggcaccatgagcgtggaggacttcttctacggcctgttcaagaacggcaagagcctgacccccagcgccagcaccccctacagacagctgaagagacacctgagcatgcagagcttcgacgagagcggcagaagaaccaccaccagcagcgccatgaccagcaccatcggcttcagagtgttcagctgcctggacgacggcatgggccacgccagcgtggagagaatcctggacacctggcaggaggagggcatcgagaacagccaggagatcctgaaggccctggacttcagcctggacggcaacatcaacctgaccgagctgaccctggccctggagaacgagctgctggtgaccaagaacagcatccaccaggccgccctggccagcttcaaggccgagatcagacacctgctggagagagtggaccaggtggtgagagagaaggagaagctgagaagcgacctggacaaggccgagaagctgaagagcctgatggccagcgaggtggacgaccaccacgccgccatcgagagaagaaacgagtacaacctgagaaagctggacgaggagtacaaggagagaatcgccgccctgaagaacgagctgagaaaggagagagagcagatcctgcagcaggccggcaagcagagactggagctggagcaggagatcgagaaggccaagaccgaggagaactacatcagagacagactggccctgagcctgaaggagaacagcagactggagaacgagctgctggagaacgccgagaagctggccgagtacgagaacctgaccaacaagctgcagagaaacctggagaacgtgctggccgagaagttcggcgacctggaccccagcagcgccgagttcttcctgcaggaggagagactgacccagatgagaaacgagtacgagagacagtgcagagtgctgcaggaccaggtggacgagctgcagagcgagctggaggagtacagagcccagggcagagtgctgagactgcccctgaagaacagccccagcgaggaggtggaggccaacagcggcggcatcgagcccgagcacggcctgggcagcgaggagtgcaaccccctgaacatgagcatcgaggccgagctggtgatcgagcagatgaaggagcagcaccacagagacatctgctgcctgagactggagctggaggacaaggtgagacactacgagaagcagctggacgagaccgtggtgagctgcaagaaggcccaggagaacatgaagcagagacacgagaacgagacccacaccctggagaagcagatcagcgacctgaagaacgagatcgccgagctgcagggccaggccgccgtgctgaaggaggcccaccacgaggccacctgcagacacgaggaggagaagaagcagctgcaggtgaagctggaggaggagaagacccacctgcaggagaagctgagactgcagcacgagatggagctgaaggccagactgacccaggcccaggccagcttcgagagagagagagagggcctgcagagcagcgcctggaccgaggagaaggtgagaggcctgacccaggagctggagcagttccaccaggagcagctgaccagcctggtggagaagcacaccctggagaaggaggagctgagaaaggagctgctggagaagcaccagagagagctgcaggagggcagagagaagatggagaccgagtgcaacagaagaaccagccagatcgaggcccagttccagagcgactgccagaaggtgaccgagagatgcgagagcgccctgcagagcctggagggcagatacagacaggagctgaaggacctgcaggagcagcagagagaggagaagagccagtgggagttcgagaaggacgagctgacccaggagtgcgccgaggcccaggagctgctgaaggagaccctgaagagagagaagaccaccagcctggtgctgacccaggagagagagatgctggagaagacctacaaggagcacctgaacagcatggtggtggagagacagcagctgctgcaggacctggaggacctgagaaacgtgagcgagacccagcagagcctgctgagcgaccagatcctggagctgaagagcagccacaagagagagctgagagagagagaggaggtgctgtgccaggccggcgccagcgagcagctggccagccagagactggagagactggagatggagcacgaccaggagagacaggagatgatgagcaagctgctggccatggagaacatccacaaggccacctgcgagaccgccgacagagagagagccgagatgagcaccgagatcagcagactgcagagcaagatcaaggagatgcagcaggccaccagccccctgagcatgctgcagagcggctgccaggtgatcggcgaggaggaggtggagggcgacggcgccctgagcctgctgcagcagggcgagcagctgctggaggagaacggcgacgtgctgctgagcctgcagagagcccacgagcaggccgtgaaggagaacgtgaagatggccaccgagatcagcagactgcagcagagactgcagaagctggagcccggcctggtgatgagcagctgcctggacgagcccgccaccgagttcttcggcaacaccgccgagcagaccgagcagttcctgcagcagaacagaaccaagcaggtggagggcgtgaccagaagacacgtgctgagcgacctggaggacgacgaggtgagagacctgggcagcaccggcaccagcagcgtgcagagacaggaggtgaagatcgaggagagcgaggccagcgtggagggcttcagcgagctggagaacagcgaggagaccagaaccgagagctgggagctgaagaaccagatcagccagctgcaggagcagctgatgatgctgtgcgccgactgcgacagagccagcgagaagaagcaggacctgctgttcgacgtgagcgtgctgaagaagaagctgaagatgctggagagaatccccgaggccagccccaagtacaagctgctgtacgaggacgtgagcagagagaacgactgcctgcaggaggagctgagaatgatggagaccagatacgacgaggccctggagaacaacaaggagctgaccgccgaggtgttcagactgcaggacgagctgaagaagatggaggaggtgaccgagaccttcctgagcctggagaagagctacgacgaggtgaagatcgagaacgagggcctgaacgtgctggtgctgagactgcagggcaagatcgagaagctgcaggagagcgtggtgcagagatgcgactgctgcctgtgggaggccagcctggagaacctggagatcgagcccgacggcaacatcctgcagctgaaccagaccctggaggagtgcgtgcccagagtgagaagcgtgcaccacgtgatcgaggagtgcaagcaggagaaccagtacctggagggcaacacccagctgctggagaaggtgaaggcccacgagatcgcctggctgcacggcaccatccagacccaccaggagagacccagagtgcagaaccaggtgatcctggaggagaacaccaccctgctgggcttccaggacaagcacttccagcaccaggccaccatcgccgagctggagctggagaagaccaagctgcaggagctgaccagaaagctgaaggagagagtgaccatcctggtgaagcagaaggacgtgctgagccacggcgagaaggaggaggagctgaaggccatgatgcacgacctgcagatcacctgcagcgagatgcagcagaaggtggagctgctgagatacgagagcgagaagctgcagcaggagaacagcatcctgagaaacgagatcaccaccctgaacgaggaggacagcatcagcaacctgaagctgggcaccctgaacggcagccaggaggagatgtggcagaagaccgagaccgtgaagcaggagaacgccgccgtgcagaagatggtggagaacctgaagaagcagatcagcgagctgaagatcaagaaccagcagctggacctggagaacaccgagctgagccagaagaacagccagaaccaggagaagctgcaggagctgaaccagagactgaccgagatgctgtgccagaaggagaaggagcccggcaacagcgccctggaggagagagagcaggagaagttcaacctgaaggaggagctggagagatgcaaggtgcagagcagcaccctggtgagcagcctggaggccgagctgagcgaggtgaagatccagacccacatcgtgcagcaggagaaccacctgctgaaggacgagctggagaagatgaagcagctgcacagatgccccgacctgagcgacttccagcagaagatcagcagcgtgctgagctacaacgagaagctgctgaaggagaaggaggccctgagcgaggagctgaacagctgcgtggacaagctggccaagagcagcctgctggagcacagaatcgccaccatgaagcaggagcagaagagctgggagcaccagagcgccagcctgaagagccagctggtggccagccaggagaaggtgcagaacctggaggacaccgtgcagaacgtgaacctgcagatgagcagaatgaagagcgacctgagagtgacccagcaggagaaggaggccctgaagcaggaggtgatgagcctgcacaagcagctgcagaacgccggcggcaagagctgggcccccgagatcgccacccaccccagcggcctgcacaaccagcagaagagactgagctgggacaagctggaccacctgatgaacgaggagcagcagctgctgtggcaggagaacgagagactgcagaccatggtgcagaacaccaaggccgagctgacccacagcagagagaaggtgagacagctggagagcaacctgctgcccaagcaccagaagcacctgaaccccagcggcaccatgaaccccaccgagcaggagaagctgagcctgaagagagagtgcgaccagttccagaaggagcagagccccgccaacagaaaggtgagccagatgaacagcctggagcaggagctggagaccatccacctggagaacgagggcctgaagaagaagcaggtgaagctggacgagcagctgatggagatgcagcacctgagaagcaccgccacccccagccccagcccccacgcctgggacctgcagctgctgcagcagcaggcctgccccatggtgcccagagagcagttcctgcagctgcagagacagctgctgcaggccgagagaatcaaccagcacctgcaggaggagctggagaacagaaccagcgagaccaacaccccccagggcaaccaggagcagctggtgaccgtgatggaggagagaatgatcgaggtggagcagaagctgaagctggtgaagagactgctgcaggagaaggtgaaccagctgaaggagcaggtgagcctgcccggccacctgtgcagccccaccagccacagcagcttcaacagcagcttcaccagcctgtactgccactag

SEQ ID NO: 257425 - DNA, 6273 bp, Artificial Sequence
  derived and/or modified sequence
atggacgaggtggagcaggaccagcatgaggcccgcctaaaggaactctttgattccttcgacactacaggcaccggatccctggggcaggaagagctaaccgatttgtgtcatatgctatctctggaggaagtggctccggtgctgcagcagaccctgttacaggataacctcctgggcagggtccatttcgaccagttcaaggaggctctgattttaattttgtctaggaccctgtccaatgaggagcactttcaggagcctgactgctcactcgaggcccaacctaaatatgtccggggagggaagcgatacggcaggagatcacttcccgagttccaagaaagtgtcgaagagtttcccgaggtaacggtcatcgagcctctggacgaagaggccaggccatcccatattcccgccggtgactgctctgaacattggaaaacccagcgctccgaggagtatgaagcagagggacagctgaggttttggaatcccgatgatctgaatgcaagccagagcgggtcttcacctccacaagactggatcgaggaaaagctgcaggaagtctgtgaggacctgggcattacccgggacggtcacctcaaccggaagaagctggtctccatttgtgagcagtatggattacaaaatgttgacggcgagatgctggaggaggtgttccacaacctcgatccggatggtacgatgtcagtggaggatttcttctacgggctgttcaagaatggcaaaagcctcactcctagcgcatcaaccccataccgccagctgaagcggcacctgtctatgcagagcttcgacgagtccggacgcaggacaactacttcttccgccatgaccagcactatcggattccgcgtgtttagctgcctcgacgatggaatggggcacgctagcgtggagaggattctggatacttggcaggaagagggcattgagaattcccaggagattctgaaggcactcgatttcagtctggatggcaatattaacctgacggagttgacgctcgccttagagaacgagctgctagttaccaagaattccatccaccaggctgcgcttgcctccttcaaggctgaaattcgtcatctgctcgagcgggtggaccaggtcgtgcgggagaaagagaaactgagaagcgacctggataaagctgaaaagctcaaaagcctgatggcatcagaggttgacgaccaccatgctgccattgagcgtcgaaacgagtacaatcttcgcaaactcgatgaggagtacaaggagcgaatcgctgctttaaaaaatgaactgaggaaggaacgcgaacagatcctccagcaagctgggaagcagaggctagagttggagcaggagatcgaaaaagcaaaaactgaagaaaactacattcgtgatcggctggctctttctcttaaagagaactctcgattagagaacgaactgctggagaatgctgagaagttggctgaatacgaaaatctcaccaataaattgcagagaaatctggagaacgtgctggctgaaaagttcggggatctggatccttcaagtgccgaatttttcctgcaggaggagagactaactcagatgagaaacgagtatgaaagacagtgtcgggtcctgcaggatcaggtggatgagttgcagtctgagctggaagaatacagagcccaggggcgcgtgctgcgccttcctctgaagaactcccccagtgaggaggtcgaggcaaattccgggggaattgagccagaacatggattaggctccgaagagtgtaatcctttaaacatgagtatcgaggccgaattggttatcgagcagatgaaggaacaacaccaccgggacatctgttgcttaaggctagaactggaggacaaagtgcggcactacgaaaagcagctggatgagaccgtggtctcttgcaaaaaggcgcaggagaatatgaaacagagacacgagaacgagacccacacattagaaaagcaaatcagcgacctcaagaacgaaattgctgagttgcagggccaagccgcagtattgaaagaagcccaccacgaggcgacttgccgacacgaggaggagaaaaaacagctgcaggtcaagctggaggaggagaaaacgcatctccaggaaaaacttaggctgcaacatgaaatggagctcaaggctagactgacacaagcccaagcctcattcgaaagggaacgtgagggcttacagtccagcgcttggacagaagaaaaggttcgcggcttaacccaggagctcgaacaatttcaccaagagcagctgacatctctggtggagaagcacaccctggaaaaagaggagctgcggaaagagctgttagaaaaacaccagagagaactgcaggaggggcgagagaagatggagacagagtgtaatcgccgcacatcacaaattgaagcccagttccagtccgattgccaaaaggttactgaaaggtgtgaaagcgccttacagagccttgaagggcgatacagacaggagctgaaggacctgcaagagcagcaaagggaggagaagagccagtgggagttcgagaaggacgagctgacacaggagtgcgccgaagcgcaagagcttttaaaggagacactcaagagggagaaaaccaccagcctggtcttgacccaggagagggaaatgttagaaaaaacctacaaggaacatctgaattccatggtcgtcgaaaggcaacaattgcttcaggacctcgaggacctccggaacgtatcagagacccagcagtccctgctttctgaccagattctagaattgaaaagctcccacaaacgggaactcagggaacgcgaagaagtcctctgccaggcaggggcctctgaacagttagcctcccagcggctggaacggctggagatggaacacgaccaagaaagacaggagatgatgtccaagctgctggctatggagaacatacataaagccacatgcgaaacagcagatcgcgaacgggccgagatgtcaacagagatctcaagactgcagagtaagattaaagagatgcagcaggcgacgtcgcccctgtcaatgctgcaatctggctgccaggtcataggcgaagaggaagtggagggtgacggcgcactgtctttgctccaacagggcgagcagttattggaggagaatggggacgtgttactgagtcttcagcgcgcgcacgagcaagccgtgaaggaaaatgtgaagatggccactgagatatccagacttcaacagcggttacagaaactggaacctggcctcgtgatgtcctcatgcctggacgagccagccactgagttctttgggaatacagctgagcaaacagagcaatttttgcagcagaaccgtactaaacaggtggaaggtgttacgagacggcatgtactctcagacttggaagacgacgaagtcagagatctgggcagcactggtacctcatcagtgcagcgtcaggaggttaaaattgaagagtcagaagctagtgtagaggggttctccgagctggaaaactctgaggaaacacgaacagaaagctgggagcttaaaaaccaaatttcacagctgcaagagcaactgatgatgctgtgcgcagactgcgatcgggcaagtgaaaaaaagcaggacctgctgtttgatgtctccgtgttaaaaaaaaagctgaaaatgctcgagcggatccccgaagctagcccaaaatacaagctgctgtacgaggatgtatcaagagagaacgattgtctccaggaggaacttaggatgatggagacaaggtatgatgaagcacttgagaataacaaggaattgactgccgaggtgttccggctccaggacgagctcaaaaaaatggaagaggtgacggagaccttcctctccctggagaaatcttacgacgaggtgaagatagagaatgaagggcttaacgtccttgtgcttagactccagggaaagattgaaaaactgcaggaatccgttgtccagaggtgtgactgctgcctttgggaggcctctcttgagaacctagaaatcgagcctgacggtaacattcttcagcttaatcagacacttgaagagtgtgttcctagagttcggtcagtacatcacgtgattgaagaatgtaagcaggagaatcagtatctcgaggggaatactcaactgctcgaaaaagttaaggcacatgagattgcatggctgcatggcactatccagacccaccaggaacgtcctcgtgtgcagaaccaggtcatcctggaggagaacacgaccctattggggtttcaagataaacactttcaacatcaggcgaccatcgctgagctggaactagagaaaactaagctccaggaactaactagaaaactgaaagaaagggtgactatactggttaaacagaaggatgttcttagccacggggaaaaagaggaagagctaaaagcaatgatgcacgacctgcagatcacctgttccgaaatgcagcaaaaggtggagttgctgcgatacgagagcgagaagctgcaacaggagaattctattttaagaaacgagatcacgacactgaacgaagaggattcaatctccaacctcaaattgggtactctcaacggcagccaagaagaaatgtggcagaaaaccgagaccgttaaacaggaaaatgctgccgtccagaagatggtggagaacctgaaaaagcagatcagtgaactgaaaattaaaaatcaacaactggatcttgagaatactgaactcagtcaaaagaatagtcaaaatcaggagaagttgcaggagctcaaccagcggctgactgagatgctttgccagaaagagaaggagcctggcaacagtgctctggaggagagggaacaggagaagtttaatctcaaagaagagcttgagagatgcaaggtacaaagctcaaccctggtttcctcactcgaggctgagctgtccgaggttaagatacagactcacatcgttcagcaagaaaaccatctcctcaaagatgagctggaaaaaatgaaacagctgcacagatgccctgatctatccgatttccagcaaaagatttcttctgttctgtcatataatgagaagcttctgaaggaaaaagaagcactctctgaagaactgaactcctgcgtggataaactggctaaaagcagccttttagaacacaggatagctacaatgaagcaggagcaaaaaagctgggagcaccagtcggcctccttgaaatctcagctcgtggcttctcaagagaaggttcagaacttggaggataccgtgcaaaacgtgaatcttcaaatgtcacgcatgaaatccgacttgcgggtcacccagcaggagaaggaagccttgaagcaggaagttatgtcacttcacaagcaactgcagaatgcaggcggcaagtcatgggctccggaaatcgccacacacccttctggactgcataaccagcagaagaggctttcatgggataagttggaccacctgatgaacgaagagcaacagcttctgtggcaagagaatgaaaggctacagacaatggtacagaacaccaaggccgagttgacgcattctagggaaaaggtcagacaattagaatccaatctgctgcctaaacaccaaaagcacctcaacccatcaggcacaatgaatcctacagagcaggagaaactctctctaaagagagaatgcgaccagttccagaaggaacagtcaccggcgaatcgcaaagtcagccagatgaatagcctcgagcaagagctcgaaaccatacatctggagaatgagggcctgaagaagaagcaggtgaaactcgacgagcagttgatggagatgcaacatctgagaagcacagctactccttctccaagcccccatgcatgggaccttcagctgcttcagcagcaagcttgcccaatggtgccccgggagcagttcctgcagctgcagcgacagctgctccaggcggaaagaatcaaccagcacttgcaggaggaattagagaatcgcaccagcgagactaacacccctcagggcaatcaagagcagcttgtcaccgtgatggaggaacgcatgattgaggtggagcaaaagctgaagttggtcaaacgtctactacaagagaaagtgaaccagctaaaggagcaggtgtcactgcctggacacctctgtagtcccacgtcccactcctcattcaactccagctttacctcactatactgccattag

SEQ ID NO: 257426 - DNA, 6273 bp, Artificial Sequence
  derived and/or modified sequence
atggatgaggtggagcaggaccagcacgaggcccggctgaaggagctgtttgacagctttgacaccactggaacaggcagcctgggccaggaggagctgacagacctgtgccacatgctgagcctggaggaggtggcccctgtgctgcagcagaccctgctgcaggacaacctgctgggccgggtgcactttgaccagttcaaggaggccctgatcctgatcctgagcaggaccctgagcaatgaggagcacttccaggagccagactgcagcctggaggcccagcccaagtatgtgcggggcggcaagagatatggaagaagaagcctgcctgagttccaggagagcgtggaggagttccctgaggtgaccgtcatcgagcccctggatgaggaggcccggcccagccacatcccagctggggactgcagcgagcactggaagacccagaggtctgaggagtatgaagctgagggccagctgcgcttctggaacccagatgacctgaatgccagccagagcggcagcagccccccccaggactggattgaggagaagctgcaggaggtgtgtgaggacctgggcatcaccagagatggccacctgaacaggaagaagctggtgtccatctgtgagcagtatggcctgcagaatgtggatggagagatgctggaggaggtgttccacaacctggaccctgatggcaccatgtctgtggaggacttcttctacggcctcttcaagaatggcaagagcctgacccccagcgccagcaccccctaccggcagctgaagaggcacctgtccatgcagagctttgatgagagcggccgccgcaccaccaccagcagcgccatgaccagcaccatcggcttccgggtcttcagctgcctggatgatggcatgggccacgcctctgtggagcgcatcctggacacctggcaggaggagggcatcgagaacagccaggagatcctgaaggccctggacttcagcctggatggcaacatcaacctgacagagctgaccctggccctggagaatgagctgctggtgaccaagaacagcatccaccaggccgccctggccagcttcaaggccgagatccgccacctgctggagcgggtggaccaggtggtgcgggagaaggagaagctgcggagtgacctggacaaggccgagaagctgaagagcctgatggccagcgaggtggatgaccaccacgccgccattgaaagaagaaatgagtacaacctgaggaagctggatgaggagtacaaggagagaattgctgccctgaagaatgagctgaggaaggagcgggagcagatcctgcagcaggccggcaagcagaggctggagctggagcaggagattgagaaggccaagacagaggagaactacatccgggaccggctggccctgagcctgaaggagaacagccggctggagaatgagctgctggagaatgctgagaagctggccgagtatgagaacctgaccaacaagctgcagaggaacctggagaatgtgctggccgagaagtttggagacctggaccccagcagcgctgagttcttcctgcaggaggagcggctgacccagatgagaaatgaatatgaaaggcagtgccgggtgctgcaggaccaggtggatgagctgcagagcgagctggaggagtaccgggcccagggccgggtgctgcggctgcccctgaagaacagccccagcgaggaggtggaggccaacagcggcggcatcgagcctgagcacggcctgggcagcgaggagtgcaaccccctgaacatgagcattgaagctgagctggtgattgagcagatgaaggagcagcaccaccgggacatctgctgcctgcggctggagctggaggacaaggtgcgccactatgagaagcagctggatgaaacagtggtgtcctgcaagaaggcccaggagaacatgaagcagagacatgaaaatgagacccacaccctggagaagcagatcagtgacctgaagaatgaaattgctgagctgcagggccaggccgctgtgctgaaggaggcccaccacgaggccacctgcagacatgaggaggagaagaagcagctgcaggtgaagctggaggaggagaagacccacctgcaggagaagctgcggctgcagcacgagatggagctgaaggcccggctgacccaggcccaggccagctttgagcgggagcgggagggcctgcagagcagcgcctggacagaggagaaggtgcggggcctgacccaggagctggagcagttccaccaggagcagctgaccagcctggtggagaagcacaccctggagaaggaggagctgaggaaggagctgctggagaagcaccagcgggagctgcaggagggccgggagaagatggagacagagtgcaacagaaggaccagccagatcgaggcccagttccagagcgactgccagaaggtgacagagcgctgtgagagcgccctgcagagcctggagggccgctaccggcaggagctgaaggacctgcaggagcagcagcgggaggagaagagccagtgggagtttgagaaggatgagctgacccaggagtgtgccgaggcccaggagctgctgaaggagaccctgaagcgggagaagaccaccagcctggtgctgacccaggagcgggagatgctggagaagacctacaaggagcacctgaacagcatggtggtggagcggcagcagctgctgcaggacctggaggacctgagaaatgtgtctgagacccagcagagcctgctgagtgaccagatcctggagctgaagagcagccacaagcgggagctgcgggagcgggaggaggtgctgtgccaggccggggccagcgagcagctggccagccagaggctggagcggctggagatggagcatgaccaggagcggcaggagatgatgagcaagctgctggccatggagaacatccacaaggccacctgtgaaacagctgaccgggagcgggcagagatgagcacagagatcagccggctgcagagcaagatcaaggagatgcagcaggccaccagccccctgtccatgctgcagagcggctgccaggtgattggagaggaggaggtggagggagatggagccctgagcctgctgcagcagggcgagcagctgctggaggagaatggagatgtgctgctgagcctgcagagggcccacgagcaggccgtgaaggaaaatgtgaagatggccacagagatcagccggctgcagcagaggctgcagaagctggagcccggcctggtgatgagcagctgcctggatgagcccgccacagagttcttcggcaacacagctgagcagacagagcagttcctgcagcagaacagaaccaagcaggtggagggcgtgacccggcggcacgtgctgagtgacctggaggatgatgaggtgcgggacctgggcagcacaggcaccagctctgtgcagaggcaggaggtgaagattgaggagagcgaggcctctgtggagggcttcagcgagctggagaacagcgaggagaccaggacagagagctgggagctgaagaaccagatcagccagctgcaggagcagctgatgatgctgtgtgccgactgtgaccgggccagcgagaagaagcaggacctgctgtttgatgtgtctgtgctgaagaagaagctgaagatgctggagcgcatccctgaggccagccccaagtacaagctgctgtatgaagatgtgtcccgggagaatgactgcctgcaggaggagctgaggatgatggagaccaggtatgatgaggccctggagaacaacaaggagctgacagctgaggtgttccggctgcaggatgagctgaagaagatggaggaggtgacagagaccttcctgagcctggagaagagctatgatgaggtgaagattgaaaatgaaggcctgaatgtgctggtgctgcggctgcagggcaagattgagaagctgcaggagagcgtggtgcagagatgtgactgctgcctgtgggaggccagcctggagaacctggagattgaaccagatggcaacatcctgcagctgaaccagaccctggaggagtgtgtgccccgggtgcgctctgtgcaccacgtgattgaggagtgcaagcaggagaaccagtacctggagggcaacacccagctgctggagaaggtgaaggcccatgaaattgcctggctgcacggcaccatccagacccaccaggagcggccccgggtgcagaaccaggtgatcctggaggagaacaccaccctgctgggcttccaggacaagcacttccagcaccaggccaccatcgccgagctggagctggagaagaccaagctgcaggagctgaccaggaagctgaaggagcgggtgaccatcctggtgaagcagaaggatgtgctgagccacggggagaaggaggaggagctgaaggccatgatgcatgacctgcagatcacctgcagcgagatgcagcagaaggtggagctgctgcgctatgagagcgagaagctgcagcaggagaacagcatcctgagaaatgagatcaccaccctgaatgaggaggacagcatcagcaacctgaagctgggcaccctgaatggcagccaggaggagatgtggcagaagacagagaccgtgaagcaggagaatgctgctgtgcagaagatggtggagaacctgaagaagcagatcagcgagctgaagatcaagaaccagcagctggacctggagaacacagagctgagccagaagaacagccagaaccaggagaagctgcaggagctgaaccagaggctgacagagatgctgtgccagaaggagaaggagcccggcaacagcgccctggaggagcgggagcaggagaagttcaacctgaaggaggagctggagcgctgcaaggtgcagagcagcaccctggtgagcagcctggaggccgagctgtctgaggtgaagatccagacccacatcgtgcagcaggagaaccacctgctgaaggatgagctggagaagatgaagcagctgcaccgctgcccagacctgagtgacttccagcagaagatcagctctgtgctgagctacaatgagaagctgctgaaggagaaggaggccctgtctgaggagctgaacagctgtgtggacaagctggccaagagcagcctgctggagcaccgcatcgccaccatgaagcaggagcagaagtcctgggagcaccagagcgccagcctgaagagccagctggtggccagccaggagaaggtgcagaacctggaggacacagtgcagaatgtgaacctgcagatgagcaggatgaagagtgacctgcgggtgacccagcaggagaaggaggccctgaagcaggaggtgatgagcctgcacaagcagctgcagaatgccggcggcaagtcctgggcccctgagatcgccacccaccccagcggcctgcacaaccagcagaagaggctgtcctgggacaagctggaccacctgatgaatgaggagcagcagctgctgtggcaggagaatgaaaggctgcagaccatggtgcagaacaccaaggccgagctgacccacagccgggagaaggtgcggcagctggagagcaacctgctgcccaagcaccagaagcacctgaaccccagcggcaccatgaaccccacagagcaggagaagctgagcctgaagagagaatgtgaccagttccagaaggagcagagccctgccaacaggaaggtgtcccagatgaacagcctggagcaggagctggagaccatccacctggagaatgaaggcctgaagaagaagcaggtgaagctggatgagcagctgatggagatgcagcacctgcggagcacagccacccccagccccagcccccacgcctgggacctgcagctgctgcagcagcaggcctgccccatggtgccccgggagcagttcctgcagctgcagaggcagctgctgcaggccgagcgcatcaaccagcacctgcaggaggagctggagaacagaaccagcgagaccaacaccccccagggcaaccaggagcagctggtgacagtgatggaggagaggatgattgaggtggagcagaagctgaagctggtgaagaggctgctgcaggagaaggtgaaccagctgaaggagcaggtgtccctgcccggccacctgtgcagccccaccagccacagcagcttcaacagcagcttcaccagcctgtactgccactag

SEQ ID NO: 257427 - DNA, 6496 bp, Artificial Sequence
  derived and/or modified sequence
ccgagccgggagccgagcgcgctgggcgcggccgtcccgctgccgccgccaagcccggagtgcgccagcggccatggttcccgcggcggcgccgggcgcctgagccccgggacgcaagcgctggaggcgggctgccggctgtgcgggcgctccggagagaccgacagaaggtgagcactgtgggctatgggatggatgaggtggagcaggaccagcatgaggcccgactcaaggagctgtttgacagttttgacacgacgggcacagggtccctggggcaggaggaactcaccgacctttgccacatgttgagcttggaggaggtggccccagtgctgcagcagacattacttcaggacaacctcttgggcagggtacattttgaccaatttaaagaagcattaatactcatcttgtccagaactctgtcaaatgaagaacactttcaagaaccagactgctcactagaagctcagcccaaatatgttagaggtgggaagcgttacggacgaaggtccttgcccgagttccaagagtccgtggaggagtttcctgaagtgacggtgattgagccactggatgaagaagcgcggccttcacacatcccagccggtgactgcagtgagcactggaagacgcaacgcagtgaggagtatgaagcggaaggccagttaaggttttggaacccagatgacttgaatgcttcacagagtggatcttcccctccccaagactggatagaagagaaactgcaagaagtttgtgaagatttggggatcacccgtgatggtcacctgaaccggaagaagctggtctccatctgtgagcagtatggtttacagaatgtggatggagagatgctcgaggaagtattccataatcttgatcctgacggtacaatgagtgtagaagattttttctatggtttgtttaaaaatggaaaatctcttacaccatcagcatctactccatatagacaactaaaaaggcacctttccatgcagtctttcgatgagagtggacgacgtaccacaacctcatcagcaatgacaagtaccattggctttcgggtcttctcctgcctggatgatgggatgggccatgcatctgtggagagaatactggacacctggcaggaagagggcattgagaacagccaggagatcctgaaggccttggatttcagcctcgatggaaacatcaatttgacagaattaacactggcccttgaaaatgaacttttggttaccaagaacagcattcaccaggcggctctggccagctttaaggctgaaatccggcatttgttggaacgagttgatcaggtggtcagagaaaaagagaagctacggtcagatctggacaaggccgagaagctcaagtctttaatggcctcggaggtggatgatcaccatgcggccatagagcggcggaatgagtacaacctcaggaaactggatgaagagtacaaggagcgaatagcagccttaaaaaatgaactccgaaaagagagagagcagatcctgcagcaggcaggcaagcagcgtttagaacttgaacaggaaattgaaaaggcaaaaacagaagagaactatatccgggaccgccttgccctctctttaaaggaaaacagtcgtctggaaaatgagcttctagaaaatgcagagaagttggcagaatatgagaatctgacaaacaaacttcagagaaatttggaaaatgtgttagcagaaaagtttggtgacctcgatcctagcagtgctgagttcttcctgcaagaagagagactgacacagatgagaaatgaatatgagcggcagtgcagggtactacaagaccaagtagatgaactccagtctgagctggaagaatatcgtgcacaaggcagagtgctcaggcttccgttgaagaactcaccgtcagaagaagttgaggctaacagcggtggcattgagcccgaacacgggctcggttctgaagaatgcaatccattgaatatgagcattgaggcagagctggtcattgaacagatgaaagaacaacatcacagggacatatgttgcctcagactggagctcgaagataaagtgcgccattatgaaaagcagctggacgaaaccgtggtcagctgcaagaaggcacaggagaacatgaagcaaaggcatgagaacgaaacgcacaccttagaaaaacaaataagtgaccttaaaaatgaaattgctgaacttcaggggcaagcagcagtgctcaaggaggcacatcatgaggccacttgcaggcatgaggaggagaaaaaacaactgcaagtgaagcttgaggaggaaaagactcacctgcaggagaagctgaggctgcaacatgagatggagctcaaggctagactgacacaggctcaagcaagctttgagcgggagagggaaggccttcagagtagcgcctggacagaagagaaggtgagaggcttgactcaggaactagagcagtttcaccaggagcagctgacaagcctggtggagaaacacactcttgagaaagaggagttaagaaaagagctcttggaaaagcaccaaagggagcttcaggagggaagggaaaaaatggaaacagagtgtaatagaagaacctctcaaatagaagcccagtttcagtctgattgtcagaaagtcactgagaggtgtgaaagcgctctgcaaagcctggaggggcgctaccgccaagagctgaaggacctccaggaacagcagcgtgaggagaaatcccagtgggaatttgagaaggacgagctcacccaggagtgtgcggaagcccaggagctgctgaaagagactcttaagagagagaaaacaacttctctggtcctgacccaggagagagagatgctggagaaaacatacaaagaacatttgaacagcatggtcgtcgagagacagcagctactccaagacctggaagacctaagaaatgtatctgaaacccagcaaagcctgctgtctgaccagatacttgagctgaagagcagtcacaaaagggaactgagggagcgtgaggaggtcctgtgccaggcaggggcttcggagcagctggccagccagcggctggaaagactagaaatggaacatgaccaggaaaggcaggaaatgatgtccaagcttctagccatggagaacattcacaaagcgacctgtgagacagcagatcgagaaagagccgagatgagcacagaaatctccagacttcagagtaaaataaaggaaatgcagcaggcaacatctcctctctcaatgcttcagagtggttgccaggtgataggagaggaggaggtggaaggagatggagccctgtccctgcttcagcaaggggagcagctgttggaagaaaatggggacgtcctcttaagcctgcagagagctcatgaacaggcagtgaaggaaaatgtgaaaatggctactgaaatttctagattgcaacagaggctacaaaagttagagccagggttagtaatgtcttcttgtttggatgagccagctactgagttttttggaaatactgcggaacaaacagagcagtttttacagcaaaaccgaacgaagcaagtagaaggtgtgaccaggcggcatgtcctaagtgacctggaagatgatgaggtccgggacctgggaagtacagggacgagctctgttcagagacaggaagtcaaaatagaggagtctgaagcttcagtagagggtttttctgagcttgaaaacagtgaagagaccaggactgaatcctgggagctgaagaatcagattagtcagcttcaggaacagctaatgatgttatgtgcggactgtgatcgagcttctgaaaagaaacaggacctactttttgatgtttctgtgctaaaaaagaaactgaagatgcttgagagaatccctgaggcttctcccaaatataagctgttgtatgaagatgtgagccgagaaaatgactgccttcaggaagagctgagaatgatggagacacgctacgatgaggcactagaaaataacaaagaactcactgcagaggttttcaggttgcaggatgagctgaagaaaatggaggaagtcactgaaacattcctcagcctggaaaagagttacgatgaggtcaaaatagaaaatgaggggctgaatgttctggttttgagacttcaaggcaagattgagaagcttcaggaaagcgtggtccagcggtgtgactgctgcttatgggaagccagtttagagaacctggaaatcgaacctgatggaaatatactccagctcaatcagacactggaagagtgtgtgcccagggttaggagtgtacatcatgtcatagaggaatgtaagcaagaaaaccagtaccttgaggggaacacacagctcttggaaaaagtaaaagcacatgaaattgcctggttacatggaacaattcagacacatcaagaaaggccaagagtacagaatcaagttatactggaggaaaacactactctcctaggctttcaagacaaacattttcagcatcaggccaccatagcagagttagaactggagaaaacaaagttacaggagctgactaggaagttgaaggagagagtcactattttagttaagcaaaaagatgtactttctcacggagaaaaggaggaagagctgaaggcaatgatgcatgacttgcagatcacgtgcagtgagatgcagcaaaaagttgaacttctgagatatgaatctgaaaagcttcaacaggaaaattctattttgagaaatgaaattactactttaaatgaagaagatagcatttctaacctgaaattagggacattaaatggatctcaggaagaaatgtggcaaaaaacggaaactgtaaaacaagaaaatgctgcagttcagaagatggttgaaaatttaaagaaacagatttcagaattaaaaatcaaaaaccaacaattggatttggaaaatacagaacttagccaaaagaactctcaaaaccaggaaaaactgcaagaacttaatcaacgtctaacagaaatgctatgccagaaggaaaaagagccaggaaacagtgcattggaggaacgggaacaagagaagtttaatctgaaagaagaactggaacgttgtaaagtgcagtcctccactttagtgtcttctctggaggcggagctctctgaagttaaaatacagacccatattgtgcaacaggaaaaccaccttctcaaagatgaactggagaaaatgaaacagctgcacagatgtcccgatctctctgacttccagcaaaaaatctctagtgttctaagctacaacgaaaaactgctgaaagaaaaggaagctctgagtgaggaattaaatagctgtgtcgataagttggcaaaatcaagtcttttagagcatagaattgcgacgatgaagcaggaacagaaatcctgggaacatcagagtgcgagcttaaagtcacagctggtggcttctcaggaaaaggttcagaatttagaagacaccgtgcagaatgtaaacctgcaaatgtcccggatgaaatctgacctacgagtgactcagcaggaaaaggaggctttaaaacaagaagtgatgtctttacataagcaacttcagaatgctggtggcaagagctgggccccagagatagctactcatccatcagggctccataaccagcagaaaaggctgtcctgggacaagttggatcatctgatgaatgaggaacagcagctgctttggcaagagaatgagaggctccagaccatggtacagaacaccaaagccgaactcacgcactcccgggagaaggtccgtcagttggaatccaatcttcttcccaagcaccaaaaacatctaaacccatcaggtaccatgaatcccacagagcaagaaaaattgagcttaaagagagagtgtgatcagtttcagaaagaacaatctcctgctaacaggaaggtcagtcagatgaattcccttgaacaagaattagaaacaattcatttggaaaatgaaggcctgaaaaagaaacaagtaaaactggatgagcagctcatggagatgcagcacctgaggtccactgcgacgcctagcccgtcccctcatgcttgggatttgcagctgctccagcagcaagcctgtccgatggtgcccagggagcagtttctgcagcttcaacgccagctgctgcaggcagaaaggataaaccagcacctgcaggaggaacttgaaaacaggacctccgaaaccaacacaccacagggaaaccaggaacaactggtaactgtcatggaggaacgaatgatagaagttgaacagaaactgaaactagtgaaaaggcttcttcaagagaaagtgaatcagctcaaagaacaagtgagcctacccggtcatctctgttcacccacctcacattccagctttaactccagttttacatccctttattgccattaactcgttaacttatgttgtctaataaaggcaaa

SEQ ID NO: 257428 - DNA, 6273 bp, Artificial Sequence
  derived and/or modified sequence
atggacgaggtggagcaggaccagcacgaggcccggctgaaggagttgttcgattcctttgataccaccgggaccggtagcctgggacaggaggagctcacggacctgtgtcatatgctctcactggaggaagtagcccctgtgctccaacagactctgctgcaggacaatttacttgggcgagtgcatttcgatcaattcaaagaggccctcatcttaatcctgtccagaactctctcgaacgaagaacacttccaggagccagattgtagccttgaagctcagccaaaatatgttagggggggtaagcgctacggaagacgcagcctgcctgaatttcaggagtcggtagaggaatttccggaagtgactgtcattgaaccattggacgaagaagctaggccatcccacattccagccggagactgttccgagcactggaagacacaacgcagtgaggagtatgaggccgaagggcaattacggttttggaaccccgacgacctgaatgcgagtcagtctggatcgtccccacctcaggactggattgaggagaagcttcaggaggtctgcgaagaccttggcataacaagggacgggcatctcaacaggaagaaactagtgtctatctgtgagcagtatggcctccagaatgtggatggggaaatgttggaagaggttttccacaatctcgaccccgacggtaccatgtccgtggaggacttcttttatggactcttcaagaatggaaagtccctaaccccttccgctagcaccccttaccgacaacttaagaggcacttgagcatgcagtcctttgatgagtctgggcgcaggacaacaaccagctctgctatgacatcgactatcggttttagagtgttcagctgcctggacgacggaatgggtcacgccagtgtggaaagaattctggatacctggcaggaggaggggattgagaattctcaggaaattctgaaagctctggacttttccctcgacggaaatataaacctgactgagctgactctggccctcgagaacgagcttctggtcactaaaaatagtatacatcaagccgccttggcatcctttaaggctgaaatacgacacctcctcgagagagttgaccaggtggtcagggagaaggaaaagctgaggtccgatctggacaaagccgagaagctcaagagtctgatggcatccgaggtagatgaccatcacgctgcaatcgagcgaagaaatgaatacaatttgaggaagctggacgaagagtacaaggaacgaatcgccgcactgaaaaatgaactgcgaaaggaaagggaacagatcttgcagcaggcgggcaagcagagactggagttggagcaggagattgaaaaggcgaagacagaagagaattacatccgggaccggcttgccctaagtctcaaagaaaattcgagattggagaacgagctcctggaaaatgctgaaaaactggccgaatatgaaaaccttaccaataagctgcagagaaatctagagaacgtccttgccgagaagttcggtgatttggatccctcttcagccgagtttttcttgcaggaggagcggttaacccagatgcgcaatgagtacgagcggcagtgtagggtcttgcaggaccaggtggacgaactgcaatccgagttagaggagtacagggcacagggtagagtgcttaggctcccgctgaagaattcgcccagtgaggaggtggaagccaattcggggggaattgagccagagcacgggctcgggtcagaagaatgcaatcctcttaacatgagcattgaggctgaattggtgattgaacagatgaaagagcagcaccacagagatatctgttgtctgagactcgagctcgaagataaagtgcgccactatgagaagcagttggacgagaccgtagtcagctgtaaaaaggcgcaggagaacatgaagcagcgccatgagaatgagacacatactttagaaaaacagattagtgatctgaaaaacgagattgctgagcttcagggacaggcggctgtgttgaaggaagctcaccacgaagcaacgtgcagacatgaggaggagaaaaagcagctacaagtgaagctggaagaggagaagactcatctccaagagaagctgcggctacaacacgagatggagctgaaggccagattaacccaggctcaggcaagttttgagagggagcgtgagggactgcagtccagtgcatggactgaggagaaggtacgaggtcttacccaggaactggagcagttccaccaggagcaactgacatcgttagtcgagaagcacaccttagagaaagaggagctcaggaaagaattactcgaaaagcatcagagggagctccaagagggacgggagaaaatggagactgagtgtaaccgccgtaccagccaaatcgaagcccagtttcagtctgactgtcagaaggtgactgaacggtgcgagtccgcactgcagtctctagaaggcagatacaggcaggagcttaaagatctccaggaacagcagcgagaggagaaaagtcagtgggagtttgagaaagatgaattaacgcaggaatgcgccgaggcccaggagctgctcaaggaaaccctcaagagagaaaagacgacatcactggtgctgacacaggagcgggagatgttggagaaaacctataaggagcatctcaactcaatggtagtagagcgtcaacagctgctccaggacttggaagatcttcgcaacgtctctgagacccagcagtccctgctgtccgaccagatcctagagttgaagagctcccacaagagggagctgagagaaagggaagaggtgctatgccaagccggcgcctcggaacaacttgcatcccagaggctagaacggcttgagatggagcacgaccaagagaggcaggaaatgatgagcaagcttcttgccatggaaaacatccataaggccacgtgtgagaccgccgaccgcgagcgggctgaaatgagcacagaaatatcccgcctgcagagtaagattaaggagatgcagcaggcgaccagtcctctttcaatgctccagtctggatgccaggtaattggggaggaagaagttgaaggtgatggagcccttagcctgctccagcagggcgaacagttgctggaggaaaacggcgatgtgttgttaagcctgcagagggcccatgagcaggccgttaaagagaacgtgaaaatggcgactgaaattagtcgactgcaacagcgcctgcagaaactcgaaccgggattggtcatgtcatcctgccttgatgagcctgcaactgagtttttcgggaacactgcggagcagacagaacagttcctgcagcagaataggaccaagcaggtcgagggagtcacacgccggcacgtgttaagtgatctagaagatgacgaagtgagggatctcggctccaccggtactagttctgttcagcgccaggaggtcaaaatcgaggagtcagaggcctccgttgaagggttctctgagctcgagaactctgaggagacgcgaacagagtcctgggagttgaagaaccagatctctcagctccaggaacagctgatgatgctgtgcgctgactgcgacagagcctccgagaagaagcaggatttgctattcgatgtgagtgtgctgaagaagaagctgaaaatgctcgagcgcatacctgaggcaagccctaagtataaactcctgtacgaggacgtttcacgtgagaatgactgcctgcaggaggaactacggatgatggaaactaggtacgatgaggctttggagaataataaagaactgaccgctgaggtttttcggttgcaggacgagctcaagaagatggaagaggtcaccgagacttttctttccctcgaaaaatcttacgatgaagtaaaaattgaaaatgaaggtctcaatgtgcttgtgctaagattgcaaggcaagatcgaaaagctgcaagagtccgttgtacagcgctgtgactgctgcctgtgggaagcttcactcgaaaatcttgaaatagagccagatggaaacatcctccagctgaatcagacactggaggagtgcgtaccgcgagtgaggtcggtgcaccacgtcatcgaggagtgcaagcaggagaaccagtacctagagggtaatacccaactgctcgagaaagtcaaggcgcatgaaattgcttggttacatggcactatccagacccatcaggaaaggcctcgagtgcaaaatcaagtcatcctcgaagaaaacaccacacttctcggctttcaggacaagcattttcagcaccaagctacaatcgctgagctggagctggagaagaccaagttgcaggagctaaccagaaaattgaaagagcgagtgactatcctggtgaagcagaaagatgtactgtcacacggggaaaaggaggaagagctgaaggccatgatgcatgatctgcaaatcacctgctccgaaatgcaacagaaagtcgagttgctccgatacgagagcgaaaagctccaacaggagaattccattctgaggaacgagatcactaccttgaacgaagaggactcaatctctaacctgaagctgggcactttaaacggaagtcaggaggagatgtggcagaaaacggaaactgtgaagcaggagaacgccgctgtgcaaaagatggtggaaaaccttaagaaacagatttctgagctcaaaatcaagaatcaacagcttgaccttgaaaacacagaactatcgcagaagaatagccagaaccaggagaaattacaggaactgaaccagcgcctgactgaaatgctgtgtcagaaggaaaaggagccgggtaattcggcacttgaggagagagaacaggaaaagtttaacctaaaagaggagctcgagcgttgtaaggtccaatcatcaactctcgtgagtagtctggaagcagagctgtctgaggtgaagatacaaactcacatcgtgcagcaggaaaatcacttactgaaggacgaactggaaaagatgaagcaactgcataggtgtccagacctcagcgattttcaacagaagattagtagtgtcctatcttataatgagaaattgctcaaagagaaggaggccctgagcgaggaactgaattcgtgcgtcgataagcttgccaagtccagcctgcttgaacacaggattgcaacaatgaagcaggaacagaaaagctgggagcatcaaagcgcttccctcaaatcacaactggtcgcgtcccaagagaaggtgcagaacttagaggataccgtgcagaacgttaacctacagatgtctcgcatgaaaagcgatctccgggtgacccagcaggagaaggaggccctgaagcaagaggtcatgtccttacataaacagctgcagaacgctggggggaagtcttgggcaccagagatagcaacccacccttccggcttgcataaccagcaaaagcgtctgtcttgggacaaacttgatcatctaatgaatgaggagcagcaattactctggcaagagaacgaaaggctgcagactatggtacagaataccaaagccgagctaacccattcacgagaaaaggtccgccagcttgaatccaatctgctgcctaaacatcagaagcacctaaacccctccggtaccatgaatccgacggagcaggaaaagctgagcctgaagcgcgagtgtgatcaatttcagaaggagcagtcccccgccaacagaaaggtgtctcagatgaacagccttgagcaggagcttgagacgattcacctagagaatgaaggacttaagaaaaagcaggtgaaactggacgaacagcttatggagatgcaacacttaagatcgactgcaacacctagccctagtcctcatgcttgggacctccaactactccaacagcaggcctgtcccatggtgcccagggagcaattcctgcaactccaacgacagcttctgcaggctgagagaatcaatcagcatctgcaggaggagttggagaaccggactagtgagaccaacactcctcaggggaatcaggagcaactcgtgaccgtgatggaagagcgcatgatagaggtagaacagaaactgaaacttgtcaagaggctgttgcaggagaaggtgaaccagctgaaagagcaggtgtcattgccaggacacctttgttcacctacctcacactcttccttcaattcctcatttacctctctttactgccactag

SEQ ID NO: 257429 - DNA, 6272 bp, Artificial Sequence
  derived and/or modified sequence
atggatgaagtagagcaggatcagcatgaagcacgcttgaaagaattgttcgatagcttcgatacaacagggacagggagtctcggtcaggaggagttgaccgacctgtgccatatgctatccctggaggaagtggctcctgtactgcagcagaccttactgcaggacaatcttcttgggagagttcattttgatcagttcaaagaagcactgattttaattctgtccaggactttgtctaacgaggaacactttcaggaacctgactgcagtttagaggcgcagcctaagtacgtgcgtggtggcaagagatatggacgacggagcttgcctgaatttcaggaatccgtggaggaattccccgaggtaacagtgatagagccgcttgacgaagaggctaggccaagccatatacccgcaggcgactgttctgagcattggaagacccagcgtagcgaagagtacgaagccgaagggcaattacgtttttggaatcccgatgacctcaatgcttcacagtcaggcagtagcccacctcaagactggatcgaggagaagctacaggaggtgtgtgaagacctaggtattactagggacggccacctgaatagaaaaaagttggtgtctatctgtgaacagtatgggttgcagaatgttgatggcgagatgctagaagaagtgttccacaatctggatccggatggcacaatgtctgtggaagactttttctatggactcttcaaaaatggaaagagcttaactcctagcgccagcacgccctatcggcagctgaagagacacctctccatgcagagctttgatgagagtggaaggagaactacgacatcaagcgccatgaccagtacgataggcttccgcgttttctcgtgccttgatgacggaatgggccatgctagcgtcgagagaatcctggacacttggcaggaagaaggtattgagaactcccaggagattctaaaggctctagactttagtctcgatgggaatattaatcttacagaactgacactggccctcgagaatgaactgctcgtgacaaaaaattctatccatcaagccgcactggctagcttcaaagctgagatccgacacctcctggagagagtggatcaggtggtgcgagagaaggaaaaacttcgttctgacttggataaagctgaaaaattgaaatcgctgatggcctcagaggtcgacgaccaccacgccgcaatagagcgtcgcaacgaatacaacttgcgcaaactggacgaagagtataaggaaagaatcgcagcactgaaaaatgaattgaggaaggaacgggaacagatcctgcagcaagcaggcaaacagcggctggaactggagcaggagatcgaaaaggccaaaacagaggaaaattatattagggaccggctggctttgtcattgaaagaaaattccagacttgaaaacgaacttttggagaacgccgagaaactcgccgagtatgagaatcttacaaataaattgcaacgaaacctcgaaaacgttttggcagagaaatttggcgaccttgacccctcatccgcagaatttttcttgcaggaggagcggttgacccagatgcgtaacgaatacgaaaggcagtgcagagtcctgcaggatcaagttgatgagttgcagtcggagctcgaggagtaccgagcccagggccgagtgcttcgcctcccattgaaaaacagcccttcggaagaagttgaagcaaattcaggagggatcgaacctgaacatggactcggcagcgaagaatgcaatccattaaatatgagcattgaggcagaacttgtaatcgagcagatgaaagagcagcaccatcgcgacatttgctgtctccggctggagctggaagacaaggttcgtcactacgagaagcagctcgacgaaactgtggtcagctgcaaaaaggcacaggagaatatgaagcaaaggcacgaaaacgagacacacactctggagaaacagatctctgacctaaaaaacgaaattgccgagctgcaaggccaggctgctgtgttgaaggaggcacaccatgaggcaacttgtcgacatgaagaggaaaaaaagcaactccaggttaaactcgaagaggagaagacacaccttcaggaaaaactgaggctccagcatgagatggagctaaaagccaggctgacacaggcgcaagcttcgtttgagcgggagcgagagggtctccagagttcagcgtggacagaggaaaaagtccgaggactgacacaggaactggaacagtttcatcaggagcagctcacatctttggtagaaaaacacaccctggagaaggaggagttacgcaaggaacttctggaaaaacaccaacgagagttacaggaaggacgcgagaaaatggagacagagtgcaataggcgcacgtcccagatcgaggcccaattccagagtgactgtcagaaagttacagagaggtgtgagagtgcgctgcagagcttagaaggccgttaccggcaggagttgaaggatctgcaagaacagcagagagaggaaaagagtcaatgggagttcgagaaagatgaactgactcaggagtgtgccgaggcacaggagctcctgaaggaaactctgaagcgggagaagacaacctcgctcgtgctcacgcaagaacgcgagatgcttgagaaaacctacaaagagcatctgaattccatggtggtcgagcgacaacaacttctgcaagatctggaggaccttcgcaacgtgagcgagacccaacaaagcctgctgagtgatcaaatcctggagctgaagtcctctcacaagcgcgagcttagggagcgggaggaagtcctctgccaggccggagcctcagaacaactggcctcccaaagattggagcgcctggagatggagcacgatcaggaacggcaagaaatgatgagcaagttactcgcaatggaaaatatacacaaggctacttgcgagacagccgatcgagaaagagccgagatgtctacagagatctcacgccttcagagcaaaattaaggaaatgcagcaggcgactagcccattgtccatgctgcagagcggctgtcaggttattggggaagaagaggtcgagggtgatggcgcactatcattgctgcagcagggagagcagcttctggaggaaaatggcgacgtcctgttgtccctgcagcgtgcccacgagcaggcagtaaaggagaatgtcaaaatggctactgagatcagcaggctgcaacaacggctccagaaactcgaacccggattggtgatgagcagctgtttggatgagcccgcaactgaattctttgggaacacggcagaacagaccgaacagtttctccagcaaaatcgcaccaagcaggtggaaggggttactcgcagacacgttctgtctgacctcgaggacgacgaggtcagagaccttggctcaaccggcacatcctctgtgcaacggcaggaagtgaagatagaagaaagcgaggcctcagtcgaaggcttcagcgaacttgaaaacagtgaagagactagaactgagtcctgggagcttaaaaatcagatctcacagttgcaggaacaacttatgatgctgtgcgctgactgcgaccgcgcatcagaaaaaaaacaggacctgttgttcgatgtgtcagtgttgaagaagaaacttaagatgctcgagcgtatccccgaagcatcaccgaaatacaaattgctatacgaggatgtgtccagggagaacgattgtctgcaggaagaactgcggatgatggaaacgagatatgatgaagccttagagaacaacaaggaactcactgcagaggttttcagactgcaggacgagcttaaaaaaatggaagaagtgacagaaaccttcctaagtctcgagaagagctacgatgaggtcaaaatcgaaaatgagggcctgaatgtcctggtacttcgtctgcaaggaaagatcgaaaagctacaggagagtgtcgtgcaaaggtgcgactgctgtctgtgggaggcttctctcgagaatctcgaaatagaaccggatggtaatatcttacagctcaatcagacattggaggaatgcgtgccgagagtgcgctccgtgcaccacgtcatcgaagagtgtaaacaggagaaccagtatttagaagggaatactcagctattggaaaaagttaaggctcatgaaatagcttggcttcacggcaccattcaaactcaccaggaaagaccgagggtccagaatcaagtcatattagaagagaacaccactttgctgggtttccaagacaagcactttcagcaccaggctaccattgcggagctggagctggaaaagactaagctccaggagcttactaggaaactgaaggagagagtcaccattttagtcaaacagaaagatgtgctgagccatggcgaaaaagaggaagaattaaaggccatgatgcatgatctgcagataacatgctcagagatgcaacagaaggtagagttgctccgttacgagagtgaaaagctccagcaggagaattccatactgcgaaatgagattactactctcaacgaggaagattcaatcagtaatctgaaactggggactctgaatggaagccaggaggagatgtggcaaaaaaccgaaactgtgaagcaggaaaatgccgctgtgcagaaaatggtcgaaaatttgaaaaagcaaatcagcgagctgaaaatcaaaaatcagcagctcgacctagagaataccgaacttagccaaaaaaattcccagaaccaggagaagctccaagaattgaaccagaggttgacagagatgctctgtcaaaaggagaaggagcccggaaactccgctttggaagagcgagagcaagaaaaatttaaccttaaggaggagctggagcgttgcaaagtacagtcaagtacgttggtttcatctctcgaagctgaactgagtgaggtgaagattcaaactcacatcgtgcagcaagagaaccacttgttgaaggatgaactggaaaaaatgaagcagctgcatcgctgcccagaccttagtgactttcagcagaaaatctcctcggtcctgagctataatgaaaaactcctgaaagagaaagaggcactcagcgaggagcttaacagctgcgtcgacaagctggcaaaatcttcgttactggagcatcgcatcgccacaatgaaacaggagcagaagtcatgggagcatcagtcagcttccctaaaatcccagctggtcgctagccaagagaaggtccaaaatctcgaggacactgttcagaacgtgaacttgcagatgagccggatgaaaagcgacctgagagtgacacagcaggaaaaggaagctctgaagcaagaggtgatgtctctgcataagcagctccagaatgccggtggaaaaagctgggcacctgaaattgcaactcatccctcagggctccacaaccagcaaaagcgcctctcctgggacaaacttgaccaccttatgaacgaggaacagcaacttctgtggcaagaaaatgagagactccaaacaatggtgcaaaacaccaaagcagagctgacacatagtcgggaaaaggttcgccagctggaatctaacctgctcccgaagcaccaaaaacatctaaacccctccggtaccatgaatcctaccgaacaggaaaaactgagcctgaaacgcgagtgtgaccagttccagaaggagcaatctccggctaatagaaaggtgtcccagatgaattccctggaacaggaattggagacaatccatctcgagaacgaggggctaaagaaaaagcaggtgaagctcgacgagcagctgatggagatgcagcacctgaggtccaccgccacgcccagtccgtcaccacatgcttgggacctacaattactgcagcagcaggcgtgccctatggtacctcgggaacagtttttgcagcttcagcggcagcttcttcaggctgagcggatcaaccagcacctccaagaggaactggagaacaggacctcagagacaaatacccctcagggaaatcaagagcagctggtcacggttatggaagagcgtatgattgaagttgaacagaagctcaaactggtcaaacgactgcttcaagagaaggtcaatcaattaaaggagcaggtttctctcccgggtcacctttgttctcccacttctcacagctccttcaactctagtttcaccagcttgtattgccacta

SEQ ID NO: 257430 - protein, 580 aa, Artificial Sequence
  derived and/or modified sequence
MRGGHKGGRCACPRVIRKVLAKCGCCFARGGRESYSIAGSEGSISASAASGLAAPSGPSSGLSSGPCSPGPPGPVSGLRRWLDHSKHCLSVETEADSGQAGPYENWMLEPALATGEELPELTLLTTLLEGPGDKTQPPEEETLSQAPESEEEQKKKALERSMYVLSELVETEKMYVDDLGQIVEGYMATMAAQGVPESLRGRDRIVFGNIQQIYEWHRDYFLQELQRCLKDPDWLAQLFIKHERRLHMYVVYCQNKPKSEHVVSEFGDSYFEELRQQLGHRLQLNDLLIKPVQRIMKYQLLLKDFLKYYNRAGMDTADLEQAVEVMCFVPKRCNDMMTLGRLRGFEGKLTAQGKLLGQDTFWVTEPEAGGLLSSRGRERRVFLFEQIIIFSEALGGGVRGGTQPGYVYKNSIKVSCLGLEGNLQGDPCRFALTSRGPEGGIQRYVLQAADPAISQAWIKHVAQILESQRDFLNALQSPIEYQRRESQTNSLGRPRGPGVGSPGRIQLGDQAQGSTHTPINGSLPSLLLSPKGEVARALLPLDKQALGDIPQAPHDSPPVSPTPKTPPCQARLAKLDEDEL

SEQ ID NO: 257431 - DNA, 1743 bp, Artificial Sequence
  derived and/or modified sequence
atgagaggcggccacaagggcggcagatgcgcctgccccagagtgatcagaaaggtgctggccaagtgcggctgctgcttcgccagaggcggcagagagagctacagcatcgccggcagcgagggcagcatcagcgccagcgccgccagcggcctggccgcccccagcggccccagcagcggcctgagcagcggcccctgcagccccggcccccccggccccgtgagcggcctgagaagatggctggaccacagcaagcactgcctgagcgtggagaccgaggccgacagcggccaggccggcccctacgagaactggatgctggagcccgccctggccaccggcgaggagctgcccgagctgaccctgctgaccaccctgctggagggccccggcgacaagacccagccccccgaggaggagaccctgagccaggcccccgagagcgaggaggagcagaagaagaaggccctggagagaagcatgtacgtgctgagcgagctggtggagaccgagaagatgtacgtggacgacctgggccagatcgtggagggctacatggccaccatggccgcccagggcgtgcccgagagcctgagaggcagagacagaatcgtgttcggcaacatccagcagatctacgagtggcacagagactacttcctgcaggagctgcagagatgcctgaaggaccccgactggctggcccagctgttcatcaagcacgagagaagactgcacatgtacgtggtgtactgccagaacaagcccaagagcgagcacgtggtgagcgagttcggcgacagctacttcgaggagctgagacagcagctgggccacagactgcagctgaacgacctgctgatcaagcccgtgcagagaatcatgaagtaccagctgctgctgaaggacttcctgaagtactacaacagagccggcatggacaccgccgacctggagcaggccgtggaggtgatgtgcttcgtgcccaagagatgcaacgacatgatgaccctgggcagactgagaggcttcgagggcaagctgaccgcccagggcaagctgctgggccaggacaccttctgggtgaccgagcccgaggccggcggcctgctgagcagcagaggcagagagagaagagtgttcctgttcgagcagatcatcatcttcagcgaggccctgggcggcggcgtgagaggcggcacccagcccggctacgtgtacaagaacagcatcaaggtgagctgcctgggcctggagggcaacctgcagggcgacccctgcagattcgccctgaccagcagaggccccgagggcggcatccagagatacgtgctgcaggccgccgaccccgccatcagccaggcctggatcaagcacgtggcccagatcctggagagccagagagacttcctgaacgccctgcagagccccatcgagtaccagagaagagagagccagaccaacagcctgggcagacccagaggccccggcgtgggcagccccggcagaatccagctgggcgaccaggcccagggcagcacccacacccccatcaacggcagcctgcccagcctgctgctgagccccaagggcgaggtggccagagccctgctgcccctggacaagcaggccctgggcgacatcccccaggccccccacgacagcccccccgtgagccccacccccaagacccccccctgccaggccagactggccaagctggacgaggacgagctgtag

SEQ ID NO: 257432 - DNA, 921 bp, Artificial Sequence
  derived and/or modified sequence
atgagaagcagccccggcctgtgcagccccccccccgaggaggagaccctgagccaggcccccgagagcgaggaggagcagaagaagaaggccctggagagaagcatgtacgtgctgagcgagctggtggagaccgagaagatgtacgtggacgacctgggccagatcgtggagggctacatggccaccatggccgcccagggcgtgcccgagagcctgagaggcagagacagaatcgtgttcggcaacatccagcagatctacgagtggcacagagactacttcctgcaggagctgcagagatgcctgaaggaccccgactggctggcccagctgttcatcaagcacgagagaagactgcacatgtacgtggtgtactgccagaacaagcccaagagcgagcacgtggtgagcgagttcggcgacagctacttcgaggagctgagacagcagctgggccacagactgcagctgaacgacctgctgatcaagcccgtgcagagaatcatgaagtaccagctgctgctgaaggacttcctgaagtactacaacagagccggcatggacaccgccgacctggagggcaagctgaccgcccagggcaagctgctgggccaggacaccttctgggtgaccgagcccgaggccggcggcctgctgagcagcagaggcagagagagaagagtgttcctgttcgagcagatcatcatcttcagcgaggccctgggcggcggcgtgagaggcggcacccagcccggctacgtgtacaagaacagcatgagacaggtgttctgccagatgcaggagctgccccagctgtggcacatcagcagagtggacttcgtgagaaacgccatcacccccagactgccccccctgatcctgctggccagccccgccagcgccctgaaccagacctag

SEQ ID NO: 257433 - DNA, 1743 bp, Artificial Sequence
  derived and/or modified sequence
atgagaggaggacacaagggaggcaggtgcgcgtgccctcgggtgattcgcaaggtccttgctaagtgcggatgctgctttgcaagaggaggccgtgaatcgtatagcattgccggatccgaaggaagcatcagtgccagtgccgcgagtggtctagctgcacccagcgggccatcttccggtttaagtagtggtccatgctctccggggccaccgggacccgtgagcggcctccgccggtggcttgaccacagcaaacattgtctgtcagtagagaccgaagcagatagtggacaggcgggtccttacgagaattggatgctagaaccagcccttgccaccggggaggagttacctgagctgaccctgctgactaccctcctggagggaccaggagacaagactcagcctccagaagaggaaactttgtctcaagcccccgagtcggaggaagagcagaaaaaaaaggccttagaaagatctatgtatgttctttccgaacttgtagagactgagaagatgtatgtcgacgatcttggtcagattgtggaaggctacatggcaacaatggccgctcaaggcgtgccagagagtctccgcggcagggatcgaattgtatttggaaacatccagcagatttacgagtggcaccgagattactttctgcaggagctgcagcgctgtcttaaagacccagattggctcgcccagctgttcatcaagcatgagcgaagattgcatatgtacgtggtgtactgccagaataagcccaagagcgaacatgtggtatcggaattcggagattcatacttcgaggaactccgtcaacagcttggtcatcggttgcagctgaatgaccttcttataaaacccgtgcagagaataatgaagtaccagctcctgttgaaggatttcctgaaatactacaaccgtgccggtatggatactgcagacttagagcaggccgtcgaggtcatgtgtttcgtgcctaagcggtgcaatgacatgatgactcttggcaggctgcgaggctttgagggaaagcttactgctcagggcaaactcctagggcaagataccttttgggtgaccgagcccgaggcaggcggccttttgtcttcacggggacgcgagcgacgggtgtttctcttcgagcaaattataattttctcagaggcactgggcggcggggtcagagggggcacccagcctggctacgtttacaagaactccatcaaggtatcatgtctagggctcgaaggcaatttgcagggcgacccctgccggttcgctctgacatcccgggggcctgagggggggattcagcggtacgtgctgcaggctgccgatcccgctatatctcaggcctggataaaacacgtagcacagatactagagagtcagagagacttcctgaacgctctgcaatcccctatagaataccagagaagggaatcccagacaaactctttgggtcggccaagaggacctggtgtcggaagccctggccgcatccaattgggggatcaggcccagggttcaactcataccccaatcaacggctctctcccctctcttctgctctcccccaagggagaggtggccagagcgctccttcctctggataagcaagctctgggagacatccctcaggcacctcacgactccccccctgtttccccaacgcccaaaacccccccgtgtcaagctagacttgcgaaactggatgaagacgagctgtag

SEQ ID NO: 257434 - DNA, 921 bp, Artificial Sequence
  derived and/or modified sequence
atgcggagttccccagggctatgtagcccccctcctgaagaagaaacactctcgcaagccccagagtccgaggaggagcagaaaaagaaggccctagagcgcagcatgtatgtattgtctgagctcgtagagactgagaagatgtatgtcgatgacctgggacagatcgttgaggggtatatggccacgatggccgcccagggagttcccgagtcgctacggggccgtgatagaatagtttttggcaatattcagcagatatatgagtggcacagggactactttctccaggaactccaaaggtgtcttaaggacccagactggctcgctcagctgttcattaagcacgagagacggctgcacatgtacgtggtgtactgccaaaataagccaaagtctgaacacgtggtgagtgagttcggcgattcttattttgaagagttgaggcaacagctgggccaccggctgcagctgaacgatctgctgataaaaccagtccagcgtattatgaagtaccaactcctgctgaaggattttctgaaatactacaacagggccggcatggacactgccgatttagaaggtaaactgacagcgcagggcaaactacttgggcaggatacgttttgggttactgaacctgaggccgggggcttgttaagtagcaggggcagagagcgaagagtgttcctgtttgagcagatcattatctttagcgaggcactgggcggcggtgtgcgcggcggcacccagcctgggtacgtctataaaaattctatgcggcaggtcttctgtcaaatgcaagagctcccacagctgtggcatattagcagggtcgatttcgtacggaacgccattacgccccggctgcccccattgatcctactggcctccccggcatctgctttgaaccaaacatag

SEQ ID NO: 257435 - DNA, 1743 bp, Artificial Sequence
  derived and/or modified sequence
atgagaggaggccacaagggcggccgctgtgcctgccccagggtcatcaggaaggtgctggccaagtgtggctgctgctttgcccggggcggccgggagagctacagcattgctggcagcgagggcagcatcagcgccagcgctgccagcggcctggccgcccccagcggccccagcagcggcctgagcagcggcccctgcagccctggccccccaggccctgtgtctggcctgcggcgctggctggaccacagcaagcactgcctgtctgtggagacagaagctgacagcggccaggccggcccctatgagaactggatgctggagcccgccctggccaccggggaggagctgcctgagctgaccctgctgaccaccctgctggagggccctggggacaagacccagcccccagaggaggagaccctgagccaggcccctgagagcgaggaggagcagaagaagaaggccctggagaggtccatgtatgtgctgtctgagctggtggagacagagaagatgtatgtggatgacctgggccagatcgtggagggctacatggccaccatggccgcccagggcgtgcctgagagcctgcggggccgggacagaattgtgtttggaaacatccagcagatctatgagtggcaccgggactacttcctgcaggagctgcagcgctgcctgaaggaccctgactggctggcccagctgttcatcaagcatgagcggcggctgcacatgtatgtggtgtactgccagaacaagcccaagtcagaacatgtggtgtctgaatttggagacagctactttgaggagctgcggcagcagctgggccaccggctgcagctgaatgacctgctgatcaagcctgtgcagaggatcatgaagtaccagctgctgctgaaggacttcctgaagtactacaacagagctggcatggacacagctgacctggagcaggccgtggaggtgatgtgctttgtgcccaagcgctgcaatgacatgatgaccctgggccgcctgcggggctttgagggcaagctgacagcccagggcaagctgctgggccaggacaccttctgggtgacagagcctgaggccggcggcctgctgagcagccggggccgggagaggagggtcttcctgtttgagcagatcatcatcttcagcgaggccctgggcggcggcgtgcggggcggcacccagcccggctacgtgtacaagaacagcatcaaggtgtcctgcctgggcctggagggcaacctgcagggcgacccctgccgctttgccctgaccagccggggccctgagggcggcatccagcgctacgtgctgcaggccgctgaccctgccatcagccaggcctggatcaagcacgtggcccagatcctggagagccagagggacttcctgaatgccctgcagagccccatcgagtaccagaggcgggagagccagaccaacagcctgggccggccccggggccctggggtgggcagccctggccgcatccagctgggggaccaggcccagggcagcacccacacccccatcaatggcagcctgcccagcctgctgctgagccccaagggggaggtggcccgggccctgctgcccctggacaagcaggccctgggggacatcccccaggcccctcatgacagcccccctgtgagccccacccccaagaccccaccctgccaggcccggctggccaagctggatgaagatgagctgtag

SEQ ID NO: 257436 - DNA, 921 bp, Artificial Sequence
  derived and/or modified sequence
atgaggagcagccctggcctgtgcagccccccacctgaggaggagaccctgagccaggcccctgagagcgaggaggagcagaagaagaaggccctggagaggtccatgtatgtgctgtctgagctggtggagacagagaagatgtatgtggatgacctgggccagatcgtggagggctacatggccaccatggccgcccagggcgtgcctgagagcctgcggggccgggacagaattgtgtttggaaacatccagcagatctatgagtggcaccgggactacttcctgcaggagctgcagcgctgcctgaaggaccctgactggctggcccagctgttcatcaagcatgagcggcggctgcacatgtatgtggtgtactgccagaacaagcccaagtcagaacatgtggtgtctgaatttggagacagctactttgaggagctgcggcagcagctgggccaccggctgcagctgaatgacctgctgatcaagcctgtgcagaggatcatgaagtaccagctgctgctgaaggacttcctgaagtactacaacagagctggcatggacacagctgacctggagggcaagctgacagcccagggcaagctgctgggccaggacaccttctgggtgacagagcctgaggccggcggcctgctgagcagccggggccgggagaggagggtcttcctgtttgagcagatcatcatcttcagcgaggccctgggcggcggcgtgcggggcggcacccagcccggctacgtgtacaagaacagcatgaggcaggtgttctgccagatgcaggagctgccccagctgtggcacatcagccgggtggactttgtgagaaatgccatcaccccccggctgcccccactcatcctgctggccagccctgccagcgccctgaaccagacctag

SEQ ID NO: 257437 - DNA, 1743 bp, Artificial Sequence
  derived and/or modified sequence
atgcggggcggccacaagggcggccggtgcgcctgcccccgggtgatccggaaagtccttgccaagtgcggatgttgttttgcgagaggaggtcgggagtcctactccatagcaggctctgaagggagcatttcagcatctgccgcctcgggcctcgccgcgcccagcggtccttcctctggactctctagtggtccatgttctcctggccctccaggtcccgtaagtggtctgaggaggtggctggatcactccaagcattgtctgagtgtggagactgaagctgacagcggacaggcaggcccttacgagaactggatgctggagccggcacttgctaccggtgaggagttacctgaactgacgctgctgacaactctcctcgagggacctggggataagacccagccaccagaggaggagaccctcagtcaagctcccgagagcgaagaggaacagaaaaagaaggcattggaacgcagtatgtatgtgctgtccgaactcgttgagacggagaaaatgtatgtcgatgacttgggccagatcgtggagggctacatggctactatggctgctcagggagtcccagaaagcctgagaggcagggatagaattgtgttcggaaacatccaacaaatctatgagtggcacagagactatttcctgcaggaactccagagatgtttgaaagacccagactggcttgctcaactctttattaagcacgagagaagactccatatgtatgtggtgtattgtcagaataagcccaagagcgagcatgttgtgtctgagtttggtgacagctacttcgaggagctccgacagcagttggggcatcgcctccagctgaatgacctcctgatcaagccggttcagagaattatgaagtaccagttgctgctgaaagacttcctcaagtactataatagggctggcatggacacggcagacctggaacaggctgttgaagtaatgtgtttcgtacccaaacggtgcaatgacatgatgacactggggaggttgcgcggctttgaagggaagttgaccgcgcagggcaagctgctgggccaggatacgttctgggtgaccgaaccggaggcaggaggtctgctgagcagtcgtggtagggaacgccgcgtcttcctgttcgagcagatcataatttttagtgaagccctgggaggtggagtgagagggggtacgcaaccaggatatgtgtacaaaaatagcatcaaagtctcatgcctcgggctagaagggaatctccagggtgacccgtgcagatttgcactcacttcgcgcggacccgaggggggaatccagaggtacgtgctgcaagctgccgacccggcgatttcgcaagcctggatcaaacacgtggcccagatcctggagtctcagagagatttcctgaacgctctccaaagtcccattgaatatcagcgcagggagtcacagacaaactcccttggacgcccccgcggaccaggcgtggggagtcctggaaggatccagctgggcgaccaggctcagggatcgacccatacccccattaacggtagtcttccctctttattgttatctccaaagggcgaggtggctagggcgttgcttccgctcgataagcaggcccttggtgacattccccaggcacctcacgattctccaccagtaagtccaactccaaagacccctccttgccaggcccgcctggccaagctggatgaggatgagctgtag

SEQ ID NO: 257438 - DNA, 921 bp, Artificial Sequence
  derived and/or modified sequence
atgcggagcagccccggcctgtgcagccccccccccgaggaggagacactgtcccaagcacccgaatccgaggaggaacaaaaaaaaaaggccctggagcgatccatgtacgtgctgtcagagttagtggagacagaaaagatgtacgttgacgacctcggccagattgtggagggttacatggccactatggccgcacaaggtgtcccagagagcctgagaggacgggatcggatcgtgttcggtaatatccagcagatctatgaatggcaccgggattactttctgcaagagctacagagatgcctgaaggaccctgattggttagcccaacttttcataaagcacgaacgacgtctacatatgtatgttgtctattgccagaacaaacccaagagcgagcatgtggtctcagaatttggggacagctacttcgaagagctcagacaacaactgggccatagattgcagcttaacgacctcctgattaaacctgtacaacggattatgaaatatcagctcctgctgaaagacttcttgaaatactacaacagagctggcatggataccgccgatctggagggtaaactaaccgcacagggcaaactcctggggcaggataccttctgggtcacggagcccgaagctggggggctgttgtcctcacggggccgagaaaggcgcgtttttctgttcgaacagataattatcttttctgaggcgcttggggggggggtgcgcggtggaactcagcctgggtacgtttataaaaactctatgagacaagtgttctgccagatgcaagagttgccccagctatggcatatctcaagagttgactttgtgcgcaacgcgataaccccacgacttccacctctgattttgttggcaagcccagcctctgccctgaatcagacgtag

SEQ ID NO: 257439 - DNA, 1743 bp, Artificial Sequence
  derived and/or modified sequence
atgaggggaggacacaaggggggtagatgcgcctgtcccagggtcattcggaaggtgctggctaaatgtggctgctgttttgcacgaggcggtagggagagttatagtatcgcaggcagtgagggctccattagcgcttctgcagcatcaggcctggcggctccaagcgggcctagcagtggactgtcttctgggccatgttccccaggacctcccggacctgtcagcggcttaagacggtggctggaccatagcaaacactgcttgagtgttgaaaccgaggccgactctggacaggcgggaccttacgaaaactggatgctagagcctgcgctcgccaccggggaggaactgcctgagttgaccttgctgaccacactgctggaaggccctggcgataagacccagccaccggaggaggagactctgtcccaagcacccgagtccgaggaggaacagaagaaaaaggcactggaaagaagtatgtatgtgctgtcagagcttgttgagaccgagaagatgtatgttgacgaccttgggcagattgtcgagggctatatggcaactatggcagcgcagggagtccccgagagcctcagaggccgagacagaattgtgttcggaaatattcagcagatttatgaatggcatagagattatttcctacaggagctgcaaagatgtctaaaagaccctgactggctggcacagctgttcattaaacacgagagaagactgcacatgtacgtggtgtactgccagaacaaacctaaatcagaacatgttgtgtctgagtttggggactcatatttcgaggaattgagacaacaactcggccacagacttcagttaaacgacctgttgataaaacctgtgcaaagaataatgaagtaccagttgctgctcaaagactttcttaagtactataaccgagccggaatggatacagccgatttggaacaagccgtcgaagtgatgtgtttcgtccccaaacgatgtaacgacatgatgacactaggtcggctgaggggcttcgagggaaaactgaccgcgcagggaaaattactgggccaggatacattttgggtgactgaaccagaggctggtggcttattgagttcccggggacgtgagcggagggtgttcttgtttgaacagatcattatcttttccgaggctttaggcggtggagtgcggggagggactcagcccggatacgtgtacaagaactcaattaaagtctcctgcctgggcctggaaggtaatcttcagggagacccctgccgttttgccctgacctcccggggtcctgaaggcggaatccaaaggtacgtgctgcaagctgctgatccagcaattagccaggcctggattaaacatgttgcgcagatcctcgaaagtcagagagacttcctcaacgccctgcagtccccgatagaataccagcgtagagaaagccaaactaactctctgggacggccacggggaccgggagtggggagtcctggcagaatccagctcggggaccaggcacagggtagcacccacaccccgatcaacgggtccctgccgtcgttgctcctgtctcctaaaggcgaggttgcaagggcactactgcctcttgacaagcaggctctgggggatatcccgcaggccccacacgactctccccctgtgtccccaaccccaaaaaccccgccatgccaggccagactcgccaaactggacgaggacgagctctag

SEQ ID NO: 257440 - DNA, 921 bp, Artificial Sequence
  derived and/or modified sequence
atgcgatcatctcctggtctgtgcagccccccacccgaggaagaaactttgagccaggctccagagtccgaggaagagcagaagaagaaggccttggagcggtcgatgtacgttctttctgaactggtcgaaaccgagaagatgtacgtagacgatcttggacagatcgtggaaggatacatggccaccatggctgctcaaggagtacccgaatctctgcgcggtcgcgacaggatcgttttcggcaacatacaacagatctatgaatggcatagggactattttcttcaggagttgcaaagatgtctgaaagatcccgactggttggctcagctgttcatcaagcacgaaaggcgactacacatgtacgtagtgtactgccaaaacaaacctaagtctgaacacgttgtctccgagttcggtgatagctattttgaagagctgcggcagcagctggggcataggctacagttaaatgacctcctcataaagccagtccagcggataatgaagtaccagctgctgcttaaagatttcctaaagtattacaatcgggctggcatggacaccgcagacctcgagggtaagttgaccgctcaaggcaaactactgggtcaggataccttctgggtgacagagcccgaagccggaggtctcctgtctagtaggggaagagagagacgagtctttctgtttgagcagattatcatcttctccgaggcccttggcggaggggtcaggggcggaacacaaccagggtatgtatacaaaaatagcatgcgccaggtgttctgccagatgcaggaactgccccaactctggcacatctctcgggtcgatttcgtgagaaatgccataacacccaggctccccccactcattttgctcgcctctccagcttctgcgctaaaccaaacctag

SEQ ID NO: 257441 - DNA, 2552 bp, Artificial Sequence
  derived and/or modified sequence
attcagctctccgctccgctgggacccgcacagcgccagtggctcgggggtcggccctcgcctcctccccggcccgggcctagagccacccctaaccagaggccggagacagctggagcggctgccgcatcccggcccagcctcccctaccatccctcccccttccactggacatctggaccctaggcccccgcaccgacagggttccggaaaccctccccgcccagcccggcggccgggccccgcgcctctctctctctagagcccccagccctcctcaagactagacttccgcctacccctggacacctcctcccggtcccctccctccccccctcccacagcctggaccggggtaggagggagggggggtgtgcgcccggcgccgtccccgccccgccccccgtgattccccctgcatggccggcccgggtggggggcgcgggggggcccgggcgccatgcggggggggcacaaagggggtcgctgtgcctgtccccgtgtgatccgaaaagtgctggcaaaatgcggctgctgcttcgcccgggggggacgtgaatcctattccattgcgggcagtgaggggagtatatcggcttctgctgcctccggtctggctgccccctctggccccagctctggcctcagctctggcccctgttccccaggccccccagggcccgtcagtggcctgaggagatggttggatcattccaaacattgtctcagtgtggaaactgaggcagacagtggtcaggcaggaccatatgagaactggatgttggagccagctctagccacaggagaggagctgccggaactgaccttgctgaccacactgttggagggccctggagataagacgcagccacctgaagaggagactttgtcccaagcccctgagagtgaggaggaacagaagaagaaggctctggaaaggagtatgtatgtcctgagtgaactggtagaaacagagaaaatgtacgtggacgacttggggcagattgtggagggttatatggccaccatggctgctcagggggtccccgagagtcttcgaggccgtgacaggattgtgtttgggaatatccagcaaatctatgagtggcaccgagactatttcttgcaagagctacaacggtgtctgaaagatcctgattggctggctcagctattcatcaaacacgagcgccggctgcatatgtatgtggtgtactgtcagaataagcccaagtcagagcatgtggtgtcagagtttggggacagctactttgaggagctccggcagcagctggggcaccgcctgcagctgaacgacctcctcatcaaacctgtgcagcggatcatgaaataccagctgctgctcaaggattttctcaagtattacaatagagctgggatggatactgcagacctagagcaagctgtggaggtcatgtgctttgtgcccaagcgctgcaacgatatgatgacgctggggagattgcggggatttgagggcaaactgactgctcaggggaagctcttgggccaggacactttctgggtcaccgagcctgaggctggagggctgctgtcttcccgaggtcgagagaggcgcgtcttcctctttgagcaaatcatcatcttcagtgaagccctgggaggaggagtgagaggtggaacacagcctggatatgtatacaagaacagcattaaggtgagctgcctgggactggaggggaacctccaaggtgacccttgccgctttgcactgacctccagagggccagagggtgggatccagcgctatgtcctgcaggctgcagaccctgctatcagtcaggcctggatcaagcatgtggctcagatcttggagagccaacgggacttcctcaacgcattgcagtcacccattgagtaccagagacgggagagccagaccaacagcctggggcggccaagagggcctggagtggggagccctggaagaattcagcttggagatcaggcccagggcagcacacacacacccatcaatggctctctcccctctctgctgctgtcacccaaaggggaggtggccagagccctcttgccactggataaacaggcccttggtgacatcccccaggctccccatgactctcctccagtctctccaactccaaaaacccctccctgccaagccagacttgccaagctggatgaagatgagctgtaactggtgaaaaccatgggggtggtgctgactcagccgcctattccccaaggagcttcagggcagtccttctggcactgctccagaattcctccttcttggtgtgtctggagggtgggcaaggctgggagggatatcaacttggaggagaacacctagacccaaggacttttttctgcccaaggaacacagtttccttcagctcccatccctatgcatgcatcatggtccccccaaaaggaggatatgtgggtgggtgggagggctggggcaggggccagatagaaattattggttttgttttttaattttgtttttcctgttttctgagaataaaggttttgttatatca

SEQ ID NO: 257442 - DNA, 1142 bp, Artificial Sequence
  derived and/or modified sequence
ctcgaccctgaaacttggagcagggtgggggttcagtatgaagcccccggaccgccccgcccctggccgcactgaccggatactgggggtcatggggggcatgctgcgcgcatgcgccctccctgggcaggaggggcccccaaggagaagccctctagggttggtgggtaccgagccagagtctgaacgtacggagggagatcacagaagggatcgcgaacatgaggtcctcgccggggctctgcagcccgccacctgaagaggagactttgtcccaagcccctgagagtgaggaggaacagaagaagaaggctctggaaaggagtatgtatgtcctgagtgaactggtagaaacagagaaaatgtacgtggacgacttggggcagattgtggagggttatatggccaccatggctgctcagggggtccccgagagtcttcgaggccgtgacaggattgtgtttgggaatatccagcaaatctatgagtggcaccgagactatttcttgcaagagctacaacggtgtctgaaagatcctgattggctggctcagctattcatcaaacacgagcgccggctgcatatgtatgtggtgtactgtcagaataagcccaagtcagagcatgtggtgtcagagtttggggacagctactttgaggagctccggcagcagctggggcaccgcctgcagctgaacgacctcctcatcaaacctgtgcagcggatcatgaaataccagctgctgctcaaggattttctcaagtattacaatagagctgggatggatactgcagacctagagggcaaactgactgctcaggggaagctcttgggccaggacactttctgggtcaccgagcctgaggctggagggctgctgtcttcccgaggtcgagagaggcgcgtcttcctctttgagcaaatcatcatcttcagtgaagccctgggaggaggagtgagaggtggaacacagcctggatatgtatacaagaacagcatgcgccaggtgttctgccagatgcaggaacttccacaactatggcacatcagccgagtggactttgtgagaaatgccattacccccagattgccccctctcatcttgttagcatccccagcctctgccctgaaccaaacctaa

SEQ ID NO: 257443 - protein, 467 aa, Artificial Sequence
  derived and/or modified sequence
MAAQGAAAAVAAGTSGVAGEGEPGPGENAAAEGTAPSPGRVSPPTPARGEPEVTVEIGETYLCRRPDSTWHSAEVIQSRVNDQEGREEFYVHYVGFNRRLDEWVDKNRLALTKTVKDAVQKNSEKYLSELAEQPERKITRNQKRKHDEINHVQKTYAEMDPTTAALEKEHEAITKVKYVDKIHIGNYEIDAWYFSPFPEDYGKQPKLWLCEYCLKYMKYEKSYRFHLGQCQWRQPPGKEIYRKSNISVYEVDGKDHKIYCQNLCLLAKLFLDHKTLYFDVEPFVFYILTEVDRQGAHIVGYFSKEKESPDGNNVACILTLPPYQRRGYGKFLIAFSYELSKLESTVGSPEKPLSDLGKLSYRSYWSWVLLEILRDFRGTLSIKDLSQMTSITQNDIISTLQSLNMVKYWKGQHVICVTPKLVEEHLKSAQYKKPPITGGWGAAVCRGRWGSVSIWTGRSQGLLIAVT

SEQ ID NO: 257444 - DNA, 1789 bp, Artificial Sequence
  derived and/or modified sequence
gtcacttcccttcccgcgatggcggcacagggagctgctgcggcggttgcggcggggacttcaggggtcgcgggggagggcgagcccgggcccggggagaatgcggccgctgaggggaccgccccatccccgggccgcgtctctccgccgaccccggcgcgcggcgagccggaagtcacggtggagatcggagaaacgtacctgtgccggcgaccggatagcacctggcattctgctgaagtgatccagtctcgagtgaacgaccaggagggccgagaggaattctatgtacactacgtgggctttaaccggcggctggacgagtgggtagacaagaaccggctggcgctgaccaagacagtgaaggatgctgtacagaagaactcagagaagtacctgagcgagctcgcagagcagcctgagcgcaagatcactcgcaaccaaaagcgcaagcatgatgagatcaaccatgtgcagaagacttatgcagagatggaccccaccacagcagccttggagaaggagcatgaggcgatcaccaaggtgaagtatgtggacaagatccacatcgggaactacgaaattgatgcctggtatttctcaccattccccgaagactatgggaaacagcccaagctctggctctgcgagtactgcctcaagtacatgaaatatgagaagagctaccgcttccacttgggtcagtgccagtggcggcagccccccgggaaagagatctaccgcaagagcaacatctccgtgtacgaagttgatggcaaagaccataagatttactgtcagaacctgtgtctgctggccaagcttttcctggaccataagacactgtactttgacgtggagccgttcgtcttttacatcctgactgaggtggaccggcagggggcccacattgttggctacttctccaaggagaaggagtccccggatggaaacaatgtggcctgcatcctgaccttgcccccctaccaacgccgcggctacgggaagttcctcatcgctttcagttatgagctctccaagctggagagcacagtcggctccccggagaagccactgtctgacctgggcaagctcagctaccgcagctactggtcctgggtgctgctagagatcctgcgggacttccggggcacactgtccatcaaggacctcagccagatgaccagtatcacccaaaatgacatcatcagtaccctgcaatccctcaatatggtcaagtactggaagggccagcacgtgatctgtgtcacacccaagctggtggaggagcacctcaaaagtgcccagtataagaaaccacccatcacaggtgggtggggggctgctgtgtgtcgggggcggtgggggagtgtcagtatatggactggtaggagtcaaggcctccttattgctgtcacatgatcccaaaccagtcagaccagctcccaggatggagcccggggcaggcctctcattcctgggcttccctacccctccccagcacagcctgcccttttgttctcacctggaggaggtgaaactggcctgagcccagaggagggcagccaggtgtgagctggcctggcccaggcccagccctgcctcccgccccttctccccacagtggactccgtctgcctcaagtgggcaccccccaagcacaagcaagtcaagctctccaagaagtgagcagcctggcccctgctgtcggacctgagcctcctggctcccagcctgtaaatatgtatagacctgttttgtcatttttttaataaagtcagttctggtg

SEQ ID NO: 257445 - DNA, 1404 bp, Artificial Sequence
  derived and/or modified sequence
atggccgcgcaaggggcagccgccgctgtagccgcaggcacctcgggagtagcaggtgaaggcgaacccggcccaggagagaatgctgccgctgaggggacggcaccatcccccggtcgggtgagcccgcctacaccagcccggggtgagccagaggtcactgtggagataggggagacctatctgtgcaggcgcccagacagcacatggcatagtgccgaagtgattcagtcacgtgtgaacgaccaggaaggtcgggaggaattttatgtccattacgtcggctttaatcgcaggcttgacgagtgggtcgacaaaaacagactggctttaacaaagaccgtcaaagacgccgtacagaagaacagtgaaaaatacctctctgagttagcagaacagccagaacggaaaataacacggaatcagaaaagaaagcacgacgaaattaatcacgtccagaaaacctatgccgagatggaccctacaacagccgctcttgaaaaagagcacgaggcaatcacaaaagtcaaatacgtcgacaagattcatatcggtaactacgagatagatgcttggtacttctcaccattcccggaagactacggtaaacagcccaagttatggctgtgcgaatactgcctcaagtatatgaaatatgagaagagttaccgctttcacctgggtcagtgccagtggagacaacctccaggtaaggagatataccggaaatctaacattagtgtatacgaagtcgacggaaaggaccacaaaatctattgtcagaacctgtgtctccttgcaaagctattcctcgaccacaaaaccctgtactttgatgttgagccttttgtgttttatattctcacagaggtggatcgacagggggcccacatcgtggggtattttagcaaggaaaaagaaagcccagacgggaataacgttgcatgtatactgacccttccaccctatcagcgacgtggttacggcaagtttcttatcgccttttcctacgaactttccaagttggagtccacggtagggtcaccagagaagcctttgtctgatcttggtaaattaagttatcgctcctattggtcatgggtgctcctggagatcctgcgcgatttccgaggaactctgtctattaaagatttatctcagatgacttccatcacccagaatgatatcatctcaacgctgcagagtctgaacatggtgaagtattggaagggacaacacgttatctgtgtgacccccaagttagttgaagaacatctgaaatctgcccagtataagaagccgcccattaccgggggatggggagcggctgtttgcagagggagatgggggtcagtatctatttggaccggacggagccagggcctgctaattgctgtgacatag

SEQ ID NO: 257446 - DNA, 1404 bp, Artificial Sequence
  derived and/or modified sequence
atggccgcccagggcgctgctgctgctgtggccgccggcaccagcggcgtggccggggagggggagcccggccctggagaaaatgctgctgctgagggcacagcccccagccctggccgggtgtccccacccaccccagcccggggggagcctgaggtgacagtggagattggagagacctacctgtgccggcggccagacagcacctggcacagcgctgaggtgatccagagccgggtgaatgaccaggagggccgggaggagttctacgtgcactacgtgggcttcaacagaaggctggatgagtgggtggacaagaaccggctggccctgaccaagacagtgaaggatgctgtgcagaagaacagcgagaagtacctgtctgagctggccgagcagcctgagaggaagatcaccaggaaccagaagaggaagcatgatgagatcaaccacgtgcagaagacctatgcagagatggaccccaccacagctgccctggagaaggagcacgaggccatcaccaaggtgaagtatgtggacaagatccacatcggcaactatgaaattgatgcctggtacttcagccccttcccagaagattatggcaagcagcccaagctgtggctgtgtgagtactgcctgaagtacatgaagtatgagaagagctaccgcttccacctgggccagtgccagtggaggcagcccccaggcaaggagatctacaggaagagcaacatctctgtgtatgaggtggatggcaaggaccacaagatctactgccagaacctgtgcctgctggccaagctgttcctggaccacaagaccctgtactttgatgtggagccctttgtgttctacatcctgacagaggtggaccggcagggcgcccacatcgtgggctacttcagcaaggagaaggagagcccagatggcaacaacgtggcctgcatcctgaccctgcccccctaccagaggcggggctacggcaagttcctgattgccttctcctatgagctgagcaagctggagagcacagtgggcagccctgagaagcccctgagtgacctgggcaagctgagctaccgcagctactggagctgggtgctgctggagatcctgcgggacttccggggcaccctgagcatcaaggacctgagccagatgaccagcatcacccagaatgacatcatcagcaccctgcagagcctgaacatggtgaagtactggaagggccagcacgtgatctgtgtgacccccaagctggtggaggagcacctgaagagcgcccagtacaagaagccacccatcactggaggctggggcgctgctgtgtgccggggccgctggggctctgtgtccatctggacaggccgcagccagggcctgctgattgctgtgacctag

SEQ ID NO: 257447 - DNA, 1404 bp, Artificial Sequence
  derived and/or modified sequence
atggccgcccagggcgccgccgccgccgtggccgccggcaccagcggcgtagccggcgagggtgagccaggacctggcgaaaacgccgctgctgagggcactgccccaagtcccggtcgcgtatctccacccacacctgcaaggggcgagcccgaagttaccgtggagataggtgagacctatctttgtcggagaccggatagcacgtggcactctgcagaagtgattcagtcccgagtgaacgaccaggaaggccgcgaagaattttacgtgcactacgttggattcaaccggcgattggatgaatgggttgacaaaaatagactcgcattgacgaagacggttaaggatgctgtgcagaagaattcagagaaatacctatctgaacttgctgaacagcccgaaaggaaaatcacccgcaaccagaaacgaaaacacgacgaaatcaaccacgtgcagaaaacgtatgccgaaatggacccaaccaccgccgccctggagaaggagcatgaggccattactaaagtgaaatatgttgacaagatccatattggtaattatgagattgatgcttggtacttcagtcctttccctgaggactacgggaagcagccaaaactttggctctgtgaatactgtttgaaatacatgaaatacgaaaagagttacaggttccatctgggtcaatgccaatggagacagcctcctggtaaagagatttatcgcaagtctaacatcagtgtgtatgaagttgatggcaaagaccacaaaatctactgccagaatctgtgcctgctcgcgaaactgttcctggaccataagactttgtactttgatgtcgaacccttcgtgttttacatacttactgaggtcgatcgacaaggtgcccacattgtagggtacttttcaaaggagaaagagtctcctgatgggaataacgttgcttgtatcctgactcttccaccctatcagaggcgtggctacgggaagttcctgattgccttttcttacgagttgagtaaactagaatccactgtgggttctcctgaaaaacccctgtccgatctgggaaaactttcataccggagctactggagttgggtgctgctggagattctgagggatttccggggaacgctgtcaattaaagacctgtcccagatgacaagtatcactcaaaacgacatcatcagtactctccagtcactcaacatggtgaaatattggaaagggcagcacgtgatttgcgttactcctaagctcgtggaggagcatttgaagtccgctcagtataaaaagccccctataacggggggatggggagccgcggtgtgcagaggtagatggggatcagtgtctatctggacaggtcgcagtcagggtctcctcatcgctgtgacttag

SEQ ID NO: 257448 - DNA, 1404 bp, Artificial Sequence
  derived and/or modified sequence
atggccgctcagggagctgcagctgctgttgcagctgggacctcaggtgttgccggagaaggagagcccggtccaggcgagaacgccgctgctgaggggactgcccctagtccaggcagggtctcccctcccactccagccaggggtgaacccgaggtaacagttgaaatcggggaaacctacttgtgccggaggcccgactccacctggcactctgcagaagtaatccagagccgcgtgaatgatcaagagggaagggaggaattctatgtgcattacgtgggctttaataggcgcctggatgagtgggtggacaagaatcgtctggccctcaccaagacagtgaaagacgccgtccaaaagaactcagagaagtatcttagcgaacttgcagagcagcccgagcgaaagatcacgagaaatcagaaacggaagcatgatgagattaaccacgttcagaagacttacgccgagatggaccctactacagctgcccttgaaaaggaacacgaagcgataactaaagttaaatacgtcgataagatccatattggaaattatgagatcgatgcatggtactttagcccgtttcccgaagactatggcaagcagccaaagttgtggctctgtgagtattgcctcaaatacatgaagtacgaaaagtcataccgctttcatctgggtcagtgccaatggaggcagcctccaggaaaagagatttaccgaaagagcaacatttctgtgtacgaggttgacggtaaggatcacaaaatctactgccagaacctgtgtcttctcgcgaaattgtttctcgaccacaaaaccttgtattttgatgtagaacccttcgtgttttacatcctcacagaggtggatagacaaggagcgcacatcgtgggttattttagcaaggagaaagaaagcccagacggcaataacgtcgcgtgcattctgacactacctccgtatcagaggagagggtatgggaagtttttgatcgcattcagttatgaactcagcaagctcgaatcgacggttgggtcaccagagaaacccctatcagatctgggcaaactgtcatataggagctattggagctgggtcctgctggagatcttgagggactttcggggaactctgagcatcaaggatctaagccaaatgacctccattacacagaatgatatcattagcacccttcagtccctgaacatggtgaaatactggaaaggtcagcatgtgatatgcgtcaccccaaaactagtcgaggagcacctcaagagcgcacagtacaagaaacctcctattacgggaggctggggcgctgctgtgtgtcgcggacgctgggggagcgtgagcatttggacaggccgaagtcagggcttactgattgccgtcacttag

SEQ ID NO: 257449 - DNA, 1404 bp, Artificial Sequence
  derived and/or modified sequence
atggccgcccagggcgccgccgccgccgtggccgccggcaccagcggcgtggccggcgagggcgagcccggccccggcgagaacgccgccgccgagggcaccgcccccagccccggcagagtgagcccccccacccccgccagaggcgagcccgaggtgaccgtggagatcggcgagacctacctgtgcagaagacccgacagcacctggcacagcgccgaggtgatccagagcagagtgaacgaccaggagggcagagaggagttctacgtgcactacgtgggcttcaacagaagactggacgagtgggtggacaagaacagactggccctgaccaagaccgtgaaggacgccgtgcagaagaacagcgagaagtacctgagcgagctggccgagcagcccgagagaaagatcaccagaaaccagaagagaaagcacgacgagatcaaccacgtgcagaagacctacgccgagatggaccccaccaccgccgccctggagaaggagcacgaggccatcaccaaggtgaagtacgtggacaagatccacatcggcaactacgagatcgacgcctggtacttcagccccttccccgaggactacggcaagcagcccaagctgtggctgtgcgagtactgcctgaagtacatgaagtacgagaagagctacagattccacctgggccagtgccagtggagacagccccccggcaaggagatctacagaaagagcaacatcagcgtgtacgaggtggacggcaaggaccacaagatctactgccagaacctgtgcctgctggccaagctgttcctggaccacaagaccctgtacttcgacgtggagcccttcgtgttctacatcctgaccgaggtggacagacagggcgcccacatcgtgggctacttcagcaaggagaaggagagccccgacggcaacaacgtggcctgcatcctgaccctgcccccctaccagagaagaggctacggcaagttcctgatcgccttcagctacgagctgagcaagctggagagcaccgtgggcagccccgagaagcccctgagcgacctgggcaagctgagctacagaagctactggagctgggtgctgctggagatcctgagagacttcagaggcaccctgagcatcaaggacctgagccagatgaccagcatcacccagaacgacatcatcagcaccctgcagagcctgaacatggtgaagtactggaagggccagcacgtgatctgcgtgacccccaagctggtggaggagcacctgaagagcgcccagtacaagaagccccccatcaccggcggctggggcgccgccgtgtgcagaggcagatggggcagcgtgagcatctggaccggcagaagccagggcctgctgatcgccgtgacctag

SEQ ID NO: 257450 - protein, 8797 aa, Artificial Sequence
  derived and/or modified sequence
MATSRGASRCPRDIANVMQRLQDEQEIVQKRTFTKWINSHLAKRKPPMVVDDLFEDMKDGVKLLALLEVLSGQKLPCEQGRRMKRIHAVANIGTALKFLEGRKIKLVNINSTDIADGRPSIVLGLMWTIILYFQIEELTSNLPQLQSLSSSASSVDSIVSSETPSPPSKRKVTTKIQGNAKKALLKWVQYTAGKQTGIEVKDFGKSWRSGVAFHSVIHAIRPELVDLETVKGRSNRENLEDAFTIAETELGIPRLLDPEDVDVDKPDEKSIMTYVAQFLKHYPDIHNASTDGQEDDEILPGFPSFANSVQNFKREDRVIFKEMKVWIEQFERDLTRAQMVESNLQDKYQSFKHFRVQYEMKRKQIEHLIQPLHRDGKLSLDQALVKQSWDRVTSRLFDWHIQLDKSLPAPLGTIGAWLYRAEVALREEITVQQVHEETANTIQRKLEQHKDLLQNTDAHKRAFHEIYRTRSVNGIPVPPDQLEDMAERFHFVSSTSELHLMKMEFLELKYRLLSLLVLAESKLKSWIIKYGRRESVEQLLQNYVSFIENSKFFEQYEVTYQILKQTAEMYVKADGSVEEAENVMKFMNETTAQWRNLSVEVRSVRSMLEEVISNWDRYGNTVASLQAWLEDAEKMLNQSENAKKDFFRNLPHWIQQHTAMNDAGNFLIETCDEMVSRDLKQQLLLLNGRWRELFMEVKQYAQADEMDRMKKEYTDCVVTLSAFATEAHKKLSEPLEVSFMNVKLLIQDLEDIEQRVPVMDAQYKIITKTAHLITKESPQEEGKEMFATMSKLKEQLTKVKECYSPLLYESQQLLIPLEELEKQMTSFYDSLGKINEIITVLEREAQSSALFKQKHQELLACQENCKKTLTLIEKGSQSVQKFVTLSNVLKHFDQTRLQRQIADIHVAFQSMVKKTGDWKKHVETNSRLMKKFEESRAELEKVLRIAQEGLEEKGDPEELLRRHTEFFSQLDQRVLNAFLKACDELTDILPEQEQQGLQEAVRKLHKQWKDLQGEAPYHLLHLKIDVEKNRFLASVEECRTELDRETKLMPQEGSEKIIKEHRVFFSDKGPHHLCEKRLQLIEELCVKLPVRDPVRDTPGTCHVTLKELRAAIDSTYRKLMEDPDKWKDYTSRFSEFSSWISTNETQLKGIKGEAIDTANHGEVKRAVEEIRNGVTKRGETLSWLKSRLKVLTEVSSENEAQKQGDELAKLSSSFKALVTLLSEVEKMLSNFGDCVQYKEIVKNSLEELISGSKEVQEQAEKILDTENLFEAQQLLLHHQQKTKRISAKKRDVQQQIAQAQQGEGGLPDRGHEELRKLESTLDGLERSRERQERRIQVTLRKWERFETNKETVVRYLFQTGSSHERFLSFSSLESLSSELEQTKEFSKRTESIAVQAENLVKEASEIPLGPQNKQLLQQQAKSIKEQVKKLEDTLEEDIKTMEMVKTKWDHFGSNFETLSVWITEKEKELNALETSSSAMDMQISQIKVTIQEIESKLSSIVGLEEEAQSFAQFVTTGESARIKAKLTQIRRYGEELREHAQCLEGTILGHLSQQQKFEENLRKIQQSVSEFEDKLAVPIKICSSATETYKVLQEHMDLCQALESLSSAITAFSASARKVVNRDSCVQEAAALQQQYEDILRRAKERQTALENLLAHWQRLEKELSSFLTWLERGEAKASSPEMDISADRVKVEGELQLIQALQNEVVSQASFYSKLLQLKESLFSVASKDDVKMMKLHLEQLDERWRDLPQIINKRINFLQSVVAEHQQFDELLLSFSVWIKLFLSELQTTSEISIMDHQVALTRHKDHAAEVESKKGELQSLQGHLAKLGSLGRAEDLHLLQGKAEDCFQLFEEASQVVERRQLALSHLAEFLQSHASLSGILRQLRQTVEATNSMNKNESDLIEKDLNDALQNAKALESAAVSLDGILSKAQYHLKIGSSEQRTSCRATADQLCGEVERIQNLLGTKQSEADALAVLKKAFQDQKEELLKSIEDIEERTDKERLKEPTRQALQQRLRVFNQLEDELNSHEHELCWLKDKAKQIAQKDVAFAPEVDREINRLEVTWDDTKRLIHENQGQCCGLIDLMREYQNLKSAVSKVLENASSVIVTRTTIKDQEDLKWAFSKHETAKNKMNYKQKDLDNFTSKGKHLLSELKKIHSSDFSLVKTDMESTVDKWLDVSEKLEENMDRLRVSLSIWDDVLSTRDEIEGWSNNCVPQMAENISNLDNHLRAEELLKEFESEVKNKALRLEELHSKVNDLKELTKNLETPPDLQFIEADLMQKLEHAKEITEVAKGTLKDFTAQSTQVEKFINDITTWFTKVEESLMNCAQNETCEALKKVKDIQKELQSQQSNISSTQENLNSLCRKYHSAELESLGRAMTGLIKKHEAVSQLCSKTQASLQESLEKHFSESMQEFQEWFLGAKAAAKESSDRTGDSKVLEAKLHDLQNILDSVSDGQSKLDAVTQEGQTLYAHLSKQIVSSIQEQITKANEEFQAFLKQCLKDKQALQDCASELGSFEDQHRKLNLWIHEMEERFNTENLGESKQHIPEKKNEVHKVEMFLGELLAARESLDKLSQRGQLLSEEGHGAGQEGRLCSQLLTSHQNLLRMTKEKLRSCQVALQEHEALEEALQSMWFWVKAIQDRLACAESTLGSKDTLEKRLSQIQDILLMKGEGEVKLNMAIGKGEQALRSSNKEGQRVIQTQLETLKEVWADIMSSSVHAQSTLESVISQWNDYVERKNQLEQWMESVDQKIEHPLQPQPGLKEKFVLLDHLQSILSEAEDHTRALHRLIAKSRELYEKTEDESFKDTAQEELKTQFNDIMTVAKEKMRKVEEIVKDHLMYLDAVHEFTDWLHSAKEELHRWSDMSGDSSATQKKLSKIKELIDSREIGASRLSRVESLAPEVKQNTTASGCELMHTEMQALRADWKQWEDSVFQTQSCLENLVSQMALSEQEFSGQVAQLEQALEQFSALLKTWAQQLTLLEGKNTDEEIVECWHKGQEILDALQKAEPRTEDLKSQLNELCRFSRDLSTYSGKVSGLIKEYNCLCLQASKGCQNKEQILQQRFRKAFRDFQQWLVNAKITTAKCFDIPQNISEVSTSLQKIQEFLSESENGQHKLNMMLSKGELLSTLLTKEKAKGIQAKVTAAKEDWKNFHSNLHQKESALENLKIQMKDFEVSAEPIQDWLSKTEKMVHESSNRLYDLPAKRREQQKLQSVLEEIHCYEPQLNRLKEKAQQLWEGQAASKSFRHRVSQLSSQYLALSNLTKEKVSRLDRIVAEHNQFSLGIKELQDWMTDAIHMLDSYCHPTSDKSVLDSRTLKLEALLSVKQEKEIQMKMIVTRGESVLQNTSPEGIPTIQQQLQSVKDMWASLLSAGIRCKSQLEGALSKWTSYQDGVRQFSGWMDSMEANLNESERQHAELRDKTTMLGKAKLLNEEVLSYSSLLETIEVKGAGMTEHYVTQLELQDLQERYRAIQERAKEAVTKSEKLVRLHQEYQRDLKAFEVWLGQEQEKLDQYSVLEGDAHTHETTLRDLQELQVHCAEGQALLNSVLHTREDVIPSGIPQAEDRALESLRQDWQAYQHRLSETRTQFNNVVNKLRLMEQKFQQVDEWLKTAEEKVSPRTRRQSNRATKEIQLHQMKKWHEEVTAYRDEVEEVGARAQEILDESHVNSRMGCQATQLTSRYQALLLQVLEQIKFLEEEIQSLEESESSLSSYSDWYGSTHKNFKNVATKIDKVDTVMMGKKLKTLEVLLKDMEKGHSLLKSAREKGERAVKYLEEGEAERLRKEIHDHMEQLKELTSTVRKEHMTLEKGLHLAKEFSDKCKALTQWIAEYQEILHVPEEPKMELYEKKAQLSKYKSLQQTVLSHEPSVKSVREKGEALLELVQDVTLKDKIDQLQSDYQDLCSIGKEHVFSLEAKVKDHEDYNSELQEVEKWLLQMSGRLVAPDLLETSSLETITQQLAHHKAMMEEIAGFEDRLNNLQMKGDTLIGQCADHLQAKLKQNVHAHLQGTKDSYSAICSTAQRMYQSLEHELQKHVSRQDTLQQCQAWLSAVQPDLEPSPQPPLSRAEAIKQVKHFRALQEQARTYLDLLCSMCDLSNASVKTTAKDIQQTEQTIEQKLVQAQNLTQGWEEIKHLKSELWIYLQDADQQLQNMKRRHSELELNIAQNMVSQVKDFVKKLQSKQASVNTIIEKVNKLTKKEESPEHKEINHLNDQWLDLCRQSNNLCLQREEDLQRTRDYHDCMNVVEVFLEKFTTEWDNLARSDAESTAVHLEALKKLALALQERKYAIEDLKDQKQKMIEHLNLDDKELVKEQTSHLEQRWFQLEDLIKRKIQVSVTNLEELNVVQSRFQELMEWAEEQQPNIAEALKQSPPPDMAQNLLMDHLAICSELEAKQMLLKSLIKDADRVMADLGLNERQVIQKALSDAQSHVNCLSDLVGQRRKYLNKALSEKTQFLMAVFQATSQIQQHERKIMFREHICLLPDDVSKQVKTCKSAQASLKTYQNEVTGLWAQGRELMKEVTEQEKSEVLGKLQELQSVYDSVLQKCSHRLQELEKNLVSRKHFKEDFDKACHWLKQADIVTFPEINLMNESSELHTQLAKYQNILEQSPEYENLLLTLQRTGQTILPSLNEVDHSYLSEKLNALPRQFNVIVALAKDKFYKVQEAILARKEYASLIELTTQSLSELEAQFLRMSKVPTDLAVEEALSLQDGCRAILDEVAGLGEAVDELNQKKEGFRSTGQPWQPDKMLHLVTLYHRLKRQTEQRVSLLEDTTSAYQEHEKMCQQLERQLKSVKEEQSKVNEETLPAEEKLKMYHSLAGSLQDSGIVLKRVTIHLEDLAPHLDPLAYEKARHQIQSWQGELKLLTSAIGETVTECESRMVQSIDFQTEMSRSLDWLRRVKAELSGPVYLDLNLQDIQEEIRKIQIHQEEVQSSLRIMNALSHKEKEKFTKAKELISADLEHSLAELSELDGDIQEALRTRQATLTEIYSQCQRYYQVFQAANDWLEDAQELLQLAGNGLDVESAEENLKSHMEFFSTEDQFHSNLEELHSLVATLDPLIKPTGKEDLEQKVASLELRSQRMSRDSGAQVDLLQRCTAQWHDYQKAREEVIELMNDTEKKLSEFSLLKTSSSHEAEEKLSEHKALVSVVNSFHEKIVALEEKASQLEKTGNDASKATLSRSMTTVWQRWTRLRAVAQDQEKILEDAVDEWTGFNNKVKKATEMIDQLQDKLPGSSAEKASKAELLTLLEYHDTFVLELEQQQSALGMLRQQTLSMLQDGAAPTPGEEPPLMQEITAMQDRCLNMQEKVKTNGKLVKQELKDREMVETQINSVKCWVQETKEYLGNPTIEIDAQLEELQILLTEATNHRQNIEKMAEEQKEKYLGLYTILPSELSLQLAEVALDLKIRDQIQDKIKEVEQSKATSQELSRQIQKLAKDLTTILTKLKAKTDNVVQAKTDQKVLGEELDGCNSKLMELDAAVQKFLEQNGQLGKPLAKKIGKLTELHQQTIRQAENRLSKLNQAASHLEEYNEMLELILKWIEKAKVLAHGTIAWNSASQLREQYILHQTLLEESKEIDSELEAMTEKLQYLTSVYCTEKMSQQVAELGRETEELRQMIKIRLQNLQDAAKDMKKFEAELKKLQAALEQAQATLTSPEVGRLSLKEQLSHRQHLLSEMESLKPKVQAVQLCQSALRIPEDVVASLPLCHAALRLQEEASRLQHTAIQQCNIMQAAVVQYEQYEQEMKHLQQLIEGAHREIEDKPVATSNIQELQAQISRHEELAQKIKGYQEQIASLNSKCKMLTMKAKHATMLLTVTEVEGLAEGTEDLDGELLPTPSAHPSVVMMTAGRCHTLLSPVTEESGEEGTNSEISSPPACRSPSPVANTDASVNQDIAYYQALSAERLQTDAAKIHPSTSASQEFYEPGLEPSATAKLGDLQRSWETLKNVISEKQRTLYEALERQQKYQDSLQSISTKMEAIELKLSESPEPGRSPESQMAEHQALMDEILMLQDEINELQSSLAEELVSESCEADPAEQLALQSTLTVLAERMSTIRMKASGKRQLLEEKLNDQLEEQRQEQALQRYRCEADELDSWLLSTKATLDTALSPPKEPMDMEAQLMDCQNMLVEIEQKVVALSELSVHNENLLLEGKAHTKDEAEQLAGKLRRLKGSLLELQRALHDKQLNMQGTAQEKEESDVDLTATQSPGVQEWLAQARTTWTQQRQSSLQQQKELEQELAEQKSLLRSVASRGEEILIQHSAAETSGDAGEKPDVLSQELGMEGEKSSAEDQMRMKWESLHQEFSTKQKLLQNVLEQEQEQVLYSRPNRLLSGVPLYKGDVPTQDKSAVTSLLDGLNQAFEEVSSQSGGAKRQSIHLEQKLYDGVSATSTWLDDVEERLFVATALLPEETETCLFNQEILAKDIKEMSEEMDKNKNLFSQAFPENGDNRDVIEDTLGCLLGRLSLLDSVVNQRCHQMKERLQQILNFQNDLKVLFTSLADNKYIILQKLANVFEQPVAEQIEAIQQAEDGLKEFDAGIIELKRRGDKLQVEQPSMQELSKLQDMYDELMMIIGSRRSGLNQNLTLKSQYERALQDLADLLETGQEKMAGDQKIIVSSKEEIQQLLDKHKEYFQGLESHMILTETLFRKIISFAVQKETQFHTELMAQASAVLKRAHKRGVELEYILETWSHLDEDQQELSRQLEVVESSIPSVGLVEENEDRLIDRITLYQHLKSSLNEYQPKLYQVLDDGKRLLISISCSDLESQLNQLGECWLSNTNKMSKELHRLETILKHWTRYQSESADLIHWLQSAKDRLEFWTQQSVTVPQELEMVRDHLNAFLEFSKEVDAQSSLKSSVLSTGNQLLRLKKVDTATLRSELSRIDSQWTDLLTNIPAVQEKLHQLQMDKLPSRHAISEVMSWISLMENVIQKDEDNIKNSIGYKAIHEYLQKYKGFKIDINCKQLTVDFVNQSVLQISSQDVESKRSDKTDFAEQLGAMNKSWQILQGLVTEKIQLLEGLLESWSEYENNVQCLKTWFETQEKRLKQQHRIGDQASVQNALKDCQDLEDLIKAKEKEVEKIEQNGLALIQNKKEDVSSIVMSTLRELGQTWANLDHMVGQLKILLKSVLDQWSSHKVAFDKINSYLMEARYSLSRFRLLTGSLEAVQVQVDNLQNLQDDLEKQERSLQKFGSITNQLLKECHPPVTETLTNTLKEVNMRWNNLLEEIAEQLQSSKALLQLWQRYKDYSKQCASTVQQQEDRTNELLKAATNKDIADDEVATWIQDCNDLLKGLGTVKDSLFFLHELGEQLKQQVDASAASAIQSDQLSLSQHLCALEQALCKQQTSLQAGVLDYETFAKSLEALEAWIVEAEEILQGQDPSHSSDLSTIQERMEELKGQMLKFSSMAPDLDRLNELGYRLPLNDKEIKRMQNLNRHWSLISSQTTERFSKLQSFLLQHQTFLEKCETWMEFLVQTEQKLAVEISGNYQHLLEQQRAHELFQAEMFSRQQILHSIIIDGQRLLEQGQVDDRDEFNLKLTLLSNQWQGVIRRAQQRRGIIDSQIRQWQRYREMAEKLRKWLVEVSYLPMSGLGSVPIPLQQARTLFDEVQFKEKVFLRQQGSYILTVEAGKQLLLSADSGAEAALQAELAEIQEKWKSASMRLEEQKKKLAFLLKDWEKCEKGIADSLEKLRTFKKKLSQSLPDHHEELHAEQMRCKELENAVGSWTDDLTQLSLLKDTLSAYISADDISILNERVELLQRQWEELCHQLSLRRQQIGERLNEWAVFSEKNKELCEWLTQMESKVSQNGDILIEEMIEKLKKDYQEEIAIAQENKIQLQQMGERLAKASHESKASEIEYKLGKVNDRWQHLLDLIAARVKKLKETLVAVQQLDKNMSSLRTWLAHIESELAKPIVYDSCNSEEIQRKLNEQQELQRDIEKHSTGVASVLNLCEVLLHDCDACATDAECDSIQQATRNLDRRWRNICAMSMERRLKIEETWRLWQKFLDDYSRFEDWLKSSERTAAFPSSSGVIYTVAKEELKKFEAFQRQVHECLTQLELINKQYRRLARENRTDSACSLKQMVHEGNQRWDNLQKRVTSILRRLKHFIGQREEFETARDSILVWLTEMDLQLTNIEHFSECDVQAKIKQLKAFQQEISLNHNKIEQIIAQGEQLIEKSEPLDAAIIEEELDELRRYCQEVFGRVERYHKKLIRLPLPDDEHDLSDRELELEDSAALSDLHWHDRSADSLLSPQPSSNLSLSLAQPLRSERSGRDTPASVDSIPLEWDHDYDLSRDLESAMSRALPSEDEEGQDDKDFYLRGAVGLSGDHSALESQIRQLGKALDDSRFQIQQTENIIRSKTPTGPELDTSYKGYMKLLGECSSSIDSVKRLEHKLKEEEESLPGFVNLHSTETQTAGVIDRWELLQAQALSKELRMKQNLQKWQQFNSDLNSIWAWLGDTEEELEQLQRLELSTDIQTIELQIKKLKELQKAVDHRKAIILSINLCSPEFTQADSKESRDLQDRLSQMNGRWDRVCSLLEEWRGLLQDALMQCQGFHEMSHGLLLMLENIDRRKNEIVPIDSNLDAEILQDHHKQLMQIKHELLESQLRVASLQDMSCQLLVNAEGTDCLEAKEKVHVIGNRLKLLLKEVSRHIKELEKLLDVSSSQQDLSSWSSADELDTSGSVSPTSGRSTPNRQKTPRGKCSLSQPGPSVSSPHSRSTKGGSDSSLSEPGPGRSGRGFLFRVLRAALPLQLLLLLLIGLACLVPMSEEDYSCALSNNFARSFHPMLRYTNGPPPL

SEQ ID NO: 257451 - protein, 8797 aa, Artificial Sequence
  derived and/or modified sequence
MATSRGASRCPRDIANVMQRLQDEQEIVQKRTFTKWINSHLAKRKPPMVVDDLFEDMKDGVKLLALLEVLSGQKLPCEQGRRMKRIHAVANIGTALKFLEGRKIKLVNINSTDIADGRPSIVLGLMWTIILYFQIEELTSNLPQLQSLSSSASSVDSIVSSETPSPPSKRKVTTKIQGNAKKALLKWVQYTAGKQTGIEVKDFGKSWRSGVAFHSVIHAIRPELVDLETVKGRSNRENLEDAFTIAETELGIPRLLDPEDVDVDKPDEKSIMTYVAQFLKHYPDIHNASTDGQEDDEILPGFPSFANSVQNFKREDRVIFKEMKVWIEQFERDLTRAQMVESNLQDKYQSFKHFRVQYEMKRKQIEHLIQPLHRDGKLSLDQALVKQSWDRVTSRLFDWHIQLDKSLPAPLGTIGAWLYRAEVALREEITVQQVHEETANTIQRKLEQHKDLLQNTDAHKRAFHEIYRTRSVNGIPVPPDQLEDMAERFHFVSSTSELHLMKMEFLELKYRLLSLLVLAESKLKSWIIKYGRRESVEQLLQNYVSFIENSKFFEQYEVTYQILKQTAEMYVKADGSVEEAENVMKFMNETTAQWRNLSVEVRSVRSMLEEVISNWDRYGNTVASLQAWLEDAEKMLNQSENAKKDFFRNLPHWIQQHTAMNDAGNFLIETCDEMVSRDLKQQLLLLNGRWRELFMEVKQYAQADEMDRMKKEYTDCVVTLSAFATEAHKKLSEPLEVSFMNVKLLIQDLEDIEQRVPVMDAQYKIITKTAHLITKESPQEEGKEMFATMSKLKEQLTKVKECYSPLLYESQQLLIPLEELEKQMTSFYDSLGKINEIITVLEREAQSSALFKQKHQELLACQENCKKTLTLIEKGSQSVQKFVTLSNVLKHFDQTRLQRQIADIHVAFQSMVKKTGDWKKHVETNSRLMKKFEESRAELEKVLRIAQEGLEEKGDPEELLRRHTEFFSQLDQRVLNAFLKACDELTDILPEQEQQGLQEAVRKLHKQWKDLQGEAPYHLLHLKIDVEKNRFLASVEECRTELDRETKLMPQEGSEKIIKEHRVFFSDKGPHHLCEKRLQLIEELCVKLPVRDPVRDTPGTCHVTLKELRAAIDSTYRKLMEDPDKWKDYTSRFSEFSSWISTNETQLKGIKGEAIDTANHGEVKRAVEEIRNGVTKRGETLSWLKSRLKVLTEVSSENEAQKQGDELAKLSSSFKALVTLLSEVEKMLSNFGDCVQYKEIVKNSLEELISGSKEVQEQAEKILDTENLFEAQQLLLHHQQKTKRISAKKRDVQQQIAQAQQGEGGLPDRGHEELRKLESTLDGLERSRERQERRIQVTLRKWERFETNKETVVRYLFQTGSSHERFLSFSSLESLSSELEQTKEFSKRTESIAVQAENLVKEASEIPLGPQNKQLLQQQAKSIKEQVKKLEDTLEEDIKTMEMVKTKWDHFGSNFETLSVWITEKEKELNALETSSSAMDMQISQIKVTIQEIESKLSSIVGLEEEAQSFAQFVTTGESARIKAKLTQIRRYGEELREHAQCLEGTILGHLSQQQKFEENLRKIQQSVSEFEDKLAVPIKICSSATETYKVLQEHMDLCQALESLSSAITAFSASARKVVNRDSCVQEAAALQQQYEDILRRAKERQTALENLLAHWQRLEKELSSFLTWLERGEAKASSPEMDISADRVKVEGELQLIQALQNEVVSQASFYSKLLQLKESLFSVASKDDVKMMKLHLEQLDERWRDLPQIINKRINFLQSVVAEHQQFDELLLSFSVWIKLFLSELQTTSEISIMDHQVALTRHKDHAAEVESKKGELQSLQGHLAKLGSLGRAEDLHLLQGKAEDCFQLFEEASQVVERRQLALSHLAEFLQSHASLSGILRQLRQTVEATNSMNKNESDLIEKDLNDALQNAKALESAAVSLDGILSKAQYHLKIGSSEQRTSCRATADQLCGEVERIQNLLGTKQSEADALAVLKKAFQDQKEELLKSIEDIEERTDKERLKEPTRQALQQRLRVFNQLEDELNSHEHELCWLKDKAKQIAQKDVAFAPEVDREINRLEVTWDDTKRLIHENQGQCCGLIDLMREYQNLKSAVSKVLENASSVIVTRTTIKDQEDLKWAFSKHETAKNKMNYKQKDLDNFTSKGKHLLSELKKIHSSDFSLVKTDMESTVDKWLDVSEKLEENMDRLRVSLSIWDDVLSTRDEIEGWSNNCVPQMAENISNLDNHLRAEELLKEFESEVKNKALRLEELHSKVNDLKELTKNLETPPDLQFIEADLMQKLEHAKEITEVAKGTLKDFTAQSTQVEKFINDITTWFTKVEESLMNCAQNETCEALKKVKDIQKELQSQQSNISSTQENLNSLCRKYHSAELESLGRAMTGLIKKHEAVSQLCSKTQASLQESLEKHFSESMQEFQEWFLGAKAAAKESSDRTGDSKVLEAKLHDLQNILDSVSDGQSKLDAVTQEGQTLYAHLSKQIVSSIQEQITKANEEFQAFLKQCLKDKQALQDCASELGSFEDQHRKLNLWIHEMEERFNTENLGESKQHIPEKKNEVHKVEMFLGELLAARESLDKLSQRGQLLSEEGHGAGQEGRLCSQLLTSHQNLLRMTKEKLRSCQVALQEHEALEEALQSMWFWVKAIQDRLACAESTLGSKDTLEKRLSQIQDILLMKGEGEVKLNMAIGKGEQALRSSNKEGQRVIQTQLETLKEVWADIMSSSVHAQSTLESVISQWNDYVERKNQLEQWMESVDQKIEHPLQPQPGLKEKFVLLDHLQSILSEAEDHTRALHRLIAKSRELYEKTEDESFKDTAQEELKTQFNDIMTVAKEKMRKVEEIVKDHLMYLDAVHEFTDWLHSAKEELHRWSDMSGDSSATQKKLSKIKELIDSREIGASRLSRVESLAPEVKQNTTASGCELMHTEMQALRADWKQWEDSVFQTQSCLENLVSQMALSEQEFSGQVAQLEQALEQFSALLKTWAQQLTLLEGKNTDEEIVECWHKGQEILDALQKAEPRTEDLKSQLNELCRFSRDLSTYSGKVSGLIKEYNCLCLQASKGCQNKEQILQQRFRKAFRDFQQWLVNAKITTAKCFDIPQNISEVSTSLQKIQEFLSESENGQHKLNMMLSKGELLSTLLTKEKAKGIQAKVTAAKEDWKNFHSNLHQKESALENLKIQMKDFEVSAEPIQDWLSKTEKMVHESSNRLYDLPAKRREQQKLQSVLEEIHCYEPQLNRLKEKAQQLWEGQAASKSFRHRVSQLSSQYLALSNLTKEKVSRLDRIVAEHNQFSLGIKELQDWMTDAIHMLDSYCHPTSDKSVLDSRTLKLEALLSVKQEKEIQMKMIVTRGESVLQNTSPEGIPTIQQQLQSVKDMWASLLSAGIRCKSQLEGALSKWTSYQDGVRQFSGWMDSMEANLNESERQHAELRDKTTMLGKAKLLNEEVLSYSSLLETIEVKGAGMTEHYVTQLELQDLQERYRAIQERAKEAVTKSEKLVRLHQEYQRDLKAFEVWLGQEQEKLDQYSVLEGDAHTHETTLRDLQELQVHCAEGQALLNSVLHTREDVIPSGIPQAEDRALESLRQDWQAYQHRLSETRTQFNNVVNKLRLMEQKFQQVDEWLKTAEEKVSPRTRRQSNRATKEIQLHQMKKWHEEVTAYRDEVEEVGARAQEILDESHVNSRMGCQATQLTSRYQALLLQVLEQIKFLEEEIQSLEESESSLSSYSDWYGSTHKNFKNVATKIDKVDTVMMGKKLKTLEVLLKDMEKGHSLLKSAREKGERAVKYLEEGEAERLRKEIHDHMEQLKELTSTVRKEHMTLEKGLHLAKEFSDKCKALTQWIAEYQEILHVPEEPKMELYEKKAQLSKYKSLQQTVLSHEPSVKSVREKGEALLELVQDVTLKDKIDQLQSDYQDLCSIGKEHVFSLEAKVKDHEDYNSELQEVEKWLLQMSGRLVAPDLLETSSLETITQQLAHHKAMMEEIAGFEDRLNNLQMKGDTLIGQCADHLQAKLKQNVHAHLQGTKDSYSAICSTAQRMYQSLEHELQKHVSRQDTLQQCQAWLSAVQPDLEPSPQPPLSRAEAIKQVKHFRALQEQARTYLDLLCSMCDLSNASVKTTAKDIQQTEQTIEQKLVQAQNLTQGWEEIKHLKSELWIYLQDADQQLQNMKRRHSELELNIAQNMVSQVKDFVKKLQSKQASVNTIIEKVNKLTKKEESPEHKEINHLNDQWLDLCRQSNNLCLQREEDLQRTRDYHDCMNVVEVFLEKFTTEWDNLARSDAESTAVHLEALKKLALALQERKYAIEDLKDQKQKMIEHLNLDDKELVKEQTSHLEQRWFQLEDLIKRKIQVSVTNLEELNVVQSRFQELMEWAEEQQPNIAEALKQSPPPDMAQNLLMDHLAICSELEAKQMLLKSLIKDADRVMADLGLNERQVIQKALSDAQSHVNCLSDLVGQRRKYLNKALSEKTQFLMAVFQATSQIQQHERKIMFREHICLLPDDVSKQVKTCKSAQASLKTYQNEVTGLWAQGRELMKEVTEQEKSEVLGKLQELQSVYDSVLQKCSHRLQELEKNLVSRKHFKEDFDKACHWLKQADIVTFPEINLMNESSELHTQLAKYQNILEQSPEYENLLLTLQRTGQTILPSLNEVDHSYLSEKLNALPRQFNVIVALAKDKFYKVQEAILARKEYASLIELTTQSLSELEAQFLRMSKVPTDLAVEEALSLQDGCRAILDEVAGLGEAVDELNQKKEGFRSTGQPWQPDKMLHLVTLYHRLKRQTEQRVSLLEDTTSAYQEHEKMCQQLERQLKSVKEEQSKVNEETLPAEEKLKMYHSLAGSLQDSGIVLKRVTIHLEDLAPHLDPLAYEKARHQIQSWQGELKLLTSAIGETVTECESRMVQSIDFQTEMSRSLDWLRRVKAELSGPVYLDLNLQDIQEEIRKIQIHQEEVQSSLRIMNALSHKEKEKFTKAKELISADLEHSLAELSELDGDIQEALRTRQATLTEIYSQCQRYYQVFQAANDWLEDAQELLQLAGNGLDVESAEENLKSHMEFFSTEDQFHSNLEELHSLVATLDPLIKPTGKEDLEQKVASLELRSQRMSRDSGAQVDLLQRCTAQWHDYQKAREEVIELMNDTEKKLSEFSLLKTSSSHEAEEKLSEHKALVSVVNSFHEKIVALEEKASQLEKTGNDASKATLSRSMTTVWQRWTRLRAVAQDQEKILEDAVDEWTGFNNKVKKATEMIDQLQDKLPGSSAEKASKAELLTLLEYHDTFVLELEQQQSALGMLRQQTLSMLQDGAAPTPGEEPPLMQEITAMQDRCLNMQEKVKTNGKLVKQELKDREMVETQINSVKCWVQETKEYLGNPTIEIDAQLEELQILLTEATNHRQNIEKMAEEQKEKYLGLYTILPSELSLQLAEVALDLKIRDQIQDKIKEVEQSKATSQELSRQIQKLAKDLTTILTKLKAKTDNVVQAKTDQKVLGEELDGCNSKLMELDAAVQKFLEQNGQLGKPLAKKIGKLTELHQQTIRQAENRLSKLNQAASHLEEYNEMLELILKWIEKAKVLAHGTIAWNSASQLREQYILHQTLLEESKEIDSELEAMTEKLQYLTSVYCTEKMSQQVAELGRETEELRQMIKIRLQNLQDAAKDMKKFEAELKKLQAALEQAQATLTSPEVGRLSLKEQLSHRQHLLSEMESLKPKVQAVQLCQSALRIPEDVVASLPLCHAALRLQEEASRLQHTAIQQCNIMQEAVVQYEQYEQEMKHLQQLIEGAHREIEDKPVATSNIQELQAQISRHEELAQKIKGYQEQIASLNSKCKMLTMKAKHATMLLTVTEVEGLAEGTEDLDGELLPTPSAHPSVVMMTAGRCHTLLSPVTEESGEEGTNSEISSPPACRSPSPVANTDASVNQDIAYYQALSAERLQTDAAKIHPSTSASQEFYEPGLEPSATAKLGDLQRSWETLKNVISEKQRTLYEALERQQKYQDSLQSISTKMEAIELKLSESPEPGRSPESQMAEHQALMDEILMLQDEINELQSSLAEELVSESCEADPAEQLALQSTLTVLAERMSTIRMKASGKRQLLEEKLNDQLEEQRQEQALQRYRCEADELDSWLLSTKATLDTALSPPKEPMDMEAQLMDCQNMLVEIEQKVVALSELSVHNENLLLEGKAHTKDEAEQLAGKLRRLKGSLLELQRALHDKQLNMQGTAQEKEESDVDLTATQSPGVQEWLAQARTTWTQQRQSSLQQQKELEQELAEQKSLLRSVASRGEEILIQHSAAETSGDAGEKPDVLSQELGMEGEKSSAEDQMRMKWESLHQEFSTKQKLLQNVLEQEQEQVLYSRPNRLLSGVPLYKGDVPTQDKSAVTSLLDGLNQAFEEVSSQSGGAKRQSIHLEQKLYDGVSATSTWLDDVEERLFVATALLPEETETCLFNQEILAKDIKEMSEEMDKNKNLFSQAFPENGDNRDVIEDTLGCLLGRLSLLDSVVNQRCHQMKERLQQILNFQNDLKVLFTSLADNKYIILQKLANVFEQPVAEQIEAIQQAEDGLKEFDAGIIELKRRGDKLQVEQPSMQELSKLQDMYDELMMIIGSRRSGLNQNLTLKSQYERALQDLADLLETGQEKMAGDQKIIVSSKEEIQQLLDKHKEYFQGLESHMILTETLFRKIISFAVQKETQFHTELMAQASAVLKRAHKRGVELEYILETWSHLDEDQQELSRQLEVVESSIPSVGLVEENEDRLIDRITLYQHLKSSLNEYQPKLYQVLDDGKRLLISISCSDLESQLNQLGECWLSNTNKMSKELHRLETILKHWTRYQSESADLIHWLQSAKDRLEFWTQQSVTVPQELEMVRDHLNAFLEFSKEVDAQSSLKSSVLSTGNQLLRLKKVDTATLRSELSRIDSQWTDLLTNIPAVQEKLHQLQMDKLPSRHAISEVMSWISLMENVIQKDEDNIKNSIGYKAIHEYLQKYKGFKIDINCKQLTVDFVNQSVLQISSQDVESKRSDKTDFAEQLGAMNKSWQILQGLVTEKIQLLEGLLESWSEYENNVQCLKTWFETQEKRLKQQHRIGDQASVQNALKDCQDLEDLIKAKEKEVEKIEQNGLALIQNKKEDVSSIVMSTLRELGQTWANLDHMVGQLKILLKSVLDQWSSHKVAFDKINSYLMEARYSLSRFRLLTGSLEAVQVQVDNLQNLQDDLEKQERSLQKFGSITNQLLKECHPPVTETLTNTLKEVNMRWNNLLEEIAEQLQSSKALLQLWQRYKDYSKQCASTVQQQEDRTNELLKAATNKDIADDEVATWIQDCNDLLKGLGTVKDSLFFLHELGEQLKQQVDASAASAIQSDQLSLSQHLCALEQALCKQQTSLQAGVLDYETFAKSLEALEAWIVEAEEILQGQDPSHSSDLSTIQERMEELKGQMLKFSSMAPDLDRLNELGYRLPLNDKEIKRMQNLNRHWSLISSQTTERFSKLQSFLLQHQTFLEKCETWMEFLVQTEQKLAVEISGNYQHLLEQQRAHELFQAEMFSRQQILHSIIIDGQRLLEQGQVDDRDEFNLKLTLLSNQWQGVIRRAQQRRGIIDSQIRQWQRYREMAEKLRKWLVEVSYLPMSGLGSVPIPLQQARTLFDEVQFKEKVFLRQQGSYILTVEAGKQLLLSADSGAEAALQAELAEIQEKWKSASMRLEEQKKKLAFLLKDWEKCEKGIADSLEKLRTFKKKLSQSLPDHHEELHAEQMRCKELENAVGSWTDDLTQLSLLKDTLSAYISADDISILNERVELLQRQWEELCHQLSLRRQQIGERLNEWAVFSEKNKELCEWLTQMESKVSQNGDILIEEMIEKLKKDYQEEIAIAQENKIQLQQMGERLAKASHESKASEIEYKLGKVNDRWQHLLDLIAARVKKLKETLVAVQQLDKNMSSLRTWLAHIESELAKPIVYDSCNSEEIQRKLNEQQELQRDIEKHSTGVASVLNLCEVLLHDCDACATDAECDSIQQATRNLDRRWRNICAMSMERRLKIEETWRLWQKFLDDYSRFEDWLKSSERTAAFPSSSGVIYTVAKEELKKFEAFQRQVHECLTQLELINKQYRRLARENRTDSACSLKQMVHEGNQRWDNLQKRVTSILRRLKHFIGQREEFETARDSILVWLTEMDLQLTNIEHFSECDVQAKIKQLKAFQQEISLNHNKIEQIIAQGEQLIEKSEPLDAAIIEEELDELRRYCQEVFGRVERYHKKLIRLPLPDDEHDLSDRELELEDSAALSDLHWHDRSADSLLSPQPSSNLSLSLAQPLRSERSGRDTPASVDSIPLEWDHDYDLSRDLESAMSRALPSEDEEGQDDKDFYLRGAVGLSGDHSALESQIRQLGKALDDSRFQIQQTENIIRSKTPTGPELDTSYKGYMKLLGECSSSIDSVKRLEHKLKEEEESLPGFVNLHSTETQTAGVIDRWELLQAQALSKELRMKQNLQKWQQFNSDLNSIWAWLGDTEEELEQLQRLELSTDIQTIELQIKKLKELQKAVDHRKAIILSINLCSPEFTQADSKESRDLQDRLSQMNGRWDRVCSLLEEWRGLLQDALMQCQGFHEMSHGLLLMLENIDRRKNEIVPIDSNLDAEILQDHHKQLMQIKHELLESQLRVASLQDMSCQLLVNAEGTDCLEAKEKVHVIGNRLKLLLKEVSRHIKELEKLLDVSSSQQDLSSWSSADELDTSGSVSPTSGRSTPNRQKTPRGKCSLSQPGPSVSSPHSRSTKGGSDSSLSEPGPGRSGRGFLFRVLRAALPLQLLLLLLIGLACLVPMSEEDYSCALSNNFARSFHPMLRYTNGPPPL

SEQ ID NO: 257452 - protein, 952 aa, Artificial Sequence
  derived and/or modified sequence
MVVAEDLSALRMAEDSCVDADLPDCNCDVTRVKKLKETLVAVQQLDKNMSSLRTWLAHIESELAKPIVYDSCNSEEIQRKLNEQQELQRDIEKHSTGVASVLNLCEVLLHDCDACATDAECDSIQQATRNLDRRWRNICAMSMERRLKIEETWRLWQKFLDDYSRFEDWLKSSERTAAFPSSSGVIYTVAKEELKKFEAFQRQVHECLTQLELINKQYRRLARENRTDSACSLKQMVHEGNQRWDNLQKRVTSILRRLKHFIGQREEFETARDSILVWLTEMDLQLTNIEHFSECDVQAKIKQLKAFQQEISLNHNKIEQIIAQGEQLIEKSEPLDAAIIEEELDELRRYCQEVFGRVERYHKKLIRLPLPDDEHDLSDRELELEDSAALSDLHWHDRSADSLLSPQPSSNLSLSLAQPLRSERSGRDTPASVDSIPLEWDHDYDLSRDLESAMSRALPSEDEEGQDDKDFYLRGAVGLSGDHSALESQIRQLGKALDDSRFQIQQTENIIRSKTPTGPELDTSYKGYMKLLGECSSSIDSVKRLEHKLKEEEESLPGFVNLHSTETQTAGVIDRWELLQAQALSKELRMKQNLQKWQQFNSDLNSIWAWLGDTEEELEQLQRLELSTDIQTIELQIKKLKELQKAVDHRKAIILSINLCSPEFTQADSKESRDLQDRLSQMNGRWDRVCSLLEEWRGLLQDALMQCQGFHEMSHGLLLMLENIDRRKNEIVPIDSNLDAEILQDHHKQLMQIKHELLESQLRVASLQDMSCQLLVNAEGTDCLEAKEKVHVIGNRLKLLLKEVSRHIKELEKLLDVSSSQQDLSSWSSADELDTSGSVSPTSGRSTPNRQKTPRGKCSLSQPGPSVSSPHSRSTKGGSDSSLSEPGPGRSGRGFLFRVLRAALPLQLLLLLLIGLACLVPMSEEDYSCALSNNFARSFHPMLRYTNGPPPL

SEQ ID NO: 257453 - DNA, 26394 bp, Artificial Sequence
  derived and/or modified sequence
atggccaccagcagaggcgccagcagatgccccagagacatcgccaacgtgatgcagagactgcaggacgagcaggagatcgtgcagaagagaaccttcaccaagtggatcaacagccacctggccaagagaaagccccccatggtggtggacgacctgttcgaggacatgaaggacggcgtgaagctgctggccctgctggaggtgctgagcggccagaagctgccctgcgagcagggcagaagaatgaagagaatccacgccgtggccaacatcggcaccgccctgaagttcctggagggcagaaagatcaagctggtgaacatcaacagcaccgacatcgccgacggcagacccagcatcgtgctgggcctgatgtggaccatcatcctgtacttccagatcgaggagctgaccagcaacctgccccagctgcagagcctgagcagcagcgccagcagcgtggacagcatcgtgagcagcgagacccccagcccccccagcaagagaaaggtgaccaccaagatccagggcaacgccaagaaggccctgctgaagtgggtgcagtacaccgccggcaagcagaccggcatcgaggtgaaggacttcggcaagagctggagaagcggcgtggccttccacagcgtgatccacgccatcagacccgagctggtggacctggagaccgtgaagggcagaagcaacagagagaacctggaggacgccttcaccatcgccgagaccgagctgggcatccccagactgctggaccccgaggacgtggacgtggacaagcccgacgagaagagcatcatgacctacgtggcccagttcctgaagcactaccccgacatccacaacgccagcaccgacggccaggaggacgacgagatcctgcccggcttccccagcttcgccaacagcgtgcagaacttcaagagagaggacagagtgatcttcaaggagatgaaggtgtggatcgagcagttcgagagagacctgaccagagcccagatggtggagagcaacctgcaggacaagtaccagagcttcaagcacttcagagtgcagtacgagatgaagagaaagcagatcgagcacctgatccagcccctgcacagagacggcaagctgagcctggaccaggccctggtgaagcagagctgggacagagtgaccagcagactgttcgactggcacatccagctggacaagagcctgcccgcccccctgggcaccatcggcgcctggctgtacagagccgaggtggccctgagagaggagatcaccgtgcagcaggtgcacgaggagaccgccaacaccatccagagaaagctggagcagcacaaggacctgctgcagaacaccgacgcccacaagagagccttccacgagatctacagaaccagaagcgtgaacggcatccccgtgccccccgaccagctggaggacatggccgagagattccacttcgtgagcagcaccagcgagctgcacctgatgaagatggagttcctggagctgaagtacagactgctgagcctgctggtgctggccgagagcaagctgaagagctggatcatcaagtacggcagaagagagagcgtggagcagctgctgcagaactacgtgagcttcatcgagaacagcaagttcttcgagcagtacgaggtgacctaccagatcctgaagcagaccgccgagatgtacgtgaaggccgacggcagcgtggaggaggccgagaacgtgatgaagttcatgaacgagaccaccgcccagtggagaaacctgagcgtggaggtgagaagcgtgagaagcatgctggaggaggtgatcagcaactgggacagatacggcaacaccgtggccagcctgcaggcctggctggaggacgccgagaagatgctgaaccagagcgagaacgccaagaaggacttcttcagaaacctgccccactggatccagcagcacaccgccatgaacgacgccggcaacttcctgatcgagacctgcgacgagatggtgagcagagacctgaagcagcagctgctgctgctgaacggcagatggagagagctgttcatggaggtgaagcagtacgcccaggccgacgagatggacagaatgaagaaggagtacaccgactgcgtggtgaccctgagcgccttcgccaccgaggcccacaagaagctgagcgagcccctggaggtgagcttcatgaacgtgaagctgctgatccaggacctggaggacatcgagcagagagtgcccgtgatggacgcccagtacaagatcatcaccaagaccgcccacctgatcaccaaggagagcccccaggaggagggcaaggagatgttcgccaccatgagcaagctgaaggagcagctgaccaaggtgaaggagtgctacagccccctgctgtacgagagccagcagctgctgatccccctggaggagctggagaagcagatgaccagcttctacgacagcctgggcaagatcaacgagatcatcaccgtgctggagagagaggcccagagcagcgccctgttcaagcagaagcaccaggagctgctggcctgccaggagaactgcaagaagaccctgaccctgatcgagaagggcagccagagcgtgcagaagttcgtgaccctgagcaacgtgctgaagcacttcgaccagaccagactgcagagacagatcgccgacatccacgtggccttccagagcatggtgaagaagaccggcgactggaagaagcacgtggagaccaacagcagactgatgaagaagttcgaggagagcagagccgagctggagaaggtgctgagaatcgcccaggagggcctggaggagaagggcgaccccgaggagctgctgagaagacacaccgagttcttcagccagctggaccagagagtgctgaacgccttcctgaaggcctgcgacgagctgaccgacatcctgcccgagcaggagcagcagggcctgcaggaggccgtgagaaagctgcacaagcagtggaaggacctgcagggcgaggccccctaccacctgctgcacctgaagatcgacgtggagaagaacagattcctggccagcgtggaggagtgcagaaccgagctggacagagagaccaagctgatgccccaggagggcagcgagaagatcatcaaggagcacagagtgttcttcagcgacaagggcccccaccacctgtgcgagaagagactgcagctgatcgaggagctgtgcgtgaagctgcccgtgagagaccccgtgagagacacccccggcacctgccacgtgaccctgaaggagctgagagccgccatcgacagcacctacagaaagctgatggaggaccccgacaagtggaaggactacaccagcagattcagcgagttcagcagctggatcagcaccaacgagacccagctgaagggcatcaagggcgaggccatcgacaccgccaaccacggcgaggtgaagagagccgtggaggagatcagaaacggcgtgaccaagagaggcgagaccctgagctggctgaagagcagactgaaggtgctgaccgaggtgagcagcgagaacgaggcccagaagcagggcgacgagctggccaagctgagcagcagcttcaaggccctggtgaccctgctgagcgaggtggagaagatgctgagcaacttcggcgactgcgtgcagtacaaggagatcgtgaagaacagcctggaggagctgatcagcggcagcaaggaggtgcaggagcaggccgagaagatcctggacaccgagaacctgttcgaggcccagcagctgctgctgcaccaccagcagaagaccaagagaatcagcgccaagaagagagacgtgcagcagcagatcgcccaggcccagcagggcgagggcggcctgcccgacagaggccacgaggagctgagaaagctggagagcaccctggacggcctggagagaagcagagagagacaggagagaagaatccaggtgaccctgagaaagtgggagagattcgagaccaacaaggagaccgtggtgagatacctgttccagaccggcagcagccacgagagattcctgagcttcagcagcctggagagcctgagcagcgagctggagcagaccaaggagttcagcaagagaaccgagagcatcgccgtgcaggccgagaacctggtgaaggaggccagcgagatccccctgggcccccagaacaagcagctgctgcagcagcaggccaagagcatcaaggagcaggtgaagaagctggaggacaccctggaggaggacatcaagaccatggagatggtgaagaccaagtgggaccacttcggcagcaacttcgagaccctgagcgtgtggatcaccgagaaggagaaggagctgaacgccctggagaccagcagcagcgccatggacatgcagatcagccagatcaaggtgaccatccaggagatcgagagcaagctgagcagcatcgtgggcctggaggaggaggcccagagcttcgcccagttcgtgaccaccggcgagagcgccagaatcaaggccaagctgacccagatcagaagatacggcgaggagctgagagagcacgcccagtgcctggagggcaccatcctgggccacctgagccagcagcagaagttcgaggagaacctgagaaagatccagcagagcgtgagcgagttcgaggacaagctggccgtgcccatcaagatctgcagcagcgccaccgagacctacaaggtgctgcaggagcacatggacctgtgccaggccctggagagcctgagcagcgccatcaccgccttcagcgccagcgccagaaaggtggtgaacagagacagctgcgtgcaggaggccgccgccctgcagcagcagtacgaggacatcctgagaagagccaaggagagacagaccgccctggagaacctgctggcccactggcagagactggagaaggagctgagcagcttcctgacctggctggagagaggcgaggccaaggccagcagccccgagatggacatcagcgccgacagagtgaaggtggagggcgagctgcagctgatccaggccctgcagaacgaggtggtgagccaggccagcttctacagcaagctgctgcagctgaaggagagcctgttcagcgtggccagcaaggacgacgtgaagatgatgaagctgcacctggagcagctggacgagagatggagagacctgccccagatcatcaacaagagaatcaacttcctgcagagcgtggtggccgagcaccagcagttcgacgagctgctgctgagcttcagcgtgtggatcaagctgttcctgagcgagctgcagaccaccagcgagatcagcatcatggaccaccaggtggccctgaccagacacaaggaccacgccgccgaggtggagagcaagaagggcgagctgcagagcctgcagggccacctggccaagctgggcagcctgggcagagccgaggacctgcacctgctgcagggcaaggccgaggactgcttccagctgttcgaggaggccagccaggtggtggagagaagacagctggccctgagccacctggccgagttcctgcagagccacgccagcctgagcggcatcctgagacagctgagacagaccgtggaggccaccaacagcatgaacaagaacgagagcgacctgatcgagaaggacctgaacgacgccctgcagaacgccaaggccctggagagcgccgccgtgagcctggacggcatcctgagcaaggcccagtaccacctgaagatcggcagcagcgagcagagaaccagctgcagagccaccgccgaccagctgtgcggcgaggtggagagaatccagaacctgctgggcaccaagcagagcgaggccgacgccctggccgtgctgaagaaggccttccaggaccagaaggaggagctgctgaagagcatcgaggacatcgaggagagaaccgacaaggagagactgaaggagcccaccagacaggccctgcagcagagactgagagtgttcaaccagctggaggacgagctgaacagccacgagcacgagctgtgctggctgaaggacaaggccaagcagatcgcccagaaggacgtggccttcgcccccgaggtggacagagagatcaacagactggaggtgacctgggacgacaccaagagactgatccacgagaaccagggccagtgctgcggcctgatcgacctgatgagagagtaccagaacctgaagagcgccgtgagcaaggtgctggagaacgccagcagcgtgatcgtgaccagaaccaccatcaaggaccaggaggacctgaagtgggccttcagcaagcacgagaccgccaagaacaagatgaactacaagcagaaggacctggacaacttcaccagcaagggcaagcacctgctgagcgagctgaagaagatccacagcagcgacttcagcctggtgaagaccgacatggagagcaccgtggacaagtggctggacgtgagcgagaagctggaggagaacatggacagactgagagtgagcctgagcatctgggacgacgtgctgagcaccagagacgagatcgagggctggagcaacaactgcgtgccccagatggccgagaacatcagcaacctggacaaccacctgagagccgaggagctgctgaaggagttcgagagcgaggtgaagaacaaggccctgagactggaggagctgcacagcaaggtgaacgacctgaaggagctgaccaagaacctggagaccccccccgacctgcagttcatcgaggccgacctgatgcagaagctggagcacgccaaggagatcaccgaggtggccaagggcaccctgaaggacttcaccgcccagagcacccaggtggagaagttcatcaacgacatcaccacctggttcaccaaggtggaggagagcctgatgaactgcgcccagaacgagacctgcgaggccctgaagaaggtgaaggacatccagaaggagctgcagagccagcagagcaacatcagcagcacccaggagaacctgaacagcctgtgcagaaagtaccacagcgccgagctggagagcctgggcagagccatgaccggcctgatcaagaagcacgaggccgtgagccagctgtgcagcaagacccaggccagcctgcaggagagcctggagaagcacttcagcgagagcatgcaggagttccaggagtggttcctgggcgccaaggccgccgccaaggagagcagcgacagaaccggcgacagcaaggtgctggaggccaagctgcacgacctgcagaacatcctggacagcgtgagcgacggccagagcaagctggacgccgtgacccaggagggccagaccctgtacgcccacctgagcaagcagatcgtgagcagcatccaggagcagatcaccaaggccaacgaggagttccaggccttcctgaagcagtgcctgaaggacaagcaggccctgcaggactgcgccagcgagctgggcagcttcgaggaccagcacagaaagctgaacctgtggatccacgagatggaggagagattcaacaccgagaacctgggcgagagcaagcagcacatccccgagaagaagaacgaggtgcacaaggtggagatgttcctgggcgagctgctggccgccagagagagcctggacaagctgagccagagaggccagctgctgagcgaggagggccacggcgccggccaggagggcagactgtgcagccagctgctgaccagccaccagaacctgctgagaatgaccaaggagaagctgagaagctgccaggtggccctgcaggagcacgaggccctggaggaggccctgcagagcatgtggttctgggtgaaggccatccaggacagactggcctgcgccgagagcaccctgggcagcaaggacaccctggagaagagactgagccagatccaggacatcctgctgatgaagggcgagggcgaggtgaagctgaacatggccatcggcaagggcgagcaggccctgagaagcagcaacaaggagggccagagagtgatccagacccagctggagaccctgaaggaggtgtgggccgacatcatgagcagcagcgtgcacgcccagagcaccctggagagcgtgatcagccagtggaacgactacgtggagagaaagaaccagctggagcagtggatggagagcgtggaccagaagatcgagcaccccctgcagccccagcccggcctgaaggagaagttcgtgctgctggaccacctgcagagcatcctgagcgaggccgaggaccacaccagagccctgcacagactgatcgccaagagcagagagctgtacgagaagaccgaggacgagagcttcaaggacaccgcccaggaggagctgaagacccagttcaacgacatcatgaccgtggccaaggagaagatgagaaaggtggaggagatcgtgaaggaccacctgatgtacctggacgccgtgcacgagttcaccgactggctgcacagcgccaaggaggagctgcacagatggagcgacatgagcggcgacagcagcgccacccagaagaagctgagcaagatcaaggagctgatcgacagcagagagatcggcgccagcagactgagcagagtggagagcctggcccccgaggtgaagcagaacaccaccgccagcggctgcgagctgatgcacaccgagatgcaggccctgagagccgactggaagcagtgggaggacagcgtgttccagacccagagctgcctggagaacctggtgagccagatggccctgagcgagcaggagttcagcggccaggtggcccagctggagcaggccctggagcagttcagcgccctgctgaagacctgggcccagcagctgaccctgctggagggcaagaacaccgacgaggagatcgtggagtgctggcacaagggccaggagatcctggacgccctgcagaaggccgagcccagaaccgaggacctgaagagccagctgaacgagctgtgcagattcagcagagacctgagcacctacagcggcaaggtgagcggcctgatcaaggagtacaactgcctgtgcctgcaggccagcaagggctgccagaacaaggagcagatcctgcagcagagattcagaaaggccttcagagacttccagcagtggctggtgaacgccaagatcaccaccgccaagtgcttcgacatcccccagaacatcagcgaggtgagcaccagcctgcagaagatccaggagttcctgagcgagagcgagaacggccagcacaagctgaacatgatgctgagcaagggcgagctgctgagcaccctgctgaccaaggagaaggccaagggcatccaggccaaggtgaccgccgccaaggaggactggaagaacttccacagcaacctgcaccagaaggagagcgccctggagaacctgaagatccagatgaaggacttcgaggtgagcgccgagcccatccaggactggctgagcaagaccgagaagatggtgcacgagagcagcaacagactgtacgacctgcccgccaagagaagagagcagcagaagctgcagagcgtgctggaggagatccactgctacgagccccagctgaacagactgaaggagaaggcccagcagctgtgggagggccaggccgccagcaagagcttcagacacagagtgagccagctgagcagccagtacctggccctgagcaacctgaccaaggagaaggtgagcagactggacagaatcgtggccgagcacaaccagttcagcctgggcatcaaggagctgcaggactggatgaccgacgccatccacatgctggacagctactgccaccccaccagcgacaagagcgtgctggacagcagaaccctgaagctggaggccctgctgagcgtgaagcaggagaaggagatccagatgaagatgatcgtgaccagaggcgagagcgtgctgcagaacaccagccccgagggcatccccaccatccagcagcagctgcagagcgtgaaggacatgtgggccagcctgctgagcgccggcatcagatgcaagagccagctggagggcgccctgagcaagtggaccagctaccaggacggcgtgagacagttcagcggctggatggacagcatggaggccaacctgaacgagagcgagagacagcacgccgagctgagagacaagaccaccatgctgggcaaggccaagctgctgaacgaggaggtgctgagctacagcagcctgctggagaccatcgaggtgaagggcgccggcatgaccgagcactacgtgacccagctggagctgcaggacctgcaggagagatacagagccatccaggagagagccaaggaggccgtgaccaagagcgagaagctggtgagactgcaccaggagtaccagagagacctgaaggccttcgaggtgtggctgggccaggagcaggagaagctggaccagtacagcgtgctggagggcgacgcccacacccacgagaccaccctgagagacctgcaggagctgcaggtgcactgcgccgagggccaggccctgctgaacagcgtgctgcacaccagagaggacgtgatccccagcggcatcccccaggccgaggacagagccctggagagcctgagacaggactggcaggcctaccagcacagactgagcgagaccagaacccagttcaacaacgtggtgaacaagctgagactgatggagcagaagttccagcaggtggacgagtggctgaagaccgccgaggagaaggtgagccccagaaccagaagacagagcaacagagccaccaaggagatccagctgcaccagatgaagaagtggcacgaggaggtgaccgcctacagagacgaggtggaggaggtgggcgccagagcccaggagatcctggacgagagccacgtgaacagcagaatgggctgccaggccacccagctgaccagcagataccaggccctgctgctgcaggtgctggagcagatcaagttcctggaggaggagatccagagcctggaggagagcgagagcagcctgagcagctacagcgactggtacggcagcacccacaagaacttcaagaacgtggccaccaagatcgacaaggtggacaccgtgatgatgggcaagaagctgaagaccctggaggtgctgctgaaggacatggagaagggccacagcctgctgaagagcgccagagagaagggcgagagagccgtgaagtacctggaggagggcgaggccgagagactgagaaaggagatccacgaccacatggagcagctgaaggagctgaccagcaccgtgagaaaggagcacatgaccctggagaagggcctgcacctggccaaggagttcagcgacaagtgcaaggccctgacccagtggatcgccgagtaccaggagatcctgcacgtgcccgaggagcccaagatggagctgtacgagaagaaggcccagctgagcaagtacaagagcctgcagcagaccgtgctgagccacgagcccagcgtgaagagcgtgagagagaagggcgaggccctgctggagctggtgcaggacgtgaccctgaaggacaagatcgaccagctgcagagcgactaccaggacctgtgcagcatcggcaaggagcacgtgttcagcctggaggccaaggtgaaggaccacgaggactacaacagcgagctgcaggaggtggagaagtggctgctgcagatgagcggcagactggtggcccccgacctgctggagaccagcagcctggagaccatcacccagcagctggcccaccacaaggccatgatggaggagatcgccggcttcgaggacagactgaacaacctgcagatgaagggcgacaccctgatcggccagtgcgccgaccacctgcaggccaagctgaagcagaacgtgcacgcccacctgcagggcaccaaggacagctacagcgccatctgcagcaccgcccagagaatgtaccagagcctggagcacgagctgcagaagcacgtgagcagacaggacaccctgcagcagtgccaggcctggctgagcgccgtgcagcccgacctggagcccagcccccagccccccctgagcagagccgaggccatcaagcaggtgaagcacttcagagccctgcaggagcaggccagaacctacctggacctgctgtgcagcatgtgcgacctgagcaacgccagcgtgaagaccaccgccaaggacatccagcagaccgagcagaccatcgagcagaagctggtgcaggcccagaacctgacccagggctgggaggagatcaagcacctgaagagcgagctgtggatctacctgcaggacgccgaccagcagctgcagaacatgaagagaagacacagcgagctggagctgaacatcgcccagaacatggtgagccaggtgaaggacttcgtgaagaagctgcagagcaagcaggccagcgtgaacaccatcatcgagaaggtgaacaagctgaccaagaaggaggagagccccgagcacaaggagatcaaccacctgaacgaccagtggctggacctgtgcagacagagcaacaacctgtgcctgcagagagaggaggacctgcagagaaccagagactaccacgactgcatgaacgtggtggaggtgttcctggagaagttcaccaccgagtgggacaacctggccagaagcgacgccgagagcaccgccgtgcacctggaggccctgaagaagctggccctggccctgcaggagagaaagtacgccatcgaggacctgaaggaccagaagcagaagatgatcgagcacctgaacctggacgacaaggagctggtgaaggagcagaccagccacctggagcagagatggttccagctggaggacctgatcaagagaaagatccaggtgagcgtgaccaacctggaggagctgaacgtggtgcagagcagattccaggagctgatggagtgggccgaggagcagcagcccaacatcgccgaggccctgaagcagagccccccccccgacatggcccagaacctgctgatggaccacctggccatctgcagcgagctggaggccaagcagatgctgctgaagagcctgatcaaggacgccgacagagtgatggccgacctgggcctgaacgagagacaggtgatccagaaggccctgagcgacgcccagagccacgtgaactgcctgagcgacctggtgggccagagaagaaagtacctgaacaaggccctgagcgagaagacccagttcctgatggccgtgttccaggccaccagccagatccagcagcacgagagaaagatcatgttcagagagcacatctgcctgctgcccgacgacgtgagcaagcaggtgaagacctgcaagagcgcccaggccagcctgaagacctaccagaacgaggtgaccggcctgtgggcccagggcagagagctgatgaaggaggtgaccgagcaggagaagagcgaggtgctgggcaagctgcaggagctgcagagcgtgtacgacagcgtgctgcagaagtgcagccacagactgcaggagctggagaagaacctggtgagcagaaagcacttcaaggaggacttcgacaaggcctgccactggctgaagcaggccgacatcgtgaccttccccgagatcaacctgatgaacgagagcagcgagctgcacacccagctggccaagtaccagaacatcctggagcagagccccgagtacgagaacctgctgctgaccctgcagagaaccggccagaccatcctgcccagcctgaacgaggtggaccacagctacctgagcgagaagctgaacgccctgcccagacagttcaacgtgatcgtggccctggccaaggacaagttctacaaggtgcaggaggccatcctggccagaaaggagtacgccagcctgatcgagctgaccacccagagcctgagcgagctggaggcccagttcctgagaatgagcaaggtgcccaccgacctggccgtggaggaggccctgagcctgcaggacggctgcagagccatcctggacgaggtggccggcctgggcgaggccgtggacgagctgaaccagaagaaggagggcttcagaagcaccggccagccctggcagcccgacaagatgctgcacctggtgaccctgtaccacagactgaagagacagaccgagcagagagtgagcctgctggaggacaccaccagcgcctaccaggagcacgagaagatgtgccagcagctggagagacagctgaagagcgtgaaggaggagcagagcaaggtgaacgaggagaccctgcccgccgaggagaagctgaagatgtaccacagcctggccggcagcctgcaggacagcggcatcgtgctgaagagagtgaccatccacctggaggacctggccccccacctggaccccctggcctacgagaaggccagacaccagatccagagctggcagggcgagctgaagctgctgaccagcgccatcggcgagaccgtgaccgagtgcgagagcagaatggtgcagagcatcgacttccagaccgagatgagcagaagcctggactggctgagaagagtgaaggccgagctgagcggccccgtgtacctggacctgaacctgcaggacatccaggaggagatcagaaagatccagatccaccaggaggaggtgcagagcagcctgagaatcatgaacgccctgagccacaaggagaaggagaagttcaccaaggccaaggagctgatcagcgccgacctggagcacagcctggccgagctgagcgagctggacggcgacatccaggaggccctgagaaccagacaggccaccctgaccgagatctacagccagtgccagagatactaccaggtgttccaggccgccaacgactggctggaggacgcccaggagctgctgcagctggccggcaacggcctggacgtggagagcgccgaggagaacctgaagagccacatggagttcttcagcaccgaggaccagttccacagcaacctggaggagctgcacagcctggtggccaccctggaccccctgatcaagcccaccggcaaggaggacctggagcagaaggtggccagcctggagctgagaagccagagaatgagcagagacagcggcgcccaggtggacctgctgcagagatgcaccgcccagtggcacgactaccagaaggccagagaggaggtgatcgagctgatgaacgacaccgagaagaagctgagcgagttcagcctgctgaagaccagcagcagccacgaggccgaggagaagctgagcgagcacaaggccctggtgagcgtggtgaacagcttccacgagaagatcgtggccctggaggagaaggccagccagctggagaagaccggcaacgacgccagcaaggccaccctgagcagaagcatgaccaccgtgtggcagagatggaccagactgagagccgtggcccaggaccaggagaagatcctggaggacgccgtggacgagtggaccggcttcaacaacaaggtgaagaaggccaccgagatgatcgaccagctgcaggacaagctgcccggcagcagcgccgagaaggccagcaaggccgagctgctgaccctgctggagtaccacgacaccttcgtgctggagctggagcagcagcagagcgccctgggcatgctgagacagcagaccctgagcatgctgcaggacggcgccgcccccacccccggcgaggagccccccctgatgcaggagatcaccgccatgcaggacagatgcctgaacatgcaggagaaggtgaagaccaacggcaagctggtgaagcaggagctgaaggacagagagatggtggagacccagatcaacagcgtgaagtgctgggtgcaggagaccaaggagtacctgggcaaccccaccatcgagatcgacgcccagctggaggagctgcagatcctgctgaccgaggccaccaaccacagacagaacatcgagaagatggccgaggagcagaaggagaagtacctgggcctgtacaccatcctgcccagcgagctgagcctgcagctggccgaggtggccctggacctgaagatcagagaccagatccaggacaagatcaaggaggtggagcagagcaaggccaccagccaggagctgagcagacagatccagaagctggccaaggacctgaccaccatcctgaccaagctgaaggccaagaccgacaacgtggtgcaggccaagaccgaccagaaggtgctgggcgaggagctggacggctgcaacagcaagctgatggagctggacgccgccgtgcagaagttcctggagcagaacggccagctgggcaagcccctggccaagaagatcggcaagctgaccgagctgcaccagcagaccatcagacaggccgagaacagactgagcaagctgaaccaggccgccagccacctggaggagtacaacgagatgctggagctgatcctgaagtggatcgagaaggccaaggtgctggcccacggcaccatcgcctggaacagcgccagccagctgagagagcagtacatcctgcaccagaccctgctggaggagagcaaggagatcgacagcgagctggaggccatgaccgagaagctgcagtacctgaccagcgtgtactgcaccgagaagatgagccagcaggtggccgagctgggcagagagaccgaggagctgagacagatgatcaagatcagactgcagaacctgcaggacgccgccaaggacatgaagaagttcgaggccgagctgaagaagctgcaggccgccctggagcaggcccaggccaccctgaccagccccgaggtgggcagactgagcctgaaggagcagctgagccacagacagcacctgctgagcgagatggagagcctgaagcccaaggtgcaggccgtgcagctgtgccagagcgccctgagaatccccgaggacgtggtggccagcctgcccctgtgccacgccgccctgagactgcaggaggaggccagcagactgcagcacaccgccatccagcagtgcaacatcatgcaggccgccgtggtgcagtacgagcagtacgagcaggagatgaagcacctgcagcagctgatcgagggcgcccacagagagatcgaggacaagcccgtggccaccagcaacatccaggagctgcaggcccagatcagcagacacgaggagctggcccagaagatcaagggctaccaggagcagatcgccagcctgaacagcaagtgcaagatgctgaccatgaaggccaagcacgccaccatgctgctgaccgtgaccgaggtggagggcctggccgagggcaccgaggacctggacggcgagctgctgcccacccccagcgcccaccccagcgtggtgatgatgaccgccggcagatgccacaccctgctgagccccgtgaccgaggagagcggcgaggagggcaccaacagcgagatcagcagcccccccgcctgcagaagccccagccccgtggccaacaccgacgccagcgtgaaccaggacatcgcctactaccaggccctgagcgccgagagactgcagaccgacgccgccaagatccaccccagcaccagcgccagccaggagttctacgagcccggcctggagcccagcgccaccgccaagctgggcgacctgcagagaagctgggagaccctgaagaacgtgatcagcgagaagcagagaaccctgtacgaggccctggagagacagcagaagtaccaggacagcctgcagagcatcagcaccaagatggaggccatcgagctgaagctgagcgagagccccgagcccggcagaagccccgagagccagatggccgagcaccaggccctgatggacgagatcctgatgctgcaggacgagatcaacgagctgcagagcagcctggccgaggagctggtgagcgagagctgcgaggccgaccccgccgagcagctggccctgcagagcaccctgaccgtgctggccgagagaatgagcaccatcagaatgaaggccagcggcaagagacagctgctggaggagaagctgaacgaccagctggaggagcagagacaggagcaggccctgcagagatacagatgcgaggccgacgagctggacagctggctgctgagcaccaaggccaccctggacaccgccctgagcccccccaaggagcccatggacatggaggcccagctgatggactgccagaacatgctggtggagatcgagcagaaggtggtggccctgagcgagctgagcgtgcacaacgagaacctgctgctggagggcaaggcccacaccaaggacgaggccgagcagctggccggcaagctgagaagactgaagggcagcctgctggagctgcagagagccctgcacgacaagcagctgaacatgcagggcaccgcccaggagaaggaggagagcgacgtggacctgaccgccacccagagccccggcgtgcaggagtggctggcccaggccagaaccacctggacccagcagagacagagcagcctgcagcagcagaaggagctggagcaggagctggccgagcagaagagcctgctgagaagcgtggccagcagaggcgaggagatcctgatccagcacagcgccgccgagaccagcggcgacgccggcgagaagcccgacgtgctgagccaggagctgggcatggagggcgagaagagcagcgccgaggaccagatgagaatgaagtgggagagcctgcaccaggagttcagcaccaagcagaagctgctgcagaacgtgctggagcaggagcaggagcaggtgctgtacagcagacccaacagactgctgagcggcgtgcccctgtacaagggcgacgtgcccacccaggacaagagcgccgtgaccagcctgctggacggcctgaaccaggccttcgaggaggtgagcagccagagcggcggcgccaagagacagagcatccacctggagcagaagctgtacgacggcgtgagcgccaccagcacctggctggacgacgtggaggagagactgttcgtggccaccgccctgctgcccgaggagaccgagacctgcctgttcaaccaggagatcctggccaaggacatcaaggagatgagcgaggagatggacaagaacaagaacctgttcagccaggccttccccgagaacggcgacaacagagacgtgatcgaggacaccctgggctgcctgctgggcagactgagcctgctggacagcgtggtgaaccagagatgccaccagatgaaggagagactgcagcagatcctgaacttccagaacgacctgaaggtgctgttcaccagcctggccgacaacaagtacatcatcctgcagaagctggccaacgtgttcgagcagcccgtggccgagcagatcgaggccatccagcaggccgaggacggcctgaaggagttcgacgccggcatcatcgagctgaagagaagaggcgacaagctgcaggtggagcagcccagcatgcaggagctgagcaagctgcaggacatgtacgacgagctgatgatgatcatcggcagcagaagaagcggcctgaaccagaacctgaccctgaagagccagtacgagagagccctgcaggacctggccgacctgctggagaccggccaggagaagatggccggcgaccagaagatcatcgtgagcagcaaggaggagatccagcagctgctggacaagcacaaggagtacttccagggcctggagagccacatgatcctgaccgagaccctgttcagaaagatcatcagcttcgccgtgcagaaggagacccagttccacaccgagctgatggcccaggccagcgccgtgctgaagagagcccacaagagaggcgtggagctggagtacatcctggagacctggagccacctggacgaggaccagcaggagctgagcagacagctggaggtggtggagagcagcatccccagcgtgggcctggtggaggagaacgaggacagactgatcgacagaatcaccctgtaccagcacctgaagagcagcctgaacgagtaccagcccaagctgtaccaggtgctggacgacggcaagagactgctgatcagcatcagctgcagcgacctggagagccagctgaaccagctgggcgagtgctggctgagcaacaccaacaagatgagcaaggagctgcacagactggagaccatcctgaagcactggaccagataccagagcgagagcgccgacctgatccactggctgcagagcgccaaggacagactggagttctggacccagcagagcgtgaccgtgccccaggagctggagatggtgagagaccacctgaacgccttcctggagttcagcaaggaggtggacgcccagagcagcctgaagagcagcgtgctgagcaccggcaaccagctgctgagactgaagaaggtggacaccgccaccctgagaagcgagctgagcagaatcgacagccagtggaccgacctgctgaccaacatccccgccgtgcaggagaagctgcaccagctgcagatggacaagctgcccagcagacacgccatcagcgaggtgatgagctggatcagcctgatggagaacgtgatccagaaggacgaggacaacatcaagaacagcatcggctacaaggccatccacgagtacctgcagaagtacaagggcttcaagatcgacatcaactgcaagcagctgaccgtggacttcgtgaaccagagcgtgctgcagatcagcagccaggacgtggagagcaagagaagcgacaagaccgacttcgccgagcagctgggcgccatgaacaagagctggcagatcctgcagggcctggtgaccgagaagatccagctgctggagggcctgctggagagctggagcgagtacgagaacaacgtgcagtgcctgaagacctggttcgagacccaggagaagagactgaagcagcagcacagaatcggcgaccaggccagcgtgcagaacgccctgaaggactgccaggacctggaggacctgatcaaggccaaggagaaggaggtggagaagatcgagcagaacggcctggccctgatccagaacaagaaggaggacgtgagcagcatcgtgatgagcaccctgagagagctgggccagacctgggccaacctggaccacatggtgggccagctgaagatcctgctgaagagcgtgctggaccagtggagcagccacaaggtggccttcgacaagatcaacagctacctgatggaggccagatacagcctgagcagattcagactgctgaccggcagcctggaggccgtgcaggtgcaggtggacaacctgcagaacctgcaggacgacctggagaagcaggagagaagcctgcagaagttcggcagcatcaccaaccagctgctgaaggagtgccacccccccgtgaccgagaccctgaccaacaccctgaaggaggtgaacatgagatggaacaacctgctggaggagatcgccgagcagctgcagagcagcaaggccctgctgcagctgtggcagagatacaaggactacagcaagcagtgcgccagcaccgtgcagcagcaggaggacagaaccaacgagctgctgaaggccgccaccaacaaggacatcgccgacgacgaggtggccacctggatccaggactgcaacgacctgctgaagggcctgggcaccgtgaaggacagcctgttcttcctgcacgagctgggcgagcagctgaagcagcaggtggacgccagcgccgccagcgccatccagagcgaccagctgagcctgagccagcacctgtgcgccctggagcaggccctgtgcaagcagcagaccagcctgcaggccggcgtgctggactacgagaccttcgccaagagcctggaggccctggaggcctggatcgtggaggccgaggagatcctgcagggccaggaccccagccacagcagcgacctgagcaccatccaggagagaatggaggagctgaagggccagatgctgaagttcagcagcatggcccccgacctggacagactgaacgagctgggctacagactgcccctgaacgacaaggagatcaagagaatgcagaacctgaacagacactggagcctgatcagcagccagaccaccgagagattcagcaagctgcagagcttcctgctgcagcaccagaccttcctggagaagtgcgagacctggatggagttcctggtgcagaccgagcagaagctggccgtggagatcagcggcaactaccagcacctgctggagcagcagagagcccacgagctgttccaggccgagatgttcagcagacagcagatcctgcacagcatcatcatcgacggccagagactgctggagcagggccaggtggacgacagagacgagttcaacctgaagctgaccctgctgagcaaccagtggcagggcgtgatcagaagagcccagcagagaagaggcatcatcgacagccagatcagacagtggcagagatacagagagatggccgagaagctgagaaagtggctggtggaggtgagctacctgcccatgagcggcctgggcagcgtgcccatccccctgcagcaggccagaaccctgttcgacgaggtgcagttcaaggagaaggtgttcctgagacagcagggcagctacatcctgaccgtggaggccggcaagcagctgctgctgagcgccgacagcggcgccgaggccgccctgcaggccgagctggccgagatccaggagaagtggaagagcgccagcatgagactggaggagcagaagaagaagctggccttcctgctgaaggactgggagaagtgcgagaagggcatcgccgacagcctggagaagctgagaaccttcaagaagaagctgagccagagcctgcccgaccaccacgaggagctgcacgccgagcagatgagatgcaaggagctggagaacgccgtgggcagctggaccgacgacctgacccagctgagcctgctgaaggacaccctgagcgcctacatcagcgccgacgacatcagcatcctgaacgagagagtggagctgctgcagagacagtgggaggagctgtgccaccagctgagcctgagaagacagcagatcggcgagagactgaacgagtgggccgtgttcagcgagaagaacaaggagctgtgcgagtggctgacccagatggagagcaaggtgagccagaacggcgacatcctgatcgaggagatgatcgagaagctgaagaaggactaccaggaggagatcgccatcgcccaggagaacaagatccagctgcagcagatgggcgagagactggccaaggccagccacgagagcaaggccagcgagatcgagtacaagctgggcaaggtgaacgacagatggcagcacctgctggacctgatcgccgccagagtgaagaagctgaaggagaccctggtggccgtgcagcagctggacaagaacatgagcagcctgagaacctggctggcccacatcgagagcgagctggccaagcccatcgtgtacgacagctgcaacagcgaggagatccagagaaagctgaacgagcagcaggagctgcagagagacatcgagaagcacagcaccggcgtggccagcgtgctgaacctgtgcgaggtgctgctgcacgactgcgacgcctgcgccaccgacgccgagtgcgacagcatccagcaggccaccagaaacctggacagaagatggagaaacatctgcgccatgagcatggagagaagactgaagatcgaggagacctggagactgtggcagaagttcctggacgactacagcagattcgaggactggctgaagagcagcgagagaaccgccgccttccccagcagcagcggcgtgatctacaccgtggccaaggaggagctgaagaagttcgaggccttccagagacaggtgcacgagtgcctgacccagctggagctgatcaacaagcagtacagaagactggccagagagaacagaaccgacagcgcctgcagcctgaagcagatggtgcacgagggcaaccagagatgggacaacctgcagaagagagtgaccagcatcctgagaagactgaagcacttcatcggccagagagaggagttcgagaccgccagagacagcatcctggtgtggctgaccgagatggacctgcagctgaccaacatcgagcacttcagcgagtgcgacgtgcaggccaagatcaagcagctgaaggccttccagcaggagatcagcctgaaccacaacaagatcgagcagatcatcgcccagggcgagcagctgatcgagaagagcgagcccctggacgccgccatcatcgaggaggagctggacgagctgagaagatactgccaggaggtgttcggcagagtggagagataccacaagaagctgatcagactgcccctgcccgacgacgagcacgacctgagcgacagagagctggagctggaggacagcgccgccctgagcgacctgcactggcacgacagaagcgccgacagcctgctgagcccccagcccagcagcaacctgagcctgagcctggcccagcccctgagaagcgagagaagcggcagagacacccccgccagcgtggacagcatccccctggagtgggaccacgactacgacctgagcagagacctggagagcgccatgagcagagccctgcccagcgaggacgaggagggccaggacgacaaggacttctacctgagaggcgccgtgggcctgagcggcgaccacagcgccctggagagccagatcagacagctgggcaaggccctggacgacagcagattccagatccagcagaccgagaacatcatcagaagcaagacccccaccggccccgagctggacaccagctacaagggctacatgaagctgctgggcgagtgcagcagcagcatcgacagcgtgaagagactggagcacaagctgaaggaggaggaggagagcctgcccggcttcgtgaacctgcacagcaccgagacccagaccgccggcgtgatcgacagatgggagctgctgcaggcccaggccctgagcaaggagctgagaatgaagcagaacctgcagaagtggcagcagttcaacagcgacctgaacagcatctgggcctggctgggcgacaccgaggaggagctggagcagctgcagagactggagctgagcaccgacatccagaccatcgagctgcagatcaagaagctgaaggagctgcagaaggccgtggaccacagaaaggccatcatcctgagcatcaacctgtgcagccccgagttcacccaggccgacagcaaggagagcagagacctgcaggacagactgagccagatgaacggcagatgggacagagtgtgcagcctgctggaggagtggagaggcctgctgcaggacgccctgatgcagtgccagggcttccacgagatgagccacggcctgctgctgatgctggagaacatcgacagaagaaagaacgagatcgtgcccatcgacagcaacctggacgccgagatcctgcaggaccaccacaagcagctgatgcagatcaagcacgagctgctggagagccagctgagagtggccagcctgcaggacatgagctgccagctgctggtgaacgccgagggcaccgactgcctggaggccaaggagaaggtgcacgtgatcggcaacagactgaagctgctgctgaaggaggtgagcagacacatcaaggagctggagaagctgctggacgtgagcagcagccagcaggacctgagcagctggagcagcgccgacgagctggacaccagcggcagcgtgagccccaccagcggcagaagcacccccaacagacagaagacccccagaggcaagtgcagcctgagccagcccggccccagcgtgagcagcccccacagcagaagcaccaagggcggcagcgacagcagcctgagcgagcccggccccggcagaagcggcagaggcttcctgttcagagtgctgagagccgccctgcccctgcagctgctgctgctgctgctgatcggcctggcctgcctggtgcccatgagcgaggaggactacagctgcgccctgagcaacaacttcgccagaagcttccaccccatgctgagatacaccaacggccccccccccctgtag

SEQ ID NO: 257454 - DNA, 25230 bp, Artificial Sequence
  derived and/or modified sequence
atggccaccagcagaggcgccagcagatgccccagagacatcgccaacgtgatgcagagactgcaggacgagcaggagatcgtgcagaagagaaccttcaccaagtggatcaacagccacctggccaagagaaagccccccatggtggtggacgacctgttcgaggacatgaaggacggcgtgaagctgctggccctgctggaggtgctgagcggccagaagctgccctgcgagcagggcagaagaatgaagagaatccacgccgtggccaacatcggcaccgccctgaagttcctggagggcagaaagatcaagctggtgaacatcaacagcaccgacatcgccgacggcagacccagcatcgtgctgggcctgatgtggaccatcatcctgtacttccagatcgaggagctgaccagcaacctgccccagctgcagagcctgagcagcagcgccagcagcgtggacagcatcgtgagcagcgagacccccagcccccccagcaagagaaaggtgaccaccaagatccagggcaacgccaagaaggccctgctgaagtgggtgcagtacaccgccggcaagcagaccggcatcgaggtgaaggacttcggcaagagctggagaagcggcgtggccttccacagcgtgatccacgccatcagacccgagctggtggacctggagaccgtgaagggcagaagcaacagagagaacctggaggacgccttcaccatcgccgagaccgagctgggcatccccagactgctggaccccgaggacgtggacgtggacaagcccgacgagaagagcatcatgacctacgtggcccagttcctgaagcactaccccgacatccacaacgccagcaccgacggccaggaggacgacgagatcctgcccggcttccccagcttcgccaacagcgtgcagaacttcaagagagaggacagagtgatcttcaaggagatgaaggtgtggatcgagcagttcgagagagacctgaccagagcccagatggtggagagcaacctgcaggacaagtaccagagcttcaagcacttcagagtgcagtacgagatgaagagaaagcagatcgagcacctgatccagcccctgcacagagacggcaagctgagcctggaccaggccctggtgaagcagagctgggacagagtgaccagcagactgttcgactggcacatccagctggacaagagcctgcccgcccccctgggcaccatcggcgcctggctgtacagagccgaggtggccctgagagaggagatcaccgtgcagcaggtgcacgaggagaccgccaacaccatccagagaaagctggagcagcacaagagaaagctgagaaacgtgatcgacctgctgcagaacaccgacgcccacaagagagccttccacgagatctacagaaccagaagcgtgaacggcatccccgtgccccccgaccagctggaggacatggccgagagattccacttcgtgagcagcaccagcgagctgcacctgatgaagatggagttcctggagctgaagtacagactgctgagcctgctggtgctggccgagagcaagctgaagagctggatcatcaagtacggcagaagagagagcgtggagcagctgctgcagaactacgtgagcttcatcgagaacagcaagttcttcgagcagtacgaggtgacctaccagatcctgaagcagaccgccgagatgtacgtgaaggccgacggcagcgtggaggaggccgagaacgtgatgaagttcatgaacgagaccaccgcccagtggagaaacctgagcgtggaggtgagaagcgtgagaagcatgctggaggaggtgatcagcaactgggacagatacggcaacaccgtggccagcctgcaggcctggctggaggacgccgagaagatgctgaaccagagcgagaacgccaagaaggacttcttcagaaacctgccccactggatccagcagcacaccgccatgaacgacgccggcaacttcctgatcgagacctgcgacgagatggtgagcagagacctgaagcagcagctgctgctgctgaacggcagatggagagagctgttcatggaggtgaagcagtacgcccaggccgacgagatggacagaatgaagaaggagtacaccgactgcgtggtgaccctgagcgccttcgccaccgaggcccacaagaagctgagcgagcccctggaggtgagcttcatgaacgtgaagctgctgatccaggacctggaggacatcgagcagagagtgcccgtgatggacgcccagtacaagatcatcaccaagaccgcccacctgatcaccaaggagagcccccaggaggagggcaaggagatgttcgccaccatgagcaagctgaaggagcagctgaccaaggtgaaggagtgctacagccccctgctgtacgagagccagcagctgctgatccccctggaggagctggagaagcagatgaccagcttctacgacagcctgggcaagatcaacgagatcatcaccgtgctggagagagaggcccagagcagcgccctgttcaagcagaagcaccagctgagaatcctgaagtgcaagtggtgcaacagcagccagaagatgaccctgtgcctggtgctgggcagcatgatcagcatgctgagcaccgccaagatcaccatcgccggctacaagagcgaggtggaggtgagcgagctgctggcctgccaggagaactgcaagaagaccctgaccctgatcgagaagggcagccagagcgtgcagaagttcgtgaccctgagcaacgtgctgaagcacttcgaccagaccagactgcagaccgactgcagatacagctgctgcttcagcgtgatgagaaagcagcaccacatcatgatcgtgttccacatcaagagcatggtgaagaagaccggcgactggaagaagcacgtggagaccaacagcagactgatgaagaagttcgaggagagcagagccgagctggagaaggtgctgagaatcgcccaggagggcctggaggagaagggcgaccccgaggagctgctgagaagacacaccgagttcttcagccagctggaccagagagtgctgaacgccttcctgaaggcctgcgacgagctgaccgacatcctgcccgagcaggagcagcagggcctgcaggaggccgtgagaaagctgcacaagcagtggaaggacctgcagggcgaggccccctaccacctgctgcacctgaagatcgacgtggagaagaacagattcctggccagcgtggaggagtgcagaaccgagctggacagagagaccaagctgatgccccaggagggcagcgagaagatcatcaaggagcacagagtgttcttcagcgacaagggcccccaccacctgtgcgagaagagactgcagctgatcgaggagctgtgcgtgaagctgcccgtgagagaccccgtgagagacacccccggcacctgccacgtgaccctgaaggagctgagagccgccatcgacagcacctacagaaagctgatggaggaccccgacaagtggaaggactacaccagcagattcagcgagttcagcagctggatcagcaccaacgagacccagctgaagggcatcaagggcgaggccatcgacaccgccaaccacggcgaggtgaagagagccgtggaggagatcagaaacggcgtgaccaagagaggcgagaccctgagctggctgaagagcagactgaaggtgctgaccgaggtgagcagcgagaacgaggcccagaagcagggcgacgagctggccaagctgagcagcagcttcaaggccctggtgaccctgctgagcgaggtggagaagatgctgagcaacttcggcgactgcgtgcagtacaaggagatcgtgaagaacagcctggaggagctgatcagcggcagcaaggaggtgcaggagcaggccgagaagatcctggacaccgagaacctgttcgaggcccagcagctgctgctgcaccaccagcagaagaccaagagaatcagcgccaagaagagagacgtgcagcagcagatcgcccaggcccagcagggcgagggcggcctgcccgacagaggccacgaggagctgagaaagctggagagcaccctggacggcctggagagaagcagagagagacaggagagaagaatccaggtgaccctgagaaagtgggagagattcgagaccaacaaggagaccgtggtgagatacctgttccagaccggcagcagccacgagagattcctgagcttcagcagcctggagagcctgagcagcgagctggagcagaccaaggagttcagcaagagaaccgagagcatcgccgtgcaggccgagaacctggtgaaggaggccagcgagatccccctgggcccccagaacaagcagctgctgcagcagcaggccaagagcatcaaggagcaggtgaagaagctggaggacaccctggaggaggagtacgtgatcgacaacaagaccatggagatggtgaagaccaagtgggaccacttcggcagcaacttcgagaccctgagcgtgtggatcaccgagaaggagaaggagctgaacgccctggagaccagcagcagcgccatggacatgcagatcagccagatcaaggtgaccatccaggagatcgagagcaagctgagcagcatcgtgggcctggaggaggaggcccagagcttcgcccagttcgtgaccaccggcgagagcgccagaatcaaggccaagctgacccagatcagaagatacggcgaggagctgagagagcacgcccagtgcctggagggcaccatcctgggccacctgagccagcagcagaagttcgaggagaacctgagaaagatccagcagagcgtgagcgagttcgaggacaagctggccgtgcccatcaagatctgcagcagcgccaccgagacctacaaggtgctgcaggagcacatggacctgtgccaggccctggagagcctgagcagcgccatcaccgccttcagcgccagcgccagaaaggtggtgaacagagacagctgcgtgcaggaggccgccgccctgcagcagcagtacgaggacatcctgagaagagccaaggagagacagaccgccctggagaacctgctggcccactggcagagactggagaaggagctgagcagcttcctgacctggctggagagaggcgaggccaaggccagcagccccgagatggacatcagcgccgacagagtgaaggtggaggccagcaaggacgacgtgaagatgatgaagctgcacctggagcagctggacgagagatggagagacctgccccagatcatcaacaagagaatcaacttcctgcagagcgtggtggccgagcaccagcagttcgacgagctgctgctgagcttcagcgtgtggatcaagctgttcctgagcgagctgcagaccaccagcgagatcagcatcatggaccaccaggtggccctgaccagacacaaggaccacgccgccgaggtggagagcaagaagggcgagctgcagagcctgcagggccacctggccaagctgggcagcctgggcagagccgaggacctgcacctgctgcagggcaaggccgaggactgcttccagctgttcgaggaggccagccaggtggtggagagaagacagctggccctgagccacctggccgagttcctgcagagccacgccagcctgagcggcatcctgagacagctgagacagaccgtggaggccaccaacagcatgaacaagaacgagagcgacctgatcgagaaggacctgaacgacgccctgcagaacgccaaggccctggagagcgccgccgtgagcctggacggcatcctgagcaaggcccagtaccacctgaagatcggcagcagcgagcagagaaccagctgcagagccaccgccgaccagctgtgcggcgaggtggagagaatccagaacctgctgggcaccaagcagagcgaggccgacgccctggccgtgctgaagaaggccttccaggaccagaaggaggagctgctgaagagcatcgaggacatcgaggagagaaccgacaaggagagactgaaggagcccaccagacaggccctgcagcagagactgagagtgttcaaccagctggaggacgagctgaacagccacgagcacgagctgtgctggctgaaggacaaggccaagcagatcgcccagaaggacgtggccttcgcccccgaggtggacagagagatcaacagactggaggtgacctgggacgacaccaagagactgatccacgagaaccagggccagtgctgcggcctgatcgacctgatgagagagtaccagaacctgaagagcgccgtgagcaaggtgctggagaacgccagcagcgtgatcgtgaccagaaccaccatcaaggaccaggaggacctgaagtgggccttcagcaagcacgagaccgccaagaacaagatgaactacaagcagaaggacctggacaacttcaccagcaagggcaagcacctgctgagcgagctgaagaagatccacagcagcgacttcagcctggtgaagaccgacatggagagcaccgtggacaagtggctggacgtgagcgagaagctggaggagaacatggacagactgagagtgagcctgagcatctgggacgacgtgctgagcaccagagacgagatcgagggctggagcaacaactgcgtgccccagatggccgagaacatcagcaacctggacaaccacctgagagccgaggagctgctgaaggagttcgagagcgaggtgaagaacaaggccctgagactggaggagctgcacagcaaggtgaacgacctgaaggagctgaccaagaacctggagaccccccccgacctgcagttcatcgaggccgacctgatgcagaagctggagcacgccaaggagatcaccgaggtggccaagggcaccctgaaggacttcaccgcccagagcacccaggtggagaagttcatcaacgacatcaccacctggttcaccaaggtggaggagagcctgatgaactgcgcccagaacgagacctgcgaggccctgaagaaggtgaaggacatccagaaggagctgcagagccagcagagcaacatcagcagcacccaggagaacctgaacagcctgtgcagaaagtaccacagcgccgagctggagagcctgggcagagccatgaccggcctgatcaagaagcacgaggccgtgagccagctgtgcagcaagacccaggccagcctgcaggagagcctggagaagcacttcagcgaggagagcatgcaggagttccaggagtggttcctgggcgccaaggccgccgccaaggagagcagcgacagaaccggcgacagcaaggtgctggaggccaagctgcacgacctgcagcagaacatcctggacagcgtgagcgacggccagagcaagctggacgccgtgacccaggagggccagaccctgtacgcccacctgagcaagcagatcgtgagcagcatccaggagcagatcaccaaggccaacgaggagttccaggccttcctgaagcagtgcctgaaggacaagcaggccctgcaggactgcgccagcgagctgggcagcttcgaggaccagcacagaaagctgaacctgtggatccacgagatggaggagagattcaacaccgagaacctgggcgagagcaagcagcacatccccgagaagaagaacgaggtgcacaaggtggagatgttcctgggcgagctgctggccgccagagagagcctggacaagctgagccagagaggccagctgctgagcgaggagggccacggcgccggccaggagggcagactgtgcagccagctgctgaccagccaccagaacctgctgagaatgaccaaggagaagctgagaagctgccaggtggccctgcaggagcacgaggccctggaggaggccctgcagagcatgtggttctgggtgaaggccatccaggacagactggcctgcgccgagagcaccctgggcagcaaggacaccctggagaagagactgagccagatccaggacatcctgctgatgaagggcgagggcgaggtgaagctgaacatggccatcggcaagggcgagcaggccctgagaagcagcaacaaggagggccagagagtgatccagacccagctggagaccctgaaggaggtgtgggccgacatcatgagcagcagcgtgcacgcccagagcaccctggagagcgtgatcagccagtggaacgactacgtggagagaaagaaccagctggagcagtggatggagagcgtggaccagaagatcgagcaccccctgcagccccagcccggcctgaaggagaagttcgtgctgctggaccacctgcagagcatcctgagcgaggccgaggaccacaccagagccctgcacagactgatcgccaagagcagagagctgtacgagaagaccgaggacgagagcttcaaggacaccgcccaggaggagctgaagacccagttcaacgacatcatgaccgtggccaaggagaagatgagaaaggtggaggagatcgtgaaggaccacctgatgtacctggacgccgtgcacgagttcaccgactggctgcacagcgccaaggaggagctgcacagatggagcgacatgagcggcgacagcagcgccacccagaagaagctgagcaagatcaaggagctgatcgacagcagagagatcggcgccagcagactgagcagagtggagagcctggcccccgaggtgaagcagaacaccaccgccagcggctgcgagctgatgcacaccgagatgcaggccctgagagccgactggaagcagtgggaggacagcgtgttccagacccagagctgcctggagaacctggtgagccagatggccctgagcgagcaggagttcagcggccaggtggcccagctggagcaggccctggagcagttcagcgccctgctgaagacctgggcccagcagctgaccctgctggagggcaagaacaccgacgaggagatcgtggagtgctggcacaagggccaggagatcctggacgccctgcagaaggccgagcccagaaccgaggacctgaagagccagctgaacgagctgtgcagattcagcagagacctgagcacctacagcggcaaggtgagcggcctgatcaaggagtacaactgcctgtgcctgcaggccagcaagggctgccagaacaaggagcagatcctgcagcagagattcagaaaggccttcagagacttccagcagtggctggtgaacgccaagatcaccaccgccaagtgcttcgacatcccccagaacatcagcgaggtgagcaccagcctgcagaagatccaggagttcctgagcgagagcgagaacggccagcacaagctgaacatgatgctgagcaagggcgagctgctgagcaccctgctgaccaaggagaaggccaagggcatccaggccaaggtgaccgccgccaaggaggactggaagaacttccacagcaacctgcaccagaaggagagcgccctggagaacctgaagatccagatgaaggacttcgaggtgagcgccgagcccatccaggactggctgagcaagaccgagaagatggtgcacgagagcagcaacagactgtacgacctgcccgccaagagaagagagcagcagaagctgcagagcgtgctggaggagatccactgctacgagccccagctgaacagactgaaggagaaggcccagcagctgtgggagggccaggccgccagcaagagcttcagacacagagtgagccagctgagcagccagtacctggccctgagcaacctgaccaaggagaaggtgagcagactggacagaatcgtggccgagcacaaccagttcagcctgggcatcaaggagctgcaggactggatgaccgacgccatccacatgctggacagctactgccaccccaccagcgacaagagcgtgctggacagcagaaccctgaagctggaggccctgctgagcgtgaagcaggagaaggagatccagatgaagatgatcgtgaccagaggcgagagcgtgctgcagaacaccagccccgagggcatccccaccatccagcagcagctgcagagcgtgaaggacatgtgggccagcctgctgagcgccggcatcagatgcaagagagtgagactgccctgcgcctacatcgccctgaagctgagagtgcaccagcacgccgagctgagagacaagaccaccatgctgggcaaggccaaggaggccgtgaccaagagcgagaagctggtgagactgcaccaggagtaccagagagacctgaaggccttcgaggtgtggctgggccaggagcaggagaagctggaccagtacagcgtgctggagggcgacgcccacacccacgagaccaccctgagagacctgcaggagctgcaggtgcactgcgccgagggccaggccctgctgaacagcgtgctgcacaccagagaggacgtgatccccagcggcatcccccaggccgaggacagagccctggagagcctgagacaggactggcaggcctaccagcacagactgagcgagaccagaacccagttcaacaacgtggtgaacaagctgagactgatggagcagaagttccagcaggtggacgagtggctgaagaccgccgaggagaaggtgagccccagaaccagaagacagagcaacagagccaccaaggagatccagctgcaccagatgaagaagtggcacgaggaggtgaccgcctacagagacgaggtggaggaggtgggcgccagagcccaggagatcctggacgagagccacgtgaacagcagaatgggctgccaggccacccagctgaccagcagataccaggccctgctgctgcaggtgctggagcagatcaagttcctggaggaggagatccagagcctggaggagagcgagagcagcctgagcagctacagcgactggtacggcagcacccacaagaacttcaagaacgtggccaccaagatcgacaaggtggacaccgtgatgatgggcaagaagctgaagaccctggaggtgctgctgaaggacatggagaagggccacagcctgctgaagagcgccagagagaagggcgagagagccgtgaagtacctggaggagggcgaggccgagagactgagaaaggagatccacgaccacatggagcagctgaaggagctgaccagcaccgtgagaaaggagcacatgaccctggagaagagcctgcagcagaccgtgctgagccacgagcccagcgtgaagagcgtgagagagaagggcgaggccctgctggagctggtgcaggacgtgaccctgaaggacaagatcgaccagctgcagagcgactaccaggacctgtgcagcatcggcaaggagcacgtgttcagcctggaggccaaggtgaaggaccacgaggactacaacagcgagctgcaggaggtggagaagtggctgctgcagatgagcggcagactggtggcccccgacctgctggagaccagcagcctggagaccatcacccagcagctggcccaccacaagatgtaccagagcctggagcacgagctgcagaagcacgtgagcagacaggacaccctgcagcagtgccaggcctggctgagcgccgtgcagcccgacctggagcccagcccccagccccccctgagcagagccgaggccatcaagcaggtgaagcacttcagagccctgcaggagcaggccagaacctacctggacctgctgtgcagcatgtgcgacctgagcaacgccagcgtgaagaccaccgccaaggacatccagcagaccgagcagaccatcgagcagaagctggtgcaggcccagaacctgacccagggctgggaggagatcaagcacctgaagagcgagctgtggatctacctgcaggacgccgaccagcagctgcagaacatgaagagaagacacagcgagctggagctgaacatcgcccagaacatggtgagccaggtgaaggacttcgtgaagaagctgcagagcaagcaggccagcgtgaacaccatcatcgagaaggtgaacaagctgaccaagaaggaggagagccccgagcacaaggagatcaaccacctgaacgaccagtggctggacctgtgcagacagagcaacaacctgtgcctgcagagagaggaggacctgcagagaaccagagactaccacgactgcatgaacgtggtggaggtgttcctggagaagttcaccaccgagtgggacaacctggccagaagcgacgccgagagcaccgccgtgcacctggaggccctgaagaagctggccctggccctgcaggagagaaagtacgccatcgaggacctgaaggaccagaagcagaagatgatcgagcacctgaacctggacgacaaggagctggtgaaggagcagaccagccacctggagcagagatggttccagctggaggacctgatcaagagaaagatccaggtgagcgtgaccaacctggaggagctgaacgtggtgcagagcagattccaggagctgatggagtgggccgaggagcagcagcccaacatcgccgaggccctgaagcagagccccccccccgacatggcccagaacctgctgatggaccacctggccatctgcagcgagctggaggccaagcagatgctgctgaagagcctgatcaaggacgccgacagagtgatggccgacctgggcctgaacgagagacaggtgatccagaaggccctgagcgacgcccagagccacgtgaactgcctgagcgacctggtgggccagagaagaaagaagcacttcaaggaggacttcgacaaggcctgccactggctgaagcaggccgacatcgtgaccttccccgagatcaacctgatgaacgagagcagcgagctgcacacccagctggccaagtaccagaacatcctggagcagagccccgagtacgagaacctgctgctgaccctgcagagaaccggccagaccatcctgcccagcctgaacgaggtggaccacagctacctgagcgagaagctgaacgccctgcccagacagttcaacgtgatcgtggccctggccaaggacaagttctacaaggtgcaggaggccatcctggccagaaaggagtacgccagcctgatcgagctgaccacccagagcctgagcgagctggaggcccagttcctgagaatgagcaaggtgcccaccgacctggccgtggaggaggccctgagcctgcaggacggctgcagagccatcctggacgaggtggccggcctgggcgaggccgtggacgagctgaaccagaagaaggagggcttcagaagcaccggccagccctggcagcccgacaagatgctgcacctggtgaccctgtaccacagactgaagagacagaccgagcagagagtgagcctgctggaggacaccaccagcgcctaccaggagcacgagaagatgtgccagcagctggagagacagctgaagagcgtgaaggaggagcagagcaaggtgaacgaggagaccctgcccgccgaggagaagctgaagatgtaccacagcctggccggcagcctgcaggacagcggcatcgtgctgaagagagtgaccatccacctggaggacctggccccccacctggaccccctggcctacgagaaggccagacaccagatccagagctggcagggcgagctgaagctgctgaccagcgccatcggcgagaccgtgaccgagtgcgagagcagaatggtgcagagcatcgacttccagaccgagatgagcagaagcctggactggctgagaagagtgaaggccgagctgagcggccccgtgtacctggacctgaacctgcaggacatccaggaggagatcagaaagatccagatccaccaggaggaggtgcagagcagcctgagaatcatgaacgccctgagccacaaggagaaggagaagttcaccaaggccaaggagctgatcagcgccgacctggagcacagcctggccgagctgagcgagctggacggcgacatccaggaggccctgagaaccagacaggccaccctgaccgagatctacagccagtgccagagatactaccaggtgttccaggccgccaacgactggctggaggacgcccaggagctgctgcagctggccggcaacggcctggacgtggagagcgccgaggagaacctgaagagccacatggagttcttcagcaccgaggaccagttccacagcaacctggaggagctgcacagcctggtggccaccctggaccccctgatcaagcccaccggcaaggaggacctggagcagaaggtggccagcctggagctgagaagccagagaatgagcagagacagcggcgcccaggccctggtgagcgtggtgaacagcttccacgagaagatcgtggccctggaggagaaggccagccagctggagaagaccggcaacgacgccagcaaggccaccctgagcagaagcatgaccaccgtgtggcagagatggaccagactgagagccgtggcccaggaccaggagaagatcctggaggacgccgtggacgagtggaccggcttcaacaacaaggtgaagaaggccaccgagatgatcgaccagctgcaggacaagctgcccggcagcagcgccgagaaggccagcaaggccgagctgctgaccctgctggagtaccacgacaccttcgtgctggagctggagcagcagcagagcgccctgggcatgctgagacagcagaccctgagcatgctgcaggacggcgccgcccccacccccggcgaggagccccccctgatgcaggagatcaccgccatgcaggacagatgcctgaagatggtggagacccagatcaacagcgtgaagtgctgggtgcaggagaccaaggagtacctgggcaaccccaccatcgagatcgacgcccagctggaggagctgcagatcctgctgaccgaggccaccaaccacagacagaacatcgagaagatggccgaggagcagaaggagaagtacctgggcctgtacaccatcctgcccagcgagctgagcctgcagctggccgaggtggccctggacctgaagatcagagaccagatccaggacaagatcaaggaggtggagcagagcaaggccaccagccaggagctgagcagacagatccagaagctggccaaggacctgaccaccatcctgaccaagctgaaggccaagaccgacaacgtggtgcaggccaagaccgaccagaaggccgccagccacctggaggagtacaacgagatgctggagctgatcctgaagtggatcgagaaggccaaggtgctggcccacggcaccatcgcctggaacagcgccagccagctgagagagcagtacatcctgcaccagaccctgctggaggagagcaaggagatcgacagcgagctggaggccatgaccgagaagctgcagtacctgaccagcgtgtactgcaccgagaagatgagccagcaggtggccgagctgggcagagagaccgaggagctgagacagatgatcaagatcagactgcagaacctgcaggacgccgccaaggacatgaagaagttcgaggccgagctgaagaagctgcaggccgccctggagcaggcccaggccaccctgaccagccccgaggtgggcagactgagcctgaaggagcagctgagccacagacagcacctgctgagcgagatggagagcctgaagcccaaggtgcaggccgtgcagctgtgccagagcgccctgagaatccccgaggacgtggtggccagcctgcccctgtgccacgccgccctgagactgcaggaggaggccagcagactgcagcacaccgccatccagcagtgcaacatcatgcaggaggccgtggtgcagtacgagcagtacgagcaggagatgaagcacctgcagcagctgatcgagggcgcccacagagagatcgaggacaagcccgtggccaccagcaacatccaggagctgcaggcccagatcagcagacacgaggagctggcccagaagatcaagggctaccaggagcagatcgccagcctgaacagcaagtgcaagatgctgaccatgaaggccaagcacgccaccatgctgctgaccgtgaccgaggtggagggcctggccgagggcaccgaggacctggacggcgagctgctgcccacccccagcgcccaccccagcgtggtgatgatgaccgccggcagatgccacaccctgctgagccccgtgaccgaggagagcggcgaggagggcaccaacagcgagatcagcagcccccccgcctgcagaagccccagccccgtggccaacaccgacgccagcgtgaaccaggacatcgcctactaccaggccctgagcgccgagagactgcagaccgacgccgccaagatccaccccagcaccagcgccagccaggagttctacgagcccggcctggagcccagcgccaccgccaagctgggcgacctgcagagaagctgggagaccctgaagaacgtgatcagcgagaagcagagaaccctgtacgaggccctggagagacagcagaagtaccaggacagcctgcagagcatcagcaccaagatggaggccatcgagctgaagctgagcgagagccccgagcccggcagaagccccgagagccagatggccgagcaccaggccctgatggacgagatcctgatgctgcaggacgagatcaacgagctgcagagcagcctggccgaggagctggtgagcgagagctgcgaggccgaccccgccgagcagctggccctgcagagcaccctgaccgtgctggccgagagaatgagcaccatcagaatgaaggccagcggcaagagacagctgctggaggagaagctgaacgaccagctggaggagcagagacaggagcaggccctgcagagatacagatgcgaggccgacgagctggacagctggctgctgagcaccaaggccaccctggacaccgccctgagcccccccaaggagcccatggacatggaggcccagctgatggactgccagaacatgctggtggagatcgagcagaaggtggtggccctgagcgagctgagcgtgcacaacgagaacctgctgctggagggcaaggcccacaccaaggacgaggccgagcagctggccggcaagctgagaagactgaagggcagcctgctggagctgcagagagccctgcacgacaagcagctgaacatgcagggcaccgcccaggagaaggaggagagcgacgtggacctgaccgccacccagagccccggcgtgcaggagtggctggcccaggccagaaccacctggacccagcagagacagagcagcctgcagcagcagaaggagctggagcaggagctggccgagcagaagagcctgctgagaagcgtggccagcagaggcgaggagatcctgatccagcacagcgccgccgagaccagcggcgacgccggcgagaagcccgacgtgctgagccaggagctgggcatggagggcgagaagagcagcgccgaggaccagatgagaatgaagtgggagagcctgcaccaggagttcagcaccaagcagaagctgctgcagaacgtgctggagcaggagcaggagcaggtgctgtacagcagacccaacagactgctgagcggcgtgcccctgtacaagggcgacgtgcccacccaggacaagagcgccgtgaccagcctgctggacggcctgaaccaggccttcgaggaggtgagcagccagagcggcggcgccaagagacagagcatccacctggagcagaagctgtacgacggcgtgagcgccaccagcacctggctggacgacgtggaggagagactgttcgtggccaccgccctgctgcccgaggagaccgagacctgcctgttcaaccaggagatcctggccaaggacatcaaggagatgagcgaggagatggacaagaacaagaacctgttcagccaggccttccccgagaacggcgacaacagagacgtgatcgaggacaccctgggctgcctgctgggcagactgagcctgctggacagcgtggtgaaccagagatgccaccagatgaaggagagactgcagcagatcctgaacttccagaacgacctgaaggtgctgttcaccagcctggccgacaacaagtacatcatcctgcagaagctggccaacgtgttcgagcagcccgtggccgagcagatcgaggccatccagcaggccgaggacggcctgaaggagttcgacgccggcatcatcgagctgaagagaagaggcgacaagctgcaggtggagcagcccagcatgcaggagctgagcaagctgcaggacatgtacgacgagctgatgatgatcatcggcagcagaagaagcggcctgaaccagaacctgaccctgaagagccagtacgagagagccctgcaggacctggccgacctgctggagaccggccaggagaagatggccggcgaccagaagatcatcgtgagcagcaaggaggagatccagcagctgctggacaagcacaaggagtacttccagggcctggagagccacatgatcctgaccgagaccctgttcagaaagatcatcagcttcgccgtgcagaaggagacccagttccacaccgagctgatggcccaggccagcgccgtgctgaagagagcccacaagagaggcgtggagctggagtacatcctggagacctggagccacctggacgaggaccagcaggagctgagcagacagctggaggtggtggagagcagcatccccagcgtgggcctggtggaggagaacgaggacagactgatcgacagaatcaccctgtaccagcacctgaagagcagcctgaacgagtaccagcccaagctgtaccaggtgctggacgacggcaagagactgctgatcagcatcagctgcagcgacctggagagccagctgaaccagctgggcgagtgctggctgagcaacaccaacaagatgagcaaggagctgcacagactggagaccatcctgaagcactggaccagataccagagcgagagcgccgacctgatccactggctgcagagcgccaaggacagactggagttctggacccagcagagcgtgaccgtgccccaggagctggagatggtgagagaccacctgaacgccttcctggagttcagcaaggaggtggacgcccagagcagcctgaagagcagcgtgctgagcaccggcaaccagctgctgagactgaagaaggtggacaccgccaccctgagaagcgagctgagcagaatcgacagccagtggaccgacctgctgaccaacatccccgccgtgcaggagaagctgcaccagctgcagatggacaagctgcccagcagacacgccatcagcgaggtgatgagctggatcagcctgatggagaacgtgatccagaaggacgaggacaacatcaagaacagcatcggctacaaggccatccacgagtacctgcagaagtacaagggcttcaagatcgacatcaactgcaagcagctgaccgtggacttcgtgaaccagagcgtgctgcagatcagcagccaggacgtggagagcaagagaagcgacaagaccgacttcgccgagcagctgggcgccatgaacaagagctggcagatcctgcagggcctggtgaccgagaagatccagctgctggagggcctgctggagagctggagcgagtacgagaacaacgtgcagtgcctgaagacctggttcgagacccaggagaagagactgaagcagcagcacagaatcggcgaccaggccagcgtgcagaacgccctgaaggactgccaggacctggaggacctgatcaaggccaaggagaaggaggtggagaagatcgagcagaacggcctggccctgatccagaacaagaaggaggacgtgagcagcatcgtgatgagcaccctgagagagctgggccagacctgggccaacctggaccacatggtgggccagctgaagatcctgctgaagagcgtgctggaccagtggagcagccacaaggtggccttcgacaagatcaacagctacctgatggaggccagatacagcctgagcagattcagactgctgaccggcagcctggaggccgtgcaggtgcaggtggacaacctgcagaacctgcaggacgacctggagaagcaggagagaagcctgcagaagttcggcagcatcaccaaccagctgctgaaggagtgccacccccccgtgaccgagaccctgaccaacaccctgaaggaggtgaacatgagatggaacaacctgctggaggagatcgccgagcagctgcagagcagcaaggccctgctgcagctgtggcagagatacaaggactacagcaagcagtgcgccagcaccgtgcagcagcaggaggacagaaccaacgagctgctgaaggccgccaccaacaaggacatcgccgacgacgaggtggccacctggatccaggactgcaacgacctgctgaagggcctgggcaccgtgaaggacagcctgttcttcctgcacgagctgggcgagcagctgaagcagcaggtggacgccagcgccgccagcgccatccagagcgaccagctgagcctgagccagcacctgtgcgccctggagcaggccctgtgcaagcagcagaccagcctgcaggccggcgtgctggactacgagaccttcgccaagagcctggaggccctggaggcctggatcgtggaggccgaggagatcctgcagggccaggaccccagccacagcagcgacctgagcaccatccaggagagaatggaggagctgaagggccagatgctgaagttcagcagcatggcccccgacctggacagactgaacgagctgggctacagactgcccctgaacgacaaggagatcaagagaatgcagaacctgaacagacactggagcctgatcagcagccagaccaccgagagattcagcaagctgcagagcttcctgctgcagcaccagaccttcctggagaagtgcgagacctggatggagttcctggtgcagaccgagcagaagctggccgtggagatcagcggcaactaccagcacctgctggagcagcagagagcccacgagctgttccaggccgagatgttcagcagacagcagatcctgcacagcatcatcatcgacggccagagactgctggagcagggccaggtggacgacagagacgagttcaacctgaagctgaccctgctgagcaaccagtggcagggcgtgatcagaagagcccagcagagaagaggcatcatcgacagccagatcagacagtggcagagatacagagagatggccgagaagctgagaaagtggctggtggaggtgagctacctgcccatgagcggcctgggcagcgtgcccatccccctgcagcaggccagaaccctgttcgacgaggtgcagttcaaggagaaggtgttcctgagacagcagggcagctacatcctgaccgtggaggccggcaagcagctgctgctgagcgccgacagcggcgccgaggccgccctgcaggccgagctggccgagatccaggagaagtggaagagcgccagcatgagactggaggagcagaagaagaagctggccttcctgctgaaggactgggagaagtgcgagaagggcatcgccgacagcctggagaagctgagaaccttcaagaagaagctgagccagagcctgcccgaccaccacgaggagctgcacgccgagcagatgagatgcaaggagctggagaacgccgtgggcagctggaccgacgacctgacccagctgagcctgctgaaggacaccctgagcgcctacatcagcgccgacgacatcagcatcctgaacgagagagtggagctgctgcagagacagtgggaggagctgtgccaccagctgagcctgagaagacagcagatcggcgagagactgaacgagtgggccgtgttcagcgagaagaacaaggagctgtgcgagtggctgacccagatggagagcaaggtgagccagaacggcgacatcctgatcgaggagatgatcgagaagctgaagaaggactaccaggaggagatcgccatcgcccaggagaacaagatccagctgcagcagatgggcgagagactggccaaggccagccacgagagcaaggccagcgagatcgagtacaagctgggcaaggtgaacgacagatggcagcacctgctggacctgatcgccgccagagtgaagaagctgaaggagaccctggtggccgtgcagcagctggacaagaacatgagcagcctgagaacctggctggcccacatcgagagcgagctggccaagcccatcgtgtacgacagctgcaacagcgaggagatccagagaaagctgaacgagcagcaggagctgcagagagacatcgagaagcacagcaccggcgtggccagcgtgctgaacctgtgcgaggtgctgctgcacgactgcgacgcctgcgccaccgacgccgagtgcgacagcatccagcaggccaccagaaacctggacagaagatggagaaacatctgcgccatgagcatggagagaagactgaagatcgaggagacctggagactgtggcagaagttcctggacgactacagcagattcgaggactggctgaagagcagcgagagaaccgccgccttccccagcagcagcggcgtgatctacaccgtggccaaggaggagctgaagaagttcgaggccttccagagacaggtgcacgagtgcctgacccagctggagctgatcaacaagcagtacagaagactggccagagagaacagaaccgacagcgcctgcagcctgaagcagatggtgcacgagggcaaccagagatgggacaacctgcagaagagagtgaccagcatcctgagaagactgaagcacttcatcggccagagagaggagttcgagaccgccagagacagcatcctggtgtggctgaccgagatggacctgcagctgaccaacatcgagcacttcagcgagtgcgacgtgcaggccaagatcaagcagctgaaggccttccagcaggagatcagcctgaaccacaacaagatcgagcagatcatcgcccagggcgagcagctgatcgagaagagcgagcccctggacgccgccatcatcgaggaggagctggacgagctgagaagatactgccaggaggtgttcggcagagtggagagataccacaagaagctgatcagactgcccctgcccgacgacgagcacgacctgagcgacagagagctggagctggaggacagcgccgccctgagcgacctgcactggcacgacagaagcgccgacagcctgctgagcccccagcccagcagcaacctgagcctgagcctggcccagcccctgagaagcgagagaagcggcagagacacccccgccagcgtggacagcatccccctggagtgggaccacgactacgacctgagcagagacctggagagcgccatgagcagagccctgcccagcgaggacgaggagggccaggacgacaaggacttctacctgagaggcgccgtgggcctgagcggcgaccacagcgccctggagagccagatcagacagctgggcaaggccctggacgacagcagattccagatccagcagaccgagaacatcatcagaagcaagacccccaccggccccgagctggacaccagctacaagggctacatgaagctgctgggcgagtgcagcagcagcatcgacagcgtgaagagactggagcacaagctgaaggaggaggaggagagcctgcccggcttcgtgaacctgcacagcaccgagacccagaccgccggcgtgatcgacagatgggagctgctgcaggcccaggccctgagcaaggagctgagaatgaagcagaacctgcagaagtggcagcagttcaacagcgacctgaacagcatctgggcctggctgggcgacaccgaggaggagctggagcagctgcagagactggagctgagcaccgacatccagaccatcgagctgcagatcaagaagctgaaggagctgcagaaggccgtggaccacagaaaggccatcatcctgagcatcaacctgtgcagccccgagttcacccaggccgacagcaaggagagcagagacctgcaggacagactgagccagatgaacggcagatgggacagagtgtgcagcctgctggaggagtggagaggcctgctgcaggacgccctgatgcagtgccagggcttccacgagatgagccacggcctgctgctgatgctggagaacatcgacagaagaaagaacgagatcgtgcccatcgacagcaacctggacgccgagatcctgcaggaccaccacaagcagctgatgcagatcaagcacgagctgctggagagccagctgagagtggccagcctgcaggacatgagctgccagctgctggtgaacgccgagggcaccgactgcctggaggccaaggagaaggtgcacgtgatcggcaacagactgaagctgctgctgaaggaggtgagcagacacatcaaggagctggagaagctgctggacgtgagcagcagccagcaggacctgagcagctggagcagcgccgacgagctggacaccagcggcagcgtgagccccaccagcggcagaagcacccccaacagacagaagacccccagaggcaagtgcagcctgagccagcccggccccagcgtgagcagcccccacagcagaagcaccaagggcggcagcgacagcagcctgagcgagcccggccccggcagaagcggcagaggcttcctgttcagagtgctgagagccgccctgcccctgcagctgctgctgctgctgctgatcggcctggcctgcctggtgcccatgagcgaggaggactacagctgcgccctgagcaacaacttcgccagaagcttccaccccatgctgagatacaccaacggccccccccccctgtag

SEQ ID NO: 257455 - DNA, 26394 bp, Artificial Sequence
  derived and/or modified sequence
atggccaccagcagaggcgccagcagatgccccagagacatcgccaacgtgatgcagagactgcaggacgagcaggagatcgtgcagaagagaaccttcaccaagtggatcaacagccacctggccaagagaaagccccccatggtggtggacgacctgttcgaggacatgaaggacggcgtgaagctgctggccctgctggaggtgctgagcggccagaagctgccctgcgagcagggcagaagaatgaagagaatccacgccgtggccaacatcggcaccgccctgaagttcctggagggcagaaagatcaagctggtgaacatcaacagcaccgacatcgccgacggcagacccagcatcgtgctgggcctgatgtggaccatcatcctgtacttccagatcgaggagctgaccagcaacctgccccagctgcagagcctgagcagcagcgccagcagcgtggacagcatcgtgagcagcgagacccccagcccccccagcaagagaaaggtgaccaccaagatccagggcaacgccaagaaggccctgctgaagtgggtgcagtacaccgccggcaagcagaccggcatcgaggtgaaggacttcggcaagagctggagaagcggcgtggccttccacagcgtgatccacgccatcagacccgagctggtggacctggagaccgtgaagggcagaagcaacagagagaacctggaggacgccttcaccatcgccgagaccgagctgggcatccccagactgctggaccccgaggacgtggacgtggacaagcccgacgagaagagcatcatgacctacgtggcccagttcctgaagcactaccccgacatccacaacgccagcaccgacggccaggaggacgacgagatcctgcccggcttccccagcttcgccaacagcgtgcagaacttcaagagagaggacagagtgatcttcaaggagatgaaggtgtggatcgagcagttcgagagagacctgaccagagcccagatggtggagagcaacctgcaggacaagtaccagagcttcaagcacttcagagtgcagtacgagatgaagagaaagcagatcgagcacctgatccagcccctgcacagagacggcaagctgagcctggaccaggccctggtgaagcagagctgggacagagtgaccagcagactgttcgactggcacatccagctggacaagagcctgcccgcccccctgggcaccatcggcgcctggctgtacagagccgaggtggccctgagagaggagatcaccgtgcagcaggtgcacgaggagaccgccaacaccatccagagaaagctggagcagcacaaggacctgctgcagaacaccgacgcccacaagagagccttccacgagatctacagaaccagaagcgtgaacggcatccccgtgccccccgaccagctggaggacatggccgagagattccacttcgtgagcagcaccagcgagctgcacctgatgaagatggagttcctggagctgaagtacagactgctgagcctgctggtgctggccgagagcaagctgaagagctggatcatcaagtacggcagaagagagagcgtggagcagctgctgcagaactacgtgagcttcatcgagaacagcaagttcttcgagcagtacgaggtgacctaccagatcctgaagcagaccgccgagatgtacgtgaaggccgacggcagcgtggaggaggccgagaacgtgatgaagttcatgaacgagaccaccgcccagtggagaaacctgagcgtggaggtgagaagcgtgagaagcatgctggaggaggtgatcagcaactgggacagatacggcaacaccgtggccagcctgcaggcctggctggaggacgccgagaagatgctgaaccagagcgagaacgccaagaaggacttcttcagaaacctgccccactggatccagcagcacaccgccatgaacgacgccggcaacttcctgatcgagacctgcgacgagatggtgagcagagacctgaagcagcagctgctgctgctgaacggcagatggagagagctgttcatggaggtgaagcagtacgcccaggccgacgagatggacagaatgaagaaggagtacaccgactgcgtggtgaccctgagcgccttcgccaccgaggcccacaagaagctgagcgagcccctggaggtgagcttcatgaacgtgaagctgctgatccaggacctggaggacatcgagcagagagtgcccgtgatggacgcccagtacaagatcatcaccaagaccgcccacctgatcaccaaggagagcccccaggaggagggcaaggagatgttcgccaccatgagcaagctgaaggagcagctgaccaaggtgaaggagtgctacagccccctgctgtacgagagccagcagctgctgatccccctggaggagctggagaagcagatgaccagcttctacgacagcctgggcaagatcaacgagatcatcaccgtgctggagagagaggcccagagcagcgccctgttcaagcagaagcaccaggagctgctggcctgccaggagaactgcaagaagaccctgaccctgatcgagaagggcagccagagcgtgcagaagttcgtgaccctgagcaacgtgctgaagcacttcgaccagaccagactgcagagacagatcgccgacatccacgtggccttccagagcatggtgaagaagaccggcgactggaagaagcacgtggagaccaacagcagactgatgaagaagttcgaggagagcagagccgagctggagaaggtgctgagaatcgcccaggagggcctggaggagaagggcgaccccgaggagctgctgagaagacacaccgagttcttcagccagctggaccagagagtgctgaacgccttcctgaaggcctgcgacgagctgaccgacatcctgcccgagcaggagcagcagggcctgcaggaggccgtgagaaagctgcacaagcagtggaaggacctgcagggcgaggccccctaccacctgctgcacctgaagatcgacgtggagaagaacagattcctggccagcgtggaggagtgcagaaccgagctggacagagagaccaagctgatgccccaggagggcagcgagaagatcatcaaggagcacagagtgttcttcagcgacaagggcccccaccacctgtgcgagaagagactgcagctgatcgaggagctgtgcgtgaagctgcccgtgagagaccccgtgagagacacccccggcacctgccacgtgaccctgaaggagctgagagccgccatcgacagcacctacagaaagctgatggaggaccccgacaagtggaaggactacaccagcagattcagcgagttcagcagctggatcagcaccaacgagacccagctgaagggcatcaagggcgaggccatcgacaccgccaaccacggcgaggtgaagagagccgtggaggagatcagaaacggcgtgaccaagagaggcgagaccctgagctggctgaagagcagactgaaggtgctgaccgaggtgagcagcgagaacgaggcccagaagcagggcgacgagctggccaagctgagcagcagcttcaaggccctggtgaccctgctgagcgaggtggagaagatgctgagcaacttcggcgactgcgtgcagtacaaggagatcgtgaagaacagcctggaggagctgatcagcggcagcaaggaggtgcaggagcaggccgagaagatcctggacaccgagaacctgttcgaggcccagcagctgctgctgcaccaccagcagaagaccaagagaatcagcgccaagaagagagacgtgcagcagcagatcgcccaggcccagcagggcgagggcggcctgcccgacagaggccacgaggagctgagaaagctggagagcaccctggacggcctggagagaagcagagagagacaggagagaagaatccaggtgaccctgagaaagtgggagagattcgagaccaacaaggagaccgtggtgagatacctgttccagaccggcagcagccacgagagattcctgagcttcagcagcctggagagcctgagcagcgagctggagcagaccaaggagttcagcaagagaaccgagagcatcgccgtgcaggccgagaacctggtgaaggaggccagcgagatccccctgggcccccagaacaagcagctgctgcagcagcaggccaagagcatcaaggagcaggtgaagaagctggaggacaccctggaggaggacatcaagaccatggagatggtgaagaccaagtgggaccacttcggcagcaacttcgagaccctgagcgtgtggatcaccgagaaggagaaggagctgaacgccctggagaccagcagcagcgccatggacatgcagatcagccagatcaaggtgaccatccaggagatcgagagcaagctgagcagcatcgtgggcctggaggaggaggcccagagcttcgcccagttcgtgaccaccggcgagagcgccagaatcaaggccaagctgacccagatcagaagatacggcgaggagctgagagagcacgcccagtgcctggagggcaccatcctgggccacctgagccagcagcagaagttcgaggagaacctgagaaagatccagcagagcgtgagcgagttcgaggacaagctggccgtgcccatcaagatctgcagcagcgccaccgagacctacaaggtgctgcaggagcacatggacctgtgccaggccctggagagcctgagcagcgccatcaccgccttcagcgccagcgccagaaaggtggtgaacagagacagctgcgtgcaggaggccgccgccctgcagcagcagtacgaggacatcctgagaagagccaaggagagacagaccgccctggagaacctgctggcccactggcagagactggagaaggagctgagcagcttcctgacctggctggagagaggcgaggccaaggccagcagccccgagatggacatcagcgccgacagagtgaaggtggagggcgagctgcagctgatccaggccctgcagaacgaggtggtgagccaggccagcttctacagcaagctgctgcagctgaaggagagcctgttcagcgtggccagcaaggacgacgtgaagatgatgaagctgcacctggagcagctggacgagagatggagagacctgccccagatcatcaacaagagaatcaacttcctgcagagcgtggtggccgagcaccagcagttcgacgagctgctgctgagcttcagcgtgtggatcaagctgttcctgagcgagctgcagaccaccagcgagatcagcatcatggaccaccaggtggccctgaccagacacaaggaccacgccgccgaggtggagagcaagaagggcgagctgcagagcctgcagggccacctggccaagctgggcagcctgggcagagccgaggacctgcacctgctgcagggcaaggccgaggactgcttccagctgttcgaggaggccagccaggtggtggagagaagacagctggccctgagccacctggccgagttcctgcagagccacgccagcctgagcggcatcctgagacagctgagacagaccgtggaggccaccaacagcatgaacaagaacgagagcgacctgatcgagaaggacctgaacgacgccctgcagaacgccaaggccctggagagcgccgccgtgagcctggacggcatcctgagcaaggcccagtaccacctgaagatcggcagcagcgagcagagaaccagctgcagagccaccgccgaccagctgtgcggcgaggtggagagaatccagaacctgctgggcaccaagcagagcgaggccgacgccctggccgtgctgaagaaggccttccaggaccagaaggaggagctgctgaagagcatcgaggacatcgaggagagaaccgacaaggagagactgaaggagcccaccagacaggccctgcagcagagactgagagtgttcaaccagctggaggacgagctgaacagccacgagcacgagctgtgctggctgaaggacaaggccaagcagatcgcccagaaggacgtggccttcgcccccgaggtggacagagagatcaacagactggaggtgacctgggacgacaccaagagactgatccacgagaaccagggccagtgctgcggcctgatcgacctgatgagagagtaccagaacctgaagagcgccgtgagcaaggtgctggagaacgccagcagcgtgatcgtgaccagaaccaccatcaaggaccaggaggacctgaagtgggccttcagcaagcacgagaccgccaagaacaagatgaactacaagcagaaggacctggacaacttcaccagcaagggcaagcacctgctgagcgagctgaagaagatccacagcagcgacttcagcctggtgaagaccgacatggagagcaccgtggacaagtggctggacgtgagcgagaagctggaggagaacatggacagactgagagtgagcctgagcatctgggacgacgtgctgagcaccagagacgagatcgagggctggagcaacaactgcgtgccccagatggccgagaacatcagcaacctggacaaccacctgagagccgaggagctgctgaaggagttcgagagcgaggtgaagaacaaggccctgagactggaggagctgcacagcaaggtgaacgacctgaaggagctgaccaagaacctggagaccccccccgacctgcagttcatcgaggccgacctgatgcagaagctggagcacgccaaggagatcaccgaggtggccaagggcaccctgaaggacttcaccgcccagagcacccaggtggagaagttcatcaacgacatcaccacctggttcaccaaggtggaggagagcctgatgaactgcgcccagaacgagacctgcgaggccctgaagaaggtgaaggacatccagaaggagctgcagagccagcagagcaacatcagcagcacccaggagaacctgaacagcctgtgcagaaagtaccacagcgccgagctggagagcctgggcagagccatgaccggcctgatcaagaagcacgaggccgtgagccagctgtgcagcaagacccaggccagcctgcaggagagcctggagaagcacttcagcgagagcatgcaggagttccaggagtggttcctgggcgccaaggccgccgccaaggagagcagcgacagaaccggcgacagcaaggtgctggaggccaagctgcacgacctgcagaacatcctggacagcgtgagcgacggccagagcaagctggacgccgtgacccaggagggccagaccctgtacgcccacctgagcaagcagatcgtgagcagcatccaggagcagatcaccaaggccaacgaggagttccaggccttcctgaagcagtgcctgaaggacaagcaggccctgcaggactgcgccagcgagctgggcagcttcgaggaccagcacagaaagctgaacctgtggatccacgagatggaggagagattcaacaccgagaacctgggcgagagcaagcagcacatccccgagaagaagaacgaggtgcacaaggtggagatgttcctgggcgagctgctggccgccagagagagcctggacaagctgagccagagaggccagctgctgagcgaggagggccacggcgccggccaggagggcagactgtgcagccagctgctgaccagccaccagaacctgctgagaatgaccaaggagaagctgagaagctgccaggtggccctgcaggagcacgaggccctggaggaggccctgcagagcatgtggttctgggtgaaggccatccaggacagactggcctgcgccgagagcaccctgggcagcaaggacaccctggagaagagactgagccagatccaggacatcctgctgatgaagggcgagggcgaggtgaagctgaacatggccatcggcaagggcgagcaggccctgagaagcagcaacaaggagggccagagagtgatccagacccagctggagaccctgaaggaggtgtgggccgacatcatgagcagcagcgtgcacgcccagagcaccctggagagcgtgatcagccagtggaacgactacgtggagagaaagaaccagctggagcagtggatggagagcgtggaccagaagatcgagcaccccctgcagccccagcccggcctgaaggagaagttcgtgctgctggaccacctgcagagcatcctgagcgaggccgaggaccacaccagagccctgcacagactgatcgccaagagcagagagctgtacgagaagaccgaggacgagagcttcaaggacaccgcccaggaggagctgaagacccagttcaacgacatcatgaccgtggccaaggagaagatgagaaaggtggaggagatcgtgaaggaccacctgatgtacctggacgccgtgcacgagttcaccgactggctgcacagcgccaaggaggagctgcacagatggagcgacatgagcggcgacagcagcgccacccagaagaagctgagcaagatcaaggagctgatcgacagcagagagatcggcgccagcagactgagcagagtggagagcctggcccccgaggtgaagcagaacaccaccgccagcggctgcgagctgatgcacaccgagatgcaggccctgagagccgactggaagcagtgggaggacagcgtgttccagacccagagctgcctggagaacctggtgagccagatggccctgagcgagcaggagttcagcggccaggtggcccagctggagcaggccctggagcagttcagcgccctgctgaagacctgggcccagcagctgaccctgctggagggcaagaacaccgacgaggagatcgtggagtgctggcacaagggccaggagatcctggacgccctgcagaaggccgagcccagaaccgaggacctgaagagccagctgaacgagctgtgcagattcagcagagacctgagcacctacagcggcaaggtgagcggcctgatcaaggagtacaactgcctgtgcctgcaggccagcaagggctgccagaacaaggagcagatcctgcagcagagattcagaaaggccttcagagacttccagcagtggctggtgaacgccaagatcaccaccgccaagtgcttcgacatcccccagaacatcagcgaggtgagcaccagcctgcagaagatccaggagttcctgagcgagagcgagaacggccagcacaagctgaacatgatgctgagcaagggcgagctgctgagcaccctgctgaccaaggagaaggccaagggcatccaggccaaggtgaccgccgccaaggaggactggaagaacttccacagcaacctgcaccagaaggagagcgccctggagaacctgaagatccagatgaaggacttcgaggtgagcgccgagcccatccaggactggctgagcaagaccgagaagatggtgcacgagagcagcaacagactgtacgacctgcccgccaagagaagagagcagcagaagctgcagagcgtgctggaggagatccactgctacgagccccagctgaacagactgaaggagaaggcccagcagctgtgggagggccaggccgccagcaagagcttcagacacagagtgagccagctgagcagccagtacctggccctgagcaacctgaccaaggagaaggtgagcagactggacagaatcgtggccgagcacaaccagttcagcctgggcatcaaggagctgcaggactggatgaccgacgccatccacatgctggacagctactgccaccccaccagcgacaagagcgtgctggacagcagaaccctgaagctggaggccctgctgagcgtgaagcaggagaaggagatccagatgaagatgatcgtgaccagaggcgagagcgtgctgcagaacaccagccccgagggcatccccaccatccagcagcagctgcagagcgtgaaggacatgtgggccagcctgctgagcgccggcatcagatgcaagagccagctggagggcgccctgagcaagtggaccagctaccaggacggcgtgagacagttcagcggctggatggacagcatggaggccaacctgaacgagagcgagagacagcacgccgagctgagagacaagaccaccatgctgggcaaggccaagctgctgaacgaggaggtgctgagctacagcagcctgctggagaccatcgaggtgaagggcgccggcatgaccgagcactacgtgacccagctggagctgcaggacctgcaggagagatacagagccatccaggagagagccaaggaggccgtgaccaagagcgagaagctggtgagactgcaccaggagtaccagagagacctgaaggccttcgaggtgtggctgggccaggagcaggagaagctggaccagtacagcgtgctggagggcgacgcccacacccacgagaccaccctgagagacctgcaggagctgcaggtgcactgcgccgagggccaggccctgctgaacagcgtgctgcacaccagagaggacgtgatccccagcggcatcccccaggccgaggacagagccctggagagcctgagacaggactggcaggcctaccagcacagactgagcgagaccagaacccagttcaacaacgtggtgaacaagctgagactgatggagcagaagttccagcaggtggacgagtggctgaagaccgccgaggagaaggtgagccccagaaccagaagacagagcaacagagccaccaaggagatccagctgcaccagatgaagaagtggcacgaggaggtgaccgcctacagagacgaggtggaggaggtgggcgccagagcccaggagatcctggacgagagccacgtgaacagcagaatgggctgccaggccacccagctgaccagcagataccaggccctgctgctgcaggtgctggagcagatcaagttcctggaggaggagatccagagcctggaggagagcgagagcagcctgagcagctacagcgactggtacggcagcacccacaagaacttcaagaacgtggccaccaagatcgacaaggtggacaccgtgatgatgggcaagaagctgaagaccctggaggtgctgctgaaggacatggagaagggccacagcctgctgaagagcgccagagagaagggcgagagagccgtgaagtacctggaggagggcgaggccgagagactgagaaaggagatccacgaccacatggagcagctgaaggagctgaccagcaccgtgagaaaggagcacatgaccctggagaagggcctgcacctggccaaggagttcagcgacaagtgcaaggccctgacccagtggatcgccgagtaccaggagatcctgcacgtgcccgaggagcccaagatggagctgtacgagaagaaggcccagctgagcaagtacaagagcctgcagcagaccgtgctgagccacgagcccagcgtgaagagcgtgagagagaagggcgaggccctgctggagctggtgcaggacgtgaccctgaaggacaagatcgaccagctgcagagcgactaccaggacctgtgcagcatcggcaaggagcacgtgttcagcctggaggccaaggtgaaggaccacgaggactacaacagcgagctgcaggaggtggagaagtggctgctgcagatgagcggcagactggtggcccccgacctgctggagaccagcagcctggagaccatcacccagcagctggcccaccacaaggccatgatggaggagatcgccggcttcgaggacagactgaacaacctgcagatgaagggcgacaccctgatcggccagtgcgccgaccacctgcaggccaagctgaagcagaacgtgcacgcccacctgcagggcaccaaggacagctacagcgccatctgcagcaccgcccagagaatgtaccagagcctggagcacgagctgcagaagcacgtgagcagacaggacaccctgcagcagtgccaggcctggctgagcgccgtgcagcccgacctggagcccagcccccagccccccctgagcagagccgaggccatcaagcaggtgaagcacttcagagccctgcaggagcaggccagaacctacctggacctgctgtgcagcatgtgcgacctgagcaacgccagcgtgaagaccaccgccaaggacatccagcagaccgagcagaccatcgagcagaagctggtgcaggcccagaacctgacccagggctgggaggagatcaagcacctgaagagcgagctgtggatctacctgcaggacgccgaccagcagctgcagaacatgaagagaagacacagcgagctggagctgaacatcgcccagaacatggtgagccaggtgaaggacttcgtgaagaagctgcagagcaagcaggccagcgtgaacaccatcatcgagaaggtgaacaagctgaccaagaaggaggagagccccgagcacaaggagatcaaccacctgaacgaccagtggctggacctgtgcagacagagcaacaacctgtgcctgcagagagaggaggacctgcagagaaccagagactaccacgactgcatgaacgtggtggaggtgttcctggagaagttcaccaccgagtgggacaacctggccagaagcgacgccgagagcaccgccgtgcacctggaggccctgaagaagctggccctggccctgcaggagagaaagtacgccatcgaggacctgaaggaccagaagcagaagatgatcgagcacctgaacctggacgacaaggagctggtgaaggagcagaccagccacctggagcagagatggttccagctggaggacctgatcaagagaaagatccaggtgagcgtgaccaacctggaggagctgaacgtggtgcagagcagattccaggagctgatggagtgggccgaggagcagcagcccaacatcgccgaggccctgaagcagagccccccccccgacatggcccagaacctgctgatggaccacctggccatctgcagcgagctggaggccaagcagatgctgctgaagagcctgatcaaggacgccgacagagtgatggccgacctgggcctgaacgagagacaggtgatccagaaggccctgagcgacgcccagagccacgtgaactgcctgagcgacctggtgggccagagaagaaagtacctgaacaaggccctgagcgagaagacccagttcctgatggccgtgttccaggccaccagccagatccagcagcacgagagaaagatcatgttcagagagcacatctgcctgctgcccgacgacgtgagcaagcaggtgaagacctgcaagagcgcccaggccagcctgaagacctaccagaacgaggtgaccggcctgtgggcccagggcagagagctgatgaaggaggtgaccgagcaggagaagagcgaggtgctgggcaagctgcaggagctgcagagcgtgtacgacagcgtgctgcagaagtgcagccacagactgcaggagctggagaagaacctggtgagcagaaagcacttcaaggaggacttcgacaaggcctgccactggctgaagcaggccgacatcgtgaccttccccgagatcaacctgatgaacgagagcagcgagctgcacacccagctggccaagtaccagaacatcctggagcagagccccgagtacgagaacctgctgctgaccctgcagagaaccggccagaccatcctgcccagcctgaacgaggtggaccacagctacctgagcgagaagctgaacgccctgcccagacagttcaacgtgatcgtggccctggccaaggacaagttctacaaggtgcaggaggccatcctggccagaaaggagtacgccagcctgatcgagctgaccacccagagcctgagcgagctggaggcccagttcctgagaatgagcaaggtgcccaccgacctggccgtggaggaggccctgagcctgcaggacggctgcagagccatcctggacgaggtggccggcctgggcgaggccgtggacgagctgaaccagaagaaggagggcttcagaagcaccggccagccctggcagcccgacaagatgctgcacctggtgaccctgtaccacagactgaagagacagaccgagcagagagtgagcctgctggaggacaccaccagcgcctaccaggagcacgagaagatgtgccagcagctggagagacagctgaagagcgtgaaggaggagcagagcaaggtgaacgaggagaccctgcccgccgaggagaagctgaagatgtaccacagcctggccggcagcctgcaggacagcggcatcgtgctgaagagagtgaccatccacctggaggacctggccccccacctggaccccctggcctacgagaaggccagacaccagatccagagctggcagggcgagctgaagctgctgaccagcgccatcggcgagaccgtgaccgagtgcgagagcagaatggtgcagagcatcgacttccagaccgagatgagcagaagcctggactggctgagaagagtgaaggccgagctgagcggccccgtgtacctggacctgaacctgcaggacatccaggaggagatcagaaagatccagatccaccaggaggaggtgcagagcagcctgagaatcatgaacgccctgagccacaaggagaaggagaagttcaccaaggccaaggagctgatcagcgccgacctggagcacagcctggccgagctgagcgagctggacggcgacatccaggaggccctgagaaccagacaggccaccctgaccgagatctacagccagtgccagagatactaccaggtgttccaggccgccaacgactggctggaggacgcccaggagctgctgcagctggccggcaacggcctggacgtggagagcgccgaggagaacctgaagagccacatggagttcttcagcaccgaggaccagttccacagcaacctggaggagctgcacagcctggtggccaccctggaccccctgatcaagcccaccggcaaggaggacctggagcagaaggtggccagcctggagctgagaagccagagaatgagcagagacagcggcgcccaggtggacctgctgcagagatgcaccgcccagtggcacgactaccagaaggccagagaggaggtgatcgagctgatgaacgacaccgagaagaagctgagcgagttcagcctgctgaagaccagcagcagccacgaggccgaggagaagctgagcgagcacaaggccctggtgagcgtggtgaacagcttccacgagaagatcgtggccctggaggagaaggccagccagctggagaagaccggcaacgacgccagcaaggccaccctgagcagaagcatgaccaccgtgtggcagagatggaccagactgagagccgtggcccaggaccaggagaagatcctggaggacgccgtggacgagtggaccggcttcaacaacaaggtgaagaaggccaccgagatgatcgaccagctgcaggacaagctgcccggcagcagcgccgagaaggccagcaaggccgagctgctgaccctgctggagtaccacgacaccttcgtgctggagctggagcagcagcagagcgccctgggcatgctgagacagcagaccctgagcatgctgcaggacggcgccgcccccacccccggcgaggagccccccctgatgcaggagatcaccgccatgcaggacagatgcctgaacatgcaggagaaggtgaagaccaacggcaagctggtgaagcaggagctgaaggacagagagatggtggagacccagatcaacagcgtgaagtgctgggtgcaggagaccaaggagtacctgggcaaccccaccatcgagatcgacgcccagctggaggagctgcagatcctgctgaccgaggccaccaaccacagacagaacatcgagaagatggccgaggagcagaaggagaagtacctgggcctgtacaccatcctgcccagcgagctgagcctgcagctggccgaggtggccctggacctgaagatcagagaccagatccaggacaagatcaaggaggtggagcagagcaaggccaccagccaggagctgagcagacagatccagaagctggccaaggacctgaccaccatcctgaccaagctgaaggccaagaccgacaacgtggtgcaggccaagaccgaccagaaggtgctgggcgaggagctggacggctgcaacagcaagctgatggagctggacgccgccgtgcagaagttcctggagcagaacggccagctgggcaagcccctggccaagaagatcggcaagctgaccgagctgcaccagcagaccatcagacaggccgagaacagactgagcaagctgaaccaggccgccagccacctggaggagtacaacgagatgctggagctgatcctgaagtggatcgagaaggccaaggtgctggcccacggcaccatcgcctggaacagcgccagccagctgagagagcagtacatcctgcaccagaccctgctggaggagagcaaggagatcgacagcgagctggaggccatgaccgagaagctgcagtacctgaccagcgtgtactgcaccgagaagatgagccagcaggtggccgagctgggcagagagaccgaggagctgagacagatgatcaagatcagactgcagaacctgcaggacgccgccaaggacatgaagaagttcgaggccgagctgaagaagctgcaggccgccctggagcaggcccaggccaccctgaccagccccgaggtgggcagactgagcctgaaggagcagctgagccacagacagcacctgctgagcgagatggagagcctgaagcccaaggtgcaggccgtgcagctgtgccagagcgccctgagaatccccgaggacgtggtggccagcctgcccctgtgccacgccgccctgagactgcaggaggaggccagcagactgcagcacaccgccatccagcagtgcaacatcatgcaggaggccgtggtgcagtacgagcagtacgagcaggagatgaagcacctgcagcagctgatcgagggcgcccacagagagatcgaggacaagcccgtggccaccagcaacatccaggagctgcaggcccagatcagcagacacgaggagctggcccagaagatcaagggctaccaggagcagatcgccagcctgaacagcaagtgcaagatgctgaccatgaaggccaagcacgccaccatgctgctgaccgtgaccgaggtggagggcctggccgagggcaccgaggacctggacggcgagctgctgcccacccccagcgcccaccccagcgtggtgatgatgaccgccggcagatgccacaccctgctgagccccgtgaccgaggagagcggcgaggagggcaccaacagcgagatcagcagcccccccgcctgcagaagccccagccccgtggccaacaccgacgccagcgtgaaccaggacatcgcctactaccaggccctgagcgccgagagactgcagaccgacgccgccaagatccaccccagcaccagcgccagccaggagttctacgagcccggcctggagcccagcgccaccgccaagctgggcgacctgcagagaagctgggagaccctgaagaacgtgatcagcgagaagcagagaaccctgtacgaggccctggagagacagcagaagtaccaggacagcctgcagagcatcagcaccaagatggaggccatcgagctgaagctgagcgagagccccgagcccggcagaagccccgagagccagatggccgagcaccaggccctgatggacgagatcctgatgctgcaggacgagatcaacgagctgcagagcagcctggccgaggagctggtgagcgagagctgcgaggccgaccccgccgagcagctggccctgcagagcaccctgaccgtgctggccgagagaatgagcaccatcagaatgaaggccagcggcaagagacagctgctggaggagaagctgaacgaccagctggaggagcagagacaggagcaggccctgcagagatacagatgcgaggccgacgagctggacagctggctgctgagcaccaaggccaccctggacaccgccctgagcccccccaaggagcccatggacatggaggcccagctgatggactgccagaacatgctggtggagatcgagcagaaggtggtggccctgagcgagctgagcgtgcacaacgagaacctgctgctggagggcaaggcccacaccaaggacgaggccgagcagctggccggcaagctgagaagactgaagggcagcctgctggagctgcagagagccctgcacgacaagcagctgaacatgcagggcaccgcccaggagaaggaggagagcgacgtggacctgaccgccacccagagccccggcgtgcaggagtggctggcccaggccagaaccacctggacccagcagagacagagcagcctgcagcagcagaaggagctggagcaggagctggccgagcagaagagcctgctgagaagcgtggccagcagaggcgaggagatcctgatccagcacagcgccgccgagaccagcggcgacgccggcgagaagcccgacgtgctgagccaggagctgggcatggagggcgagaagagcagcgccgaggaccagatgagaatgaagtgggagagcctgcaccaggagttcagcaccaagcagaagctgctgcagaacgtgctggagcaggagcaggagcaggtgctgtacagcagacccaacagactgctgagcggcgtgcccctgtacaagggcgacgtgcccacccaggacaagagcgccgtgaccagcctgctggacggcctgaaccaggccttcgaggaggtgagcagccagagcggcggcgccaagagacagagcatccacctggagcagaagctgtacgacggcgtgagcgccaccagcacctggctggacgacgtggaggagagactgttcgtggccaccgccctgctgcccgaggagaccgagacctgcctgttcaaccaggagatcctggccaaggacatcaaggagatgagcgaggagatggacaagaacaagaacctgttcagccaggccttccccgagaacggcgacaacagagacgtgatcgaggacaccctgggctgcctgctgggcagactgagcctgctggacagcgtggtgaaccagagatgccaccagatgaaggagagactgcagcagatcctgaacttccagaacgacctgaaggtgctgttcaccagcctggccgacaacaagtacatcatcctgcagaagctggccaacgtgttcgagcagcccgtggccgagcagatcgaggccatccagcaggccgaggacggcctgaaggagttcgacgccggcatcatcgagctgaagagaagaggcgacaagctgcaggtggagcagcccagcatgcaggagctgagcaagctgcaggacatgtacgacgagctgatgatgatcatcggcagcagaagaagcggcctgaaccagaacctgaccctgaagagccagtacgagagagccctgcaggacctggccgacctgctggagaccggccaggagaagatggccggcgaccagaagatcatcgtgagcagcaaggaggagatccagcagctgctggacaagcacaaggagtacttccagggcctggagagccacatgatcctgaccgagaccctgttcagaaagatcatcagcttcgccgtgcagaaggagacccagttccacaccgagctgatggcccaggccagcgccgtgctgaagagagcccacaagagaggcgtggagctggagtacatcctggagacctggagccacctggacgaggaccagcaggagctgagcagacagctggaggtggtggagagcagcatccccagcgtgggcctggtggaggagaacgaggacagactgatcgacagaatcaccctgtaccagcacctgaagagcagcctgaacgagtaccagcccaagctgtaccaggtgctggacgacggcaagagactgctgatcagcatcagctgcagcgacctggagagccagctgaaccagctgggcgagtgctggctgagcaacaccaacaagatgagcaaggagctgcacagactggagaccatcctgaagcactggaccagataccagagcgagagcgccgacctgatccactggctgcagagcgccaaggacagactggagttctggacccagcagagcgtgaccgtgccccaggagctggagatggtgagagaccacctgaacgccttcctggagttcagcaaggaggtggacgcccagagcagcctgaagagcagcgtgctgagcaccggcaaccagctgctgagactgaagaaggtggacaccgccaccctgagaagcgagctgagcagaatcgacagccagtggaccgacctgctgaccaacatccccgccgtgcaggagaagctgcaccagctgcagatggacaagctgcccagcagacacgccatcagcgaggtgatgagctggatcagcctgatggagaacgtgatccagaaggacgaggacaacatcaagaacagcatcggctacaaggccatccacgagtacctgcagaagtacaagggcttcaagatcgacatcaactgcaagcagctgaccgtggacttcgtgaaccagagcgtgctgcagatcagcagccaggacgtggagagcaagagaagcgacaagaccgacttcgccgagcagctgggcgccatgaacaagagctggcagatcctgcagggcctggtgaccgagaagatccagctgctggagggcctgctggagagctggagcgagtacgagaacaacgtgcagtgcctgaagacctggttcgagacccaggagaagagactgaagcagcagcacagaatcggcgaccaggccagcgtgcagaacgccctgaaggactgccaggacctggaggacctgatcaaggccaaggagaaggaggtggagaagatcgagcagaacggcctggccctgatccagaacaagaaggaggacgtgagcagcatcgtgatgagcaccctgagagagctgggccagacctgggccaacctggaccacatggtgggccagctgaagatcctgctgaagagcgtgctggaccagtggagcagccacaaggtggccttcgacaagatcaacagctacctgatggaggccagatacagcctgagcagattcagactgctgaccggcagcctggaggccgtgcaggtgcaggtggacaacctgcagaacctgcaggacgacctggagaagcaggagagaagcctgcagaagttcggcagcatcaccaaccagctgctgaaggagtgccacccccccgtgaccgagaccctgaccaacaccctgaaggaggtgaacatgagatggaacaacctgctggaggagatcgccgagcagctgcagagcagcaaggccctgctgcagctgtggcagagatacaaggactacagcaagcagtgcgccagcaccgtgcagcagcaggaggacagaaccaacgagctgctgaaggccgccaccaacaaggacatcgccgacgacgaggtggccacctggatccaggactgcaacgacctgctgaagggcctgggcaccgtgaaggacagcctgttcttcctgcacgagctgggcgagcagctgaagcagcaggtggacgccagcgccgccagcgccatccagagcgaccagctgagcctgagccagcacctgtgcgccctggagcaggccctgtgcaagcagcagaccagcctgcaggccggcgtgctggactacgagaccttcgccaagagcctggaggccctggaggcctggatcgtggaggccgaggagatcctgcagggccaggaccccagccacagcagcgacctgagcaccatccaggagagaatggaggagctgaagggccagatgctgaagttcagcagcatggcccccgacctggacagactgaacgagctgggctacagactgcccctgaacgacaaggagatcaagagaatgcagaacctgaacagacactggagcctgatcagcagccagaccaccgagagattcagcaagctgcagagcttcctgctgcagcaccagaccttcctggagaagtgcgagacctggatggagttcctggtgcagaccgagcagaagctggccgtggagatcagcggcaactaccagcacctgctggagcagcagagagcccacgagctgttccaggccgagatgttcagcagacagcagatcctgcacagcatcatcatcgacggccagagactgctggagcagggccaggtggacgacagagacgagttcaacctgaagctgaccctgctgagcaaccagtggcagggcgtgatcagaagagcccagcagagaagaggcatcatcgacagccagatcagacagtggcagagatacagagagatggccgagaagctgagaaagtggctggtggaggtgagctacctgcccatgagcggcctgggcagcgtgcccatccccctgcagcaggccagaaccctgttcgacgaggtgcagttcaaggagaaggtgttcctgagacagcagggcagctacatcctgaccgtggaggccggcaagcagctgctgctgagcgccgacagcggcgccgaggccgccctgcaggccgagctggccgagatccaggagaagtggaagagcgccagcatgagactggaggagcagaagaagaagctggccttcctgctgaaggactgggagaagtgcgagaagggcatcgccgacagcctggagaagctgagaaccttcaagaagaagctgagccagagcctgcccgaccaccacgaggagctgcacgccgagcagatgagatgcaaggagctggagaacgccgtgggcagctggaccgacgacctgacccagctgagcctgctgaaggacaccctgagcgcctacatcagcgccgacgacatcagcatcctgaacgagagagtggagctgctgcagagacagtgggaggagctgtgccaccagctgagcctgagaagacagcagatcggcgagagactgaacgagtgggccgtgttcagcgagaagaacaaggagctgtgcgagtggctgacccagatggagagcaaggtgagccagaacggcgacatcctgatcgaggagatgatcgagaagctgaagaaggactaccaggaggagatcgccatcgcccaggagaacaagatccagctgcagcagatgggcgagagactggccaaggccagccacgagagcaaggccagcgagatcgagtacaagctgggcaaggtgaacgacagatggcagcacctgctggacctgatcgccgccagagtgaagaagctgaaggagaccctggtggccgtgcagcagctggacaagaacatgagcagcctgagaacctggctggcccacatcgagagcgagctggccaagcccatcgtgtacgacagctgcaacagcgaggagatccagagaaagctgaacgagcagcaggagctgcagagagacatcgagaagcacagcaccggcgtggccagcgtgctgaacctgtgcgaggtgctgctgcacgactgcgacgcctgcgccaccgacgccgagtgcgacagcatccagcaggccaccagaaacctggacagaagatggagaaacatctgcgccatgagcatggagagaagactgaagatcgaggagacctggagactgtggcagaagttcctggacgactacagcagattcgaggactggctgaagagcagcgagagaaccgccgccttccccagcagcagcggcgtgatctacaccgtggccaaggaggagctgaagaagttcgaggccttccagagacaggtgcacgagtgcctgacccagctggagctgatcaacaagcagtacagaagactggccagagagaacagaaccgacagcgcctgcagcctgaagcagatggtgcacgagggcaaccagagatgggacaacctgcagaagagagtgaccagcatcctgagaagactgaagcacttcatcggccagagagaggagttcgagaccgccagagacagcatcctggtgtggctgaccgagatggacctgcagctgaccaacatcgagcacttcagcgagtgcgacgtgcaggccaagatcaagcagctgaaggccttccagcaggagatcagcctgaaccacaacaagatcgagcagatcatcgcccagggcgagcagctgatcgagaagagcgagcccctggacgccgccatcatcgaggaggagctggacgagctgagaagatactgccaggaggtgttcggcagagtggagagataccacaagaagctgatcagactgcccctgcccgacgacgagcacgacctgagcgacagagagctggagctggaggacagcgccgccctgagcgacctgcactggcacgacagaagcgccgacagcctgctgagcccccagcccagcagcaacctgagcctgagcctggcccagcccctgagaagcgagagaagcggcagagacacccccgccagcgtggacagcatccccctggagtgggaccacgactacgacctgagcagagacctggagagcgccatgagcagagccctgcccagcgaggacgaggagggccaggacgacaaggacttctacctgagaggcgccgtgggcctgagcggcgaccacagcgccctggagagccagatcagacagctgggcaaggccctggacgacagcagattccagatccagcagaccgagaacatcatcagaagcaagacccccaccggccccgagctggacaccagctacaagggctacatgaagctgctgggcgagtgcagcagcagcatcgacagcgtgaagagactggagcacaagctgaaggaggaggaggagagcctgcccggcttcgtgaacctgcacagcaccgagacccagaccgccggcgtgatcgacagatgggagctgctgcaggcccaggccctgagcaaggagctgagaatgaagcagaacctgcagaagtggcagcagttcaacagcgacctgaacagcatctgggcctggctgggcgacaccgaggaggagctggagcagctgcagagactggagctgagcaccgacatccagaccatcgagctgcagatcaagaagctgaaggagctgcagaaggccgtggaccacagaaaggccatcatcctgagcatcaacctgtgcagccccgagttcacccaggccgacagcaaggagagcagagacctgcaggacagactgagccagatgaacggcagatgggacagagtgtgcagcctgctggaggagtggagaggcctgctgcaggacgccctgatgcagtgccagggcttccacgagatgagccacggcctgctgctgatgctggagaacatcgacagaagaaagaacgagatcgtgcccatcgacagcaacctggacgccgagatcctgcaggaccaccacaagcagctgatgcagatcaagcacgagctgctggagagccagctgagagtggccagcctgcaggacatgagctgccagctgctggtgaacgccgagggcaccgactgcctggaggccaaggagaaggtgcacgtgatcggcaacagactgaagctgctgctgaaggaggtgagcagacacatcaaggagctggagaagctgctggacgtgagcagcagccagcaggacctgagcagctggagcagcgccgacgagctggacaccagcggcagcgtgagccccaccagcggcagaagcacccccaacagacagaagacccccagaggcaagtgcagcctgagccagcccggccccagcgtgagcagcccccacagcagaagcaccaagggcggcagcgacagcagcctgagcgagcccggccccggcagaagcggcagaggcttcctgttcagagtgctgagagccgccctgcccctgcagctgctgctgctgctgctgatcggcctggcctgcctggtgcccatgagcgaggaggactacagctgcgccctgagcaacaacttcgccagaagcttccaccccatgctgagatacaccaacggccccccccccctgtag

SEQ ID NO: 257456 - DNA, 26394 bp, Artificial Sequence
  derived and/or modified sequence
atggccacatccagaggggccagcaggtgtcctcgagatatagccaacgtaatgcagcgcctgcaggatgagcaagagatagtacagaaacgtacttttactaagtggattaattcgcacttggccaaaagaaagccccctatggtcgtggatgacctgttcgaagacatgaaggatggcgtgaagttactggcgctccttgaggttctttccgggcagaaattgccatgcgaacaaggaaggcgaatgaaacgcatccatgcggtcgctaacatcggcactgcgctaaagttcctggagggcagaaagatcaagcttgttaacattaactccacggatatcgctgacgggcgcccatcgatagttttaggtctcatgtggaccatcattctctattttcagatagaggaactcactagcaacctacctcaactgcagagcctcagtagctccgcctcctctgttgactccattgtttcgtcggaaaccccctcccctccatctaaaagaaaggtcactactaaaattcagggaaacgccaagaaagctctgctgaaatgggtacagtataccgcaggaaaacagaccgggattgaggttaaagacttcggcaagtcctggcgaagcggggttgcctttcacagcgtaatccacgccattcgacctgaattggtggatctggagacagtcaaagggcgatctaaccgagaaaatctggaagatgcattcacgatcgccgaaactgagctggggatccctcggctcctcgaccctgaagatgtcgatgtggataagccggacgaaaaatctatcatgacatacgtcgctcagttcttaaagcattatccagacatccacaatgctagcacagacggccaggaagatgacgagattctgccgggcttcccctcatttgccaactccgtgcagaacttcaaacgcgaagaccgcgtgattttcaaggagatgaaagtgtggattgagcaattcgagagagacctgacaagggcccagatggttgagagcaatttgcaggataagtatcagtcctttaagcacttcagagtccagtatgagatgaagagaaagcaaattgagcacctgattcagccgttgcaccgcgacgggaaactctctctagaccaggctctcgttaaacagagttgggatagggtgacttctcgcctgttcgactggcacattcaactggataagagccttccagctccacttggcacaattggtgcttggctctatcgggctgaggtcgcgcttcgtgaagagattacagttcagcaggttcatgaggagacagccaataccatccagagaaagttggaacagcacaaagacctcttacagaatacagatgcccataaacgggctttccacgagatctatcgcacaagaagcgttaatggcattccagtgccacctgatcagctggaggatatggccgaaagattccatttcgtgtcgtctacctccgagctgcacctcatgaagatggagttcctggaattgaaataccgtctcctcagccttttggtgctggctgagtccaaacttaaatcatggattatcaagtacggcagacgagagtccgtggagcagcttctgcagaattatgtatctttcatcgaaaactctaaatttttcgagcaatacgaggtgacttaccagatattgaaacagaccgcagaaatgtacgttaaagctgatggttcagtagaggaagccgagaatgttatgaagtttatgaacgaaaccacagcccagtggaggaatctgagtgtcgaagtgcgctctgtgcgttcaatgctcgaggaggttatttccaactgggacaggtacggaaacacagtcgcctccctccaggcttggttagaggacgccgaaaaaatgctgaatcagagcgaaaatgctaagaaggattttttccggaacctgccgcactggatacagcaacataccgccatgaatgatgcaggcaactttctcattgaaacatgtgacgagatggtttctcgagatcttaaacaacagctacttctcctgaatggcaggtggcgagaactgtttatggaagtgaagcagtacgcccaggccgatgagatggatcgaatgaaaaaagagtacactgactgtgtcgttaccctgagcgctttcgctacagaggcacacaagaagctcagcgagccattagaggtttccttcatgaacgttaaactgctgatccaggacctggaggacattgagcaaagggtgccagtaatggacgcccaatataaaatcatcaccaagacagcccatctgatcaccaaggagagcccacaggaagagggcaaagagatgtttgctacaatgtccaagttgaaggaacagctcacaaaagtgaaggaatgctacagcccactgctgtatgagagtcagcaattattgataccgctggaagagcttgagaagcagatgacctctttctatgattcactcggcaaaatcaatgagatcattaccgtgctggagcgggaggctcagagctctgccctgttcaaacagaagcaccaggaattgctggcttgccaagaaaattgtaaaaagacacttacactgattgagaagggttctcaatcagtacagaaatttgtgacgctgagcaacgtgttgaaacactttgatcaaaccaggctccaaaggcagattgccgatattcatgtagcattccagagcatggtgaaaaaaacgggcgattggaagaaacacgtggaaactaattcccgactcatgaaaaagtttgaagaatcccgagcagagcttgaaaaggtgctccgaatcgctcaggagggcctcgaggagaaaggagaccctgaggaactccttcgtcgacacacagagttcttttcacagcttgatcaaagagtccttaacgctttcctaaaagcctgtgacgaactaacagatatcctcccagaacaggagcagcaaggcctgcaggaggctgtaagaaagctccacaaacagtggaaagatctgcaaggcgaggcgccttaccacctccttcacctaaaaattgacgtcgagaagaatagatttctagcatcagtggaggagtgccgaactgaattggaccgcgaaaccaagctcatgccacaggagggctcagaaaaaattattaaagagcatagagtcttcttctccgacaagggaccccaccacttgtgtgaaaaaagattacaattaatcgaggaactttgtgtgaaactgcctgtccgcgatcccgtacgagatactcctggaacttgccacgtgaccctgaaggagctaagggctgccattgacagcacctatcgcaagcttatggaagatccggataaatggaaggactacaccagccggttttctgaatttagctcttggattagcacgaacgagacacagctcaagggcatcaagggcgaggccattgacacagcaaatcatggcgaggttaaacgcgctgtcgaggaaatacggaacggggtcacaaaaaggggcgaaacactcagctggcttaagagtagactgaaggtgctgacggaagtcagttcggagaatgaggcccaaaagcagggcgacgagctggccaagctgtctagttcattcaaggcactggtgaccttactgtccgaagtggaaaaaatgctcagcaactttggagattgcgttcagtacaaagaaatcgtgaagaattctctggaggaactgatttcaggatccaaagaagtccaggaacaggccgagaaaattctggatacagagaacttattcgaagctcagcaattgctgctgcaccatcagcagaaaactaaaagaatctccgccaaaaaacgcgatgtccagcaacagatcgcgcaggcacagcaaggggagggcggtctgccagacagaggccatgaggagttaagaaagttggagtctacattggatggccttgagcgttctagagaacggcaagagagaaggatccaggttacactccgaaaatgggagcgtttcgaaacaaataaagagactgtcgtccggtatttgtttcaaaccggcagcagccacgaacggtttctgagttttagctcactagaaagcctgagcagcgagttggagcagactaaagaattcagcaagaggaccgaatccattgcggttcaagccgagaatctggtcaaagaagccagcgagattccgctggggccccaaaacaaacagctcctgcagcagcaggccaagagcataaaggaacaggttaagaagctggaagatacactagaagaagatatcaagactatggagatggtgaagacaaaatgggatcactttgggagcaactttgagaccctatccgtatggatcaccgagaaagagaaggagctgaatgccctggagacgtctagttctgcaatggatatgcaaatttcccaaattaaggtaaccatccaggagattgagagtaaactgagctcaatcgtggggctggaggaggaagcacagagcttcgcccagttcgtcactacaggcgagtctgcacgtatcaaagcaaagctaacccagatacgcaggtatggcgaggaactgagagagcatgctcagtgcttagaggggaccatcttgggccacctgtcacagcagcaaaagttcgaggaaaatctccgaaaaatccaacaaagcgtctccgagttcgaagataaattggcagtcccgatcaagatttgtagttctgcaactgagacttacaaagtgttacaggaacatatggacctctgtcaggccttggaaagcctgtcatcagcaattacggctttctccgcttcagctaggaaggtggttaaccgtgatagctgcgttcaggaagccgccgcactacaacagcagtacgaggacatcctgcgacgcgccaaggagaggcagaccgcattagagaatctgttggctcactggcaaaggcttgagaaggagttgagttctttcctcacctggctggagagaggggaagcaaaggctagttcgcccgagatggacataagtgcagaccgagtaaaggtcgagggtgagttgcagttgatccaggcccttcagaacgaagtggtgtcacaggcctccttctactccaaactccttcagttgaaggagagtctgttctcggtcgcctctaaggacgatgtgaaaatgatgaagcttcatttagagcaactagacgaaaggtggagggacttgccacagatcattaacaaacgaatcaattttctgcagagcgtagtggccgaacatcaacagtttgacgagctcctattatctttctcagtgtggatcaaattattcctctccgagttgcagaccacaagcgagatctctataatggaccaccaggttgcactgacacgccacaaagaccatgccgccgaggtagagtccaagaaaggggaactacagtcgttacagggccacctggccaaacttggctcattgggccgggctgaagatctacatctgctccagggcaaggccgaggactgcttccagctcttcgaagaggcatcacaagttgttgagcggcggcagctcgcccttagccatctggccgagttcctccagtctcatgctagcttgtccggcatccttaggcagctacggcagacagtggaggccactaacagcatgaataaaaatgaaagcgacttgattgaaaaggatcttaatgatgcgctgcagaacgcgaaagcactggaaagtgccgctgtgtccttagacgggatcttatcgaaagcacagtatcatttaaagatcgggagttcagaacagagaacctcctgtagagctacagctgaccagctctgcggggaggtcgagagaatccagaatcttctaggcactaagcagagcgaagccgacgccctggccgttttgaaaaaggccttccaggatcaaaaagaggagctcttgaagagtatcgaggatatagaggagcggaccgacaaggaacgcctgaaggaacccacgagacaagctcttcaacagcgcctgagggtcttcaaccagctcgaggatgagctgaacagtcacgaacacgagctctgttggttaaaggataaggctaagcaaatcgcccagaaggatgtggcatttgcccctgaggttgatagagagattaaccggcttgaagttacctgggacgacacaaaacgcctgatccatgagaatcagggccagtgttgcgggctgattgacctgatgagagagtatcagaacctgaagagcgcagtaagcaaagtgttggaaaatgccagcagtgtgatagtaacaaggacaactatcaaggaccaggaggacctcaagtgggcgttcagcaagcatgagactgctaaaaacaagatgaattacaaacagaaggatcttgacaattttacttcaaaaggaaagcacctgctttctgagctgaaaaagatccactcctctgattttagtctggtaaagacggacatggaatcgaccgtggacaaatggctggacgtctcggagaagttggaggaaaatatggataggctgcgggtgtctctttcaatctgggacgatgtactgtcaacgagagatgagattgagggctggtctaataactgcgttccacagatggccgaaaacatttctaatttggataatcatctacgagctgaggagctattaaaagagtttgagtcggaagtcaaaaacaaagccctaaggttggaagaactgcattctaaggtcaatgatctgaaagagctcacgaaaaacctggaaacccctcccgacttgcagttcattgaagctgatctcatgcagaagcttgaacatgcgaaggagatcactgaagttgccaaaggcaccctgaaagattttacagcacagagcactcaggttgagaaatttattaatgacatcactacttggtttaccaaagtggaagagtctcttatgaattgtgcccaaaacgagacctgtgaggcgctaaaaaaggtgaaggatattcagaaggaactgcagagccagcagtcaaacatttcgagcacgcaggaaaaccttaattcgttatgcagaaagtatcactctgcagaattggagtccctgggacgggctatgacaggtctaattaagaagcacgaggctgtctctcaactgtgcagcaagacccaagcctcactgcaggagtccttggagaagcactttagcgagtctatgcaggagttccaggagtggttcctgggggccaaggctgctgcaaaagagagcagcgatcgtacaggcgactcaaaggttcttgaggccaagctacatgatctccagaatatcctggattcagtgagcgatggtcaaagtaaactggatgctgtgacccaggaggggcagaccctctacgcgcatctctccaaacagattgtctccagcatccaggagcaaatcacgaaggcaaacgaagagttccaggccttccttaaacagtgtcttaaggataagcaggcgttacaggactgcgcatccgaactgggctccttcgaggatcaacaccgaaagttgaacctctggatccatgagatggaggagcgattcaacaccgagaacctgggtgagagcaagcaacacatccctgagaagaagaatgaggttcataaagttgaaatgttcctcggagagttattagctgctcgcgagtctttagataagctctcgcagagaggccagctgctgtcagaagagggccacggcgctggccaagaaggaagactctgcagccagctgctcaccagccaccagaacttgctcagaatgaccaaagaaaaattacgatcctgtcaggttgccctccaagagcacgaggccttagaggaggccttgcagagcatgtggttttgggtcaaagctattcaagatcgcctcgcatgtgcagagtctaccctcggatctaaggatacattggagaaacgactgtcacagattcaagacatcctacttatgaagggcgagggcgaagttaaactgaatatggctattggcaagggggaacaggccttgaggtctagcaacaaagagggccagagggttattcagacacagctcgaaacactaaaggaggtgtgggctgatatcatgtccagctcagtgcacgctcaatccacattagaaagtgttatatcccagtggaacgactatgtggagcgcaagaaccagctcgagcagtggatggagtctgtggaccaaaagatagagcacccactgcagcctcagccaggtctgaaagagaagtttgtgctgctcgatcacctgcagagtattctttctgaagccgaagaccacaccagggccctgcacagactgatcgctaagagcagggaactgtacgaaaagaccgaagatgagtccttcaaggacacagctcaggaggagctaaaaacacagtttaatgatatcatgaccgtggctaaggagaagatgagaaaggtagaggagatcgtgaaggatcacctgatgtatctcgacgcggtgcacgagtttacagactggcttcattccgccaaagaagagttacatcgatggagcgatatgagcggcgatagcagcgcaacccagaagaagctatccaagatcaaggagctgatcgactcccgtgaaatcggcgcctctcggctgagccgagtggagagcttggcacccgaggtgaagcaaaacaccaccgcaagcgggtgtgaactgatgcacaccgaaatgcaagctctccgcgctgattggaaacagtgggaagactccgtcttccagacccaatcctgcctggaaaatcttgtctcccagatggcactgagcgagcaggagttctccggccaagttgcgcaactggaacaagcgctggagcagttctcagcactgttgaagacatgggcccagcagctcacactcctcgaaggaaagaacactgatgaagaaatcgtcgaatgctggcacaagggacaggagatcctcgacgcactccagaaagccgaacctcggacagaggacctgaaatcccagctgaacgaattgtgtcgcttttctcgtgatctgtccacgtacagcggaaaggtaagcgggttgattaaggagtataattgtctgtgtctccaggcatccaagggctgtcagaataaggaacagatcctgcaacagagatttaggaaggcattccgcgactttcagcaatggcttgtcaacgcaaaaatcactaccgctaaatgttttgatattccccagaatataagtgaagtttctacgagtctccaaaaaatccaggagttcctttctgaaagtgaaaatggtcaacacaaactcaatatgatgttgtctaaaggcgagttgctgtccacattgctgactaaggaaaaagccaaggggatccaggccaaagttacggcggctaaggaagactggaaaaactttcattcgaacctccaccagaaagagagcgccctagagaaccttaagatacagatgaaggactttgaggtcagcgccgagccaatccaggattggttgtcaaagacagagaaaatggtgcatgagtccagtaaccggctgtacgatcttcctgctaaaagaagggagcagcaaaaactgcagtccgttctggaggaaattcattgctacgagccccaacttaaccgtctgaaagaaaaggctcagcagttgtgggaagggcaggctgccagtaaatccttccgacaccgcgtgtctcaattatcttctcaatatttggcactcagcaatctcacaaaagaaaaggtctcaaggctggaccgcattgttgcggagcacaaccagttctctttgggcatcaaagagctgcaagattggatgacagatgcaatccacatgctggatagctactgtcacccaacctccgacaagtctgtgcttgatagcaggaccttgaagctggaagcccttctctcggtaaagcaggaaaaagagatccagatgaagatgattgtgacccgaggcgagtcggtgctacaaaacacgtcgccagaaggaatcccaactattcagcagcaacttcagagtgtcaaggacatgtgggcgtccttgctgtctgccggaattcgatgcaagtctcagttagagggggcactgtctaagtggacctcatatcaggatggcgtgcggcagttcagtggatggatggatagcatggaggcaaatctaaacgagtcagaacgccagcacgctgaactgcgggataagactacaatgttaggaaaggctaaattactcaatgaagaagtcctgtcttactctagtctgctggagacaatcgaggtaaagggagccggtatgaccgaacattacgtgacccagttggaacttcaggatttgcaggagcggtaccgcgctatccaagaaagggcaaaggaggctgttacgaagtcggagaaactggttcgactacaccaagagtaccaacgggaccttaaggccttcgaggtttggcttggtcaggaacaggaaaaactggaccaatattcagtcctggaaggcgacgcccacacacacgaaaccacattaagagatttgcaggaactacaggtacactgtgccgaggggcaggccttgctgaatagcgtgttacatacaagagaggacgtgattccgagcggtatccctcaggccgaagaccgggcgctggaaagcctgcggcaggattggcaggcgtaccagcatcgcttgagcgagaccaggacacaattcaataacgtagtcaacaaactgaggcttatggagcagaaattccagcaggtggatgagtggctgaaaacggctgaagaaaaggtcagtcctcgcacccgcagacagtccaatcgagcgactaaagaaattcagttgcatcagatgaagaaatggcatgaagaagtcacggcctatcgggacgaggttgaagaagtgggcgcaagggcccaggagatccttgacgagagtcacgtcaattcccgtatgggatgccaggctactcagttgacctcccgataccaggcattgctccttcaggtactggagcaaattaaatttctcgaggaggaaatacagtccctggaggagtccgaatcttccttaagttcctactccgactggtatgggtctacacataaaaactttaaaaacgtggcgaccaagattgacaaagtagataccgtgatgatgggtaagaagctgaagaccctcgaagtgcttctgaaggatatggagaagggtcattctctcctcaaaagcgcacgtgaaaagggggagcgggcggttaagtacctggaagagggtgaagccgagcggctccgtaaagagattcatgaccacatggagcaattgaaagagctgacgtccaccgtgcgtaaagagcacatgacactcgagaaaggacttcacctggcgaaggagttctccgataaatgtaaggcccttactcagtggattgctgaatatcaggagattctgcacgtccctgaggaacctaaaatggaactttatgagaaaaaagcacagctgtcgaagtacaaatcactgcagcagacagtcttatcacatgaaccctccgtcaaaagtgtacgggaaaagggtgaggctttgctggaacttgtgcaggatgtgaccctgaaggacaagatagaccagcttcagtcggattaccaagatctgtgtagcataggtaaagagcacgttttctccttagaagcgaaagttaaggatcacgaagactacaattccgaactccaagaggtggaaaaatggctgctgcagatgtctggcagactcgtggctccagatttactggaaacatcctctctagaaaccattacacagcagctagcccaccataaggcgatgatggaagaaattgccggatttgaagacagactcaataatttgcagatgaagggggacacccttatcgggcaatgcgcggaccacctgcaagcgaaacttaaacaaaatgtgcatgctcaccttcaaggaactaaggactcctattctgcaatctgtagtaccgcccagcgaatgtatcagagccttgagcacgaactgcaaaagcacgtgtcccgccaggacacactccaacagtgtcaagcttggctcagcgcagtacagcccgacctggagcccagcccccaaccgcctcttagtagagctgaagcgattaagcaagtgaaacactttcgcgccctacaggaacaggcccggacatacctggaccttctgtgcagcatgtgcgatctctccaacgcttcggtgaaaactactgccaaagacattcaacagaccgagcagactattgaacaaaaactggtgcaggcccagaaccttacgcagggctgggaggagattaagcatcttaagtctgaactctggatctacctgcaggatgcagaccagcagctgcaaaacatgaagcgtcgccattctgagctggagttgaacattgcacagaacatggtgagccaggtgaaggacttcgtgaaaaaactccaaagtaaacaggcaagcgtgaacaccatcatagagaaagtcaataaattgactaaaaaagaggaatcccctgaacataaagagattaaccacctgaatgaccagtggctggatctctgtcggcaatcaaacaacctgtgcctccagagggaagaagatctgcaacggacacgcgattaccatgactgcatgaatgtggtggaggtgttcctggagaaatttacaactgagtgggacaatctcgccaggagcgatgctgaaagcaccgccgtgcacttggaggctttgaagaaactggccctggcactccaagaacgaaaatatgccatcgaggaccttaaagaccaaaaacagaaaatgatcgaacatttgaatctggacgacaaagagcttgttaaagagcagactagccatcttgagcagcgatggtttcagctggaagacctcatcaagagaaagattcaggtgagtgtgacaaatcttgaggaactgaatgtagtacagagtaggttccaggagctgatggaatgggccgaggagcagcagcctaatatcgctgaagccctcaaacagtcccctccaccagatatggcccagaacttactgatggaccatctggccatctgtagcgagcttgaggccaaacagatgctgctcaaatcattgataaaagacgcggaccgggttatggctgacctgggactcaacgagcggcaagtcattcagaaagccctttctgatgcacagtcccatgtaaactgcctcagcgacttggttggccaaagacgcaagtatttaaacaaagccctgtctgaaaagacccagtttctgatggccgtgttccaggctacttcccagatccagcaacatgagagaaaaatcatgttccgtgagcatatctgtctgctaccagacgatgtgtctaaacaagttaaaacttgcaaatccgcacaggcgtctctcaagacataccaaaatgaggtgactggcttgtgggctcagggccgggagctaatgaaagaagtcactgaacaggagaaatcagaggtattgggtaaattgcaagaattgcagtccgtctacgatagcgtcctgcagaaatgttcacatcgtctccaggaactggagaaaaaccttgtctccaggaaacattttaaagaggacttcgacaaagcatgtcattggctgaagcaggcggatattgtgacttttccagagatcaatctcatgaacgaaagcagtgagttgcatactcagcttgcgaaataccagaacatactcgagcagtccccagagtacgaaaatctgctgcttacactgcaaaggactggtcaaacaatacttcccagtctcaacgaagtggaccacagctacctgagcgagaaacttaacgccctacctcgacaattcaacgtaattgtcgccttagctaaagacaagttctacaaagtccaggaagccatcttagcacgcaaggagtacgcaagtctgatcgagctaacaactcagtcgctgagcgagctggaggcccaattcctacgaatgtcgaaagtgcctacagacctagccgtggaggaggcgttgtcactacaagatggatgcagagctattctggatgaagtcgccggcttgggagaagcggtagatgagctgaaccagaaaaaggaggggttcaggtccaccggacagccttggcagcccgataaaatgctgcacctcgtcacactctatcaccgcctgaaacggcagactgaacagagggtctcactgctcgaagacaccacttcagcctatcaggagcacgagaagatgtgtcaacagttggaacgccagcttaaatctgtcaaagaggagcagtcaaaagtcaacgaagagaccctcccagcggaggagaagttgaagatgtaccactcattggcaggctcactgcaggacagtgggatcgtactgaaacgagtcacgatccaccttgaggacctggccccccacctggatcctctcgcctatgaaaaggcccgccaccagattcagtcctggcaaggggagctgaaacttctgaccagtgccattggagaaaccgtgaccgagtgtgagtctcggatggtccagtctatcgatttccagaccgaaatgagtcggtccctggattggcttcggcgagtgaaagctgagcttagcggacctgtctatctcgatctcaatctccaagacatacaagaagagattaggaagatccagatacaccaggaggaagttcagagctctctgcggattatgaacgcgttgtcccacaaggagaaagagaagttcaccaaggccaaggagctaatttctgccgatctggagcatagtctggccgaactgagcgagctggatggagatattcaggaggcgctccgcacccgacaggctacactgacagagatatattcgcagtgtcagcgatattaccaggtgttccaggcagctaatgattggttagaggacgcccaagagctgctgcaactggccggcaatggcctcgatgttgagagcgcagaagaaaatcttaagagccatatggagttcttctccactgaagaccagtttcacagcaatctggaagagctgcacagtttagtagccacactggaccctctcataaaacccaccggcaaggaagacctcgagcagaaagtggcttcattggagctgagaagccagcgcatgtcacgagattctggggcccaggtagacctgctgcagcgctgcaccgcacagtggcatgactatcaaaaggccagagaggaggtgatcgaattgatgaatgataccgaaaaaaagctttcagagttttccctgctcaaaacatccagttctcatgaggctgaggagaaattatccgaacataaagccctggtctctgtcgttaattcgtttcacgaaaaaatagtcgctctcgaggagaaggcttcgcagcttgagaaaaccggaaacgatgcatcaaaggcgaccctaagccggtccatgaccaccgtttggcagagatggacccgactccgggccgtggcacaggaccaggaaaagatcctggaagatgccgtggacgagtggaccggctttaataacaaagttaaaaaggcaacagagatgattgatcagctccaggacaaactgcctgggtcttcagccgaaaaggcatccaaggcggagttactgactctactcgagtaccacgacacgtttgtactggaattggagcaacagcaatctgccttaggaatgctccgacagcagactctatctatgctgcaagacggggccgcccccacaccaggagaagagccgccactcatgcaggagatcactgcaatgcaagacaggtgtctgaacatgcaggaaaaggttaagacaaacgggaagctggtgaagcaggagctgaaggaccgggaaatggtggaaactcagattaactcagtgaaatgctgggtgcaggagactaaagagtaccttggcaaccctactattgagatagacgcacagttagaagagctccaaattctgctgacggaggcaactaatcatagacagaacattgaaaaaatggcagaagagcagaaggaaaagtatctggggctgtacaccatcctgccctctgaactaagcctccaactcgccgaggtcgctctcgatctcaagattagagaccagattcaggataagattaaagaagtggagcaaagcaaggctacttctcaggagctaagcaggcagatccagaagctggctaaggatttgacaacaatcttgacaaagctgaaggctaagactgataacgtggtccaggccaagactgaccagaaggttcttggagaggaactcgatggatgcaacagtaaactaatggaactcgacgctgcagttcaaaaattccttgagcagaatggccaattaggcaaacccttagccaaaaagattgggaaattgaccgagcttcatcaacagaccattcgccaggcagagaaccgcctcagtaagctcaaccaggccgcttcccatctggaagaatataacgagatgcttgagctcatactcaaatggatcgaaaaagctaaagttctcgcccacggtacaatcgcttggaattccgcaagccagctccgcgaacagtatattctccatcagacactgctcgaggagtcgaaagaaattgactctgagctcgaggcaatgactgaaaagctgcagtacctaacaagtgtgtattgcacagagaagatgtcccaacaagtggccgagctgggcagagagacggaggaactgcggcagatgattaaaatccggcttcagaacctgcaggacgctgccaaagacatgaaaaagttcgaagcagagctcaaaaaactccaagcggcactcgagcaggcacaggctacactgacaagtcccgaagtggggcgtctgtccttgaaggaacagctgtcgcacaggcagcacctgctgtctgagatggagtctctcaaacccaaggtgcaagccgtccagctgtgtcagtcagctctacgcataccggaggacgtggtggccagtttacccctgtgtcatgctgctttaagactccaagaggaagcatctagactgcagcataccgctatccagcaatgcaacataatgcaggctgccgtggttcaatacgaacaatacgaacaagagatgaagcacctgcagcagctaatcgagggtgcacaccgagagatcgaggataagccggtcgccacatccaatatccaggagctgcaggcacagatctcgagacacgaggagttggctcaaaagataaagggataccaggaacaaattgcttctctgaattctaagtgcaagatgttaactatgaaggccaagcacgctacaatgctgctgaccgtcactgaggtggaaggcctcgctgaagggaccgaggacttggatggcgagctgctcccaacccctagtgctcacccaagtgttgttatgatgacagccggacggtgtcacacattgctgagccctgtgacagaggaatcaggcgaggagggaactaactcagaaattagctcccctcccgcatgtaggtccccgtctccagtagccaatactgacgccagtgtcaatcaagatattgcctactaccaagccctatcagcagagagactccagacagatgccgcaaaaatacacccctctacaagtgcctcccaggaattctacgaaccagggcttgagccttccgccacggccaaactgggcgatctacagcgctcttgggagaccctgaaaaatgtgatttcagagaagcagcgcactctctacgaggcccttgagcgacaacagaagtatcaggattccttgcagtccatcagtacaaagatggaagccatcgaactcaagctgagcgagagcccggaacccggccgctctccagaatcccagatggctgaacatcaggccctaatggatgagattctgatgttacaggacgaaataaacgaactgcagtcgtccctggctgaagaactagtttccgaatcctgcgaagctgaccccgccgagcagctggcactgcaatctacgctgactgtccttgcggagcggatgtccaccattcgtatgaaggcctcaggtaagcgccagctgctcgaagagaagctgaatgatcagttggaggaacagagacaagaacaggccctgcagcgctatagatgcgaggccgatgaattggactcttggcttctgtctactaaggccacactagacaccgcgttatcccctccaaaagaacctatggacatggaagcacaactcatggactgccagaacatgctggtagagattgaacagaaagtagtggctctgtccgagctgtcggtacataatgaaaacctgcttttagagggaaaggcccacaccaaggacgaggccgaacagctggccggtaagctgcgtcgcctgaaaggatccctgttggagcttcaaagggccctccatgacaagcaactaaatatgcaggggaccgctcaagaaaaagaggaaagcgatgtggatcttaccgcgacccaatcaccaggtgtgcaggagtggctggcccaggcaagaacaacgtggacccagcagaggcagagcagtttacaacagcagaaagagttagagcaggaactcgctgaacagaagagccttctcaggtctgtcgcatcaaggggtgaggagattttaatccagcactcagctgcggaaactagtggagatgcgggggaaaagcctgacgtgttgtctcaggagctgggaatggagggagagaagtctagtgccgaagaccagatgcgcatgaaatgggaaagcctccaccaagaattttctaccaaacaaaagctacttcagaatgtgttagagcaagaacaggaacaggtgctgtactcacgccccaaccgcctcctgtccggggtccccctttacaagggagatgttcccacacaagataagtcagcagttacttctctcctcgatggccttaaccaggcatttgaggaagtctccagccagtcaggcggtgccaagaggcaatccattcatctcgaacagaagctctacgatggggtaagcgccacctcgacttggctcgacgatgtcgaggagcgcttattcgtggccactgccctcttacccgaggagaccgagacctgtctctttaatcaggagattcttgctaaagacattaaggaaatgagcgaagaaatggataagaacaagaacttgtttagtcaggcctttcccgaaaacggcgataaccgggacgttatcgaggacacactgggatgcctgttgggaagactttcattgctggacagcgtcgtaaatcagcgctgtcaccaaatgaaggagcgcttgcagcaaattttaaattttcaaaatgatctgaaggttctgtttacttcattagccgacaataaatacataatcctgcaaaaactggcgaatgtgtttgagcagcctgtggctgaacaaattgaagccatacaacaggcggaagacggattgaaggagttcgatgcaggtattatagaacttaaacgtcgtggcgataaacttcaggtcgagcaaccatcaatgcaggagttatctaaactgcaggatatgtacgatgaactgatgatgattattggctcacgcagatctggcctgaaccagaacctgaccctcaaatcacagtatgaacgcgcactgcaggacctggcggacctcctggagaccggccaggaaaagatggccggcgaccagaagattattgtttccagtaaggaggagatccaacaactattggataaacacaaagaatattttcagggtctggaaagccatatgatcctgaccgaaactttatttcgaaagataatctcctttgcggtccagaaggaaacccagttccatacagagcttatggctcaagcatcagccgttctgaaaagggctcataaaagaggcgtggaactggaatacatcctggagacttggagtcacctagatgaggaccagcaggagttatctcggcagctggaggtggtcgaaagcagcattcccagcgtcggcctggtggaggagaacgaggatcgcctgatagatcgtattactctctatcaacacctgaagtccagtcttaacgaatatcagcctaaactttatcaagtgctggacgacgggaaaaggcttctcatttccatttcctgcagcgatctggaatctcagttgaaccagctcggtgaatgctggctgagcaatacaaacaagatgtcaaaggaactgcatcgactggagacaattttgaagcattggactagatatcagagtgaaagcgccgacctcattcattggttacagtccgccaaggatcggctggagttctggacacagcaatccgttacagtgccgcaggagctggagatggtgcgagatcacctgaatgcattcctcgagttcagcaaggaggtggacgcacagtctagccttaaaagttccgtcctctctactgggaatcaactgctgcgcctgaaaaaggtagacacagcaaccctgcgttccgaactctcccgcatagacagtcagtggactgatctgcttaccaatatccccgccgtacaggagaaattacatcagctgcagatggataagctgcccagtagacatgctattagcgaagtgatgagttggatttcccttatggagaacgtgatccagaaggatgaagacaacattaagaatagcattggctataaggctatccacgagtacctgcagaaatacaagggcttcaagatagacatcaactgcaaacagctgaccgtcgacttcgtgaatcagagcgtgttgcagattagtagccaggatgtagagtccaaacgaagcgacaaaaccgactttgctgagcagctgggggccatgaataagtcttggcagattctccagggtttagtgacagagaaaatccagctactggaggggcttttagaaagttggtcagaatacgagaacaacgttcaatgtctcaagacctggttcgagacccaagagaaaaggctgaaacagcagcaccggatcggtgatcaggcttctgttcagaatgctctgaaggattgccaggatctggaagaccttattaaagctaaagaaaaagaggtcgagaaaattgaacaaaatggccttgctctgatccagaataagaaggaggatgtctcatccatcgtgatgagcacccttagggaattagggcagacttgggccaacctcgatcatatggtgggacagctgaagattctgctgaaatccgtgcttgatcagtggagtagtcataaggtggccttcgacaagatcaattcttacctcatggaagctcggtactccttgtcccgcttcaggcttctgacaggatctctcgaagcagtccaggttcaggtagacaacttacagaatctacaggatgacttggaaaagcaggagagatcactgcagaagttcggaagtatcaccaaccagctgttaaaggaatgtcatcctcctgtaacggagaccctgaccaatacactaaaggaggtgaatatgcggtggaataatctgctcgaggagatcgcagagcaattacaatcctcgaaggctctcctacagctttggcagaggtacaaggactattccaaacagtgcgcgtcgacagtgcaacagcaggaggaccgcacaaatgaattgctgaaggcggcgacaaacaaggatattgccgacgatgaggtcgctacatggatccaggattgcaatgatctgctgaaggggctggggacagtaaaagattcactattcttcttacacgagctcggggagcagctgaaacagcaggtggacgcgagcgccgcttcagccatccagtccgaccagctgagcctgtcccagcacctgtgcgctctggagcaggcactgtgtaagcaacagacatctctgcaagctggcgtactggattatgaaacctttgctaaatccctggaagctttggaggcctggattgtcgaggctgaggaaattctccagggtcaggatccttctcactcgtccgacctaagcacgatacaggagcgaatggaagaactgaaggggcagatgctgaagttctccagcatggcccctgatctggatcgtctgaatgagcttggttatagactgcctctgaatgataaggagataaaaagaatgcaaaatttgaatagacactggtctctcattagttcccagacaaccgaacggtttagcaaacttcaatcgttcctcctgcagcatcagaccttcctcgagaagtgtgaaacatggatggaattccttgtacaaaccgagcaaaaactggccgtggaaatcagtggcaactatcagcacctcctggaacagcaacgcgctcatgagcttttccaagccgagatgtttagtcgtcagcagatattacacagcataattatcgacgggcagcgcctactcgagcagggccaggtagacgatagggacgagttcaatctgaagctaacattgctgtccaaccagtggcagggtgtgatccggagagcccagcagaggcggggaatcatcgactcccagattaggcaatggcaacgctatcgggaaatggcggagaaattgcgcaaatggcttgtggaggtgagttacctgcccatgagtggactggggagcgttcccatcccgctgcagcaggcccgcacgctgttcgatgaggttcaatttaaggagaaagtgttcctgcgccaacaaggttcatacatcctaactgtggaagcgggcaaacagttgcttcttagcgccgacagcggagctgaggctgctttacaggccgagttagccgaaattcaggaaaaatggaagagtgcaagtatgaggctggaagaacagaaaaagaagctggcttttttactgaaagactgggaaaagtgcgagaagggcatcgctgactctctggaaaagctaaggactttcaagaaaaaactaagccagtctctgccagaccatcatgaggaactgcatgctgagcaaatgcggtgcaaggaactggagaacgccgtcggttcgtggaccgacgacctaacccagttgtcactgctaaaggacacattgagcgcatatatctcagccgatgatatcagtattctgaacgaacgcgtggaactgttgcagcggcagtgggaggagctttgccatcagctgagtctcaggcggcagcagatcggcgaacgccttaatgagtgggcagtgttttctgagaaaaacaaggagttgtgcgagtggctcactcaaatggaatcaaaggtatctcagaacggggacatcctcattgaggaaatgattgagaagctcaaaaaggactaccaggaagaaattgcaattgcccaggagaacaagattcagctccagcagatgggcgagcgccttgctaaagcatcacacgaatccaaagcttccgaaattgaatacaagcttggtaaagtcaacgataggtggcagcatctgctggatttaattgctgcgcgcgtgaagaaactcaaagaaactctcgtggcagtgcagcagcttgacaagaatatgagcagtctccgtacttggctggctcatatcgagagcgaattggccaaaccgatcgtctacgattcatgtaattctgaggaaatacagcggaaacttaacgaacagcaagaactgcagcgagacatcgagaagcactctactggggtggcctcagtcttgaacttgtgtgaagtgctgctgcacgactgtgatgcctgtgctactgacgctgagtgtgatagcatccaacaggccacaagaaacctggaccgacggtggcgaaacatctgcgcaatgtctatggagcgcagactaaaaatagaggagacttggagactgtggcagaaattcttggatgattattcccgcttcgaagactggctcaagtctagtgagcggactgccgcctttccaagcagcagcggcgtcatctatacagtggccaaagaagaactgaagaagttcgaggcgtttcagagacaggtccacgagtgtctgactcagctggaattgattaataagcaatataggagactcgccagagagaaccgcaccgattccgcctgctcactgaagcagatggttcatgaaggaaatcagagatgggataacctgcaaaaacgtgtgacgtcgatcttgagaagactgaaacattttatcgggcagcgcgaggagtttgaaaccgctagagactctattttggtctggctcacagaaatggacttacagcttaccaacatcgaacacttcagcgaatgcgacgtgcaggcgaagatcaagcagctgaaagccttccagcaggaaatcagccttaaccacaacaagatagaacaaatcatagcccaaggcgagcagcttatcgagaagagcgaaccgcttgacgccgccatcattgaagaagagcttgacgagcttcgaagatattgccaggaggtatttggccgcgttgaacggtaccacaaaaaactcatccgcctccccctccccgatgacgaacacgatctttccgacagggagctggagctggaagacagcgccgctctcagcgacctccactggcatgaccgcagcgcagattctttgcttagcccgcaaccttcctcaaacctgtcactgagtttggcgcagcctctgcgttccgagcgtagcggtcgggacacacccgcgtccgtcgactccatcccccttgagtgggaccacgactatgacctatcccgcgacctcgagagcgccatgtctagggccctgccttcggaagacgaggaagggcaggacgacaaggatttttatcttcggggggctgtaggactgtccggagatcacagcgctctggagtcacagatccggcaattaggaaaggccctggatgacagcaggttccagatccaacagactgagaacataatacgcagcaagacccccactggccccgaattggatacctcttacaaggggtatatgaagctcttgggcgaatgtagttctagcatcgacagcgtgaagcgcttagagcacaagctgaaggaggaagaggaaagcttgcctggttttgtgaaccttcatagcaccgaaacccaaactgccggcgtgatcgatcgctgggagttgctgcaggcgcaagcattgtcgaaggagctgagaatgaagcagaacctgcagaaatggcagcagtttaacagtgacctcaattccatctgggcatggcttggagacacggaggaggaactcgaacagttgcagcgtctggaactttctacggatatccaaacaattgaacttcagattaagaaactcaaggaattgcaaaaagcggtcgaccatcgtaaggctatcatcttaagtattaacctttgctctcctgagtttactcaggctgacagtaaggagagccgtgacctgcaggatcgtctgtcccagatgaatggcagatgggacagggtctgtagcctgctcgaggaatggcggggtcttctgcaggacgccctcatgcaatgccagggctttcatgagatgtcgcatggactactccttatgttggagaacattgaccgacgcaaaaacgagatcgtgccaatagactcaaatctggacgctgagatattacaggatcatcacaagcagttgatgcagattaagcatgagttgttagagtcacaactgcgtgtggccagcttgcaggacatgagctgtcagttacttgtaaatgcagaaggcacggattgccttgaggcaaaagaaaaggtccacgtgatcggcaataggttaaaacttctgttaaaagaggtgtccaggcacattaaggaactggagaagctgcttgacgtatcctctagccagcaggatctgtctagttggtcctcagctgatgagctcgacacatctgggtccgtcagcccgacttctggcaggagcacccctaatcgacagaaaacccccagagggaagtgcagcctctctcagccaggtccttctgtgagctcacctcatagcagatctacaaaaggagggagcgattcaagtctgtcagagcctgggcccggtaggagcggtaggggctttctgtttcgggtccttcgggccgctctgccattgcagctactactgctactgctcatcggccttgcgtgcctcgtgcccatgtcagaagaggactactcctgcgccttaagcaataatttcgcacggtctttccatcccatgctgcgctacacgaatggccccccacctttatag

SEQ ID NO: 257457 - DNA, 25230 bp, Artificial Sequence
  derived and/or modified sequence
atggccacttcaaggggtgctagtcggtgcccacgcgacatcgctaatgtgatgcagcggctgcaagatgagcaagagattgttcagaaaaggacatttaccaaatggatcaattcacatttggctaaacgcaaacctcccatggtcgtggacgatttgttcgaggatatgaaagatggtgtcaagctcctggcactcctggaggttctgagcggccaaaagctaccctgcgagcagggacggcggatgaagagaatccatgccgtggctaatatcggaacagccctgaaatttctggagggccgcaagatcaagctggttaatatcaactccaccgatatcgcagatgggaggccctctattgtgctgggccttatgtggaccattatcctttattttcaaatcgaggagcttaccagtaacctcccccagttgcagtctctatcaagctccgcctctagcgtggattccatagttagttctgagaccccgtcccctccctcgaagcggaaggtgaccaccaagatccagggaaacgcaaaaaaagccctgctgaagtgggttcagtataccgccggcaaacagacaggaattgaagtaaaggattttgggaaatcgtggagatcaggggtcgcgttccacagcgtgattcatgccattcgtccagagttagtagatctggagacggtcaagggccggtcgaaccgcgagaacctggaagatgccttcactatcgcggaaacggagttgggcatcccacgtctccttgaccctgaagacgttgacgtcgataagccagatgagaagtctatcatgacttatgtagcacagttcttgaagcactaccccgatatccacaacgcttccacggacggccaggaagatgatgagatactgccgggctttccttcattcgccaactccgtgcagaacttcaagagggaggacagagtcatttttaaggaaatgaaggtgtggattgagcagtttgaacgcgacctcaccagagctcagatggtggaatctaacctacaggacaagtaccagagctttaaacactttcgggttcagtacgagatgaagcgtaagcagattgagcatctgatacagccactccatagggatggcaagctcagcctggaccaggccctagtgaagcagagctgggaccgagtgaccagccggttgtttgattggcacatacagctggacaaaagtttacccgctcctctaggaacgatcggagcgtggctctatcgtgccgaagtggcccttagagaggagattaccgtgcagcaggtacatgaggagactgccaacaccatccaaaggaaactagaacagcacaaacgaaagcttaggaacgtgatcgacttgttgcagaataccgatgctcataagcgtgccttccacgaaatataccgcactcggagcgtgaatggaatccctgtaccaccagaccagctggaggacatggctgaacgtttccacttcgtctcgtctacgtccgagctgcacctgatgaaaatggagtttttggagctgaagtataggctgttgtctctgctcgtcctggctgagtctaagctgaagtcctggatcattaaatatggaagaagagaatctgtggagcagctcctgcagaattacgtctcattcattgagaacagtaaattttttgaacagtacgaagtaacttatcaaatcctgaaacagactgcagaaatgtacgtaaaggctgatggttccgtggaagaagcggagaatgtgatgaagtttatgaatgagactacagcccagtggagaaatctgtctgttgaagttcgttctgtgcgatctatgctggaggaagtgatttctaattgggataggtatggaaacacagtcgcttccttgcaagcatggctcgaggacgccgagaagatgttgaaccaaagcgagaatgcgaagaaggatttcttcaggaatttgcctcactggatccagcagcatacagccatgaatgatgccgggaactttttgatcgagacatgtgacgaaatggtgtcaagagacctgaaacaacagttactactgctcaatggacgctggcgggagctcttcatggaggtgaagcaatatgctcaggctgacgagatggataggatgaaaaaggaatacaccgattgtgtcgttactctgtccgccttcgcaaccgaagcccataaaaagctgagcgaaccactggaagttagtttcatgaatgtcaaactgctgatccaggacctcgaggacatcgaacagagagtccctgttatggatgcacagtacaaaattattaccaagaccgcacaccttatcacaaaggagtccccacaggaggaagggaaggaaatgttcgcaaccatgtccaagctcaaggagcaacttaccaaggtgaaggaatgttactcaccactgctgtatgagtcgcagcagctgctgattcccctagaagaactggaaaagcagatgacctccttttatgattcattaggcaagattaatgagatcattacagtcctggagcgagaagcccagtcatccgcgttgttcaaacagaaacaccaactgaggattctgaaatgcaaatggtgcaattcgagtcagaagatgacactctgtctggtgctgggcagtatgatcagcatgttgagcaccgccaaaatcactatcgccggatataagtcggaggtggaagtgagtgaacttcttgcctgtcaagagaactgcaaaaagaccctgacactaattgagaagggttctcaatccgttcagaagtttgtcactctcagcaacgtgctcaagcatttcgatcagaccaggctccagactgattgccggtacagctgttgtttcagtgtgatgaggaagcagcaccatataatgatagtgttccacataaaatctatggtgaagaaaacaggagattggaagaaacacgtagaaacgaattctagactaatgaagaagtttgaggagtccagggcagagctggagaaagttctgcgcatagcacaggaggggctagaagaaaagggcgaccctgaggagcttctcagacgacataccgagtttttttcacagctggatcagcgcgtgcttaacgcatttctcaaagcctgtgatgaattaaccgatatcctcccggaacaagagcagcagggcctgcaagaggccgtgcggaaactgcacaaacagtggaaggatcttcagggcgaggccccttaccacctactgcatctgaaaatcgacgtagaaaagaatagattcttggccagtgttgaggagtgcaggaccgaactggatcgtgagacaaagcttatgcctcaggaggggagcgagaagatcatcaaagagcatagagtgttcttctctgataagggtcctcaccacctgtgtgaaaagcgtcttcagcttatcgaagaactgtgtgtgaaattgccagtcagggatcctgttagagatacccccggaacttgccatgtgactctgaaagagttgcgtgccgcgattgattccacttatcgtaaactaatggaggacccggataagtggaaggactataccagtaggttcagtgagttctcatcatggattagcaccaatgaaactcagcttaagggcatcaaaggtgaggccattgataccgcaaaccacggcgaggtcaagagagctgttgaggaaatcaggaacggggtgaccaaaagaggagagactttgagctggctcaagtccagactgaaggtgctcacagaagtttcatcggagaacgaggcccagaaacagggggacgagctggccaaactgtctagcagctttaaggcattggtgaccctcctctcggaggttgaaaagatgttatctaatttcggcgattgcgtgcagtacaaggagatcgttaagaacagtcttgaggagttgatttccggaagtaaagaggtgcaggagcaggcggagaaaatcctggatactgagaatctgtttgaagcccagcagctgctgctccatcatcaacagaaaacaaaaaggatcagtgccaaaaaaagggatgttcaacagcagatcgctcaggctcagcagggcgaagggggcttgccagatcggggccacgaagaattgagaaagctagagtcaacactcgatggactcgagaggagccgtgagcgccaggagcggcgtatccaggttaccctgagaaaatgggaaaggtttgaaacaaataaagaaacagtggttagatacctttttcagacgggctcttcccacgaacggttcctctcgttcagttctctggagagcctctcctctgagcttgaacagaccaaagagtttagcaaacggaccgaatctatcgcagtgcaggccgaaaacctggtgaaggaagcttctgagattcccctaggcccacaaaacaagcagctgcttcagcaacaagctaagagcataaaggaacaggttaagaaattggaagataccctcgaggaggagtacgtgatagataataaaacgatggaaatggtcaagaccaagtgggatcatttcgggtcgaattttgaaaccttatccgtttggataaccgagaaagagaaagaattgaatgccctggagacttctagcagcgctatggatatgcagatttcgcaaataaaggtcactatacaagagatcgagagcaaactgagcagcattgtcggacttgaagaggaggcccaatcattcgcgcagtttgtcaccactggcgagagtgcaagaattaaagcaaaattgactcagatcaggcgctatggagaggagctcagggagcacgcccagtgtctggaaggcaccatccttgggcatttatcccagcagcagaagttcgaggagaacctgcggaagattcagcagtctgtgagcgaatttgaggacaagctggccgtgccaattaagatttgctcttctgccacagaaacgtacaaggtgctgcaagagcacatggatctttgccaggccctggagagtcttagctcggcaattacagctttctctgctagtgcgaggaaagtggtgaacagagattcctgtgtgcaggaagccgcggcgcttcaacaacagtacgaggacattttacggcgggcaaaggagagacaaaccgcgctggaaaatctgctagcccactggcagaggcttgaaaaggaactgtcctcctttcttacttggttagagcgaggcgaagccaaagcttcatcccctgaaatggatattagcgctgacagagtcaaagtagaagcttccaaagacgacgtgaagatgatgaagctgcacctggagcagctggatgagcggtggcgggatctgcctcagatcatcaacaagagaataaattttctccagagcgttgtggcagaacaccagcagtttgatgagctgttattgtcttttagtgtgtggattaagctttttctcagcgagctccagaccaccagtgaaatctctataatggaccatcaggtcgcactgactaggcacaaggaccatgcagccgaggtggagagtaagaagggggaactgcagtcgctccaggggcacctggccaaactcggctctctcgggagagcagaggatctccacttattgcagggcaaagcagaagattgtttccaattatttgaggaggcatcacaagtcgtggagcgacgccaactggctttgagtcaccttgccgaattcctgcagtcacatgctagtctttccggaattttgcgccagctacgtcaaaccgtagaggctactaacagcatgaacaaaaatgagtcagacctcatcgaaaaggatttaaacgacgctcttcagaatgcaaaggccctggaatctgctgccgtaagcctagacggaatcctctctaaggcccagtaccatttgaaaatcggatccagtgagcaacggacatcttgtcgggctactgcagaccagctttgtggagaggtcgagaggattcaaaacttgctggggactaagcaatccgaagccgacgcgctggccgtgttgaagaaagcttttcaagaccagaaagaggaattgttgaagtccatcgaggacattgaggagaggacagataaggagcgattaaaagagccgactaggcaggcgcttcaacagcgattgagggtctttaatcaattggaggatgaacttaactctcatgaacatgagctgtgctggctcaaggacaaagccaaacagatcgctcagaaagatgtggccttcgcccccgaagtagatagagaaatcaacaggctagaagtgacttgggatgatacaaaacgactgatccacgagaatcagggccagtgttgtgggctcatcgacttgatgcgggagtatcagaatcttaagagcgccgtgagtaaggtcctggaaaacgcatcgagcgtgatcgtaactcggactacaatcaaggatcaggaagatctgaagtgggctttttcaaagcacgaaacggcgaaaaacaaaatgaactataagcagaaagatcttgataacttcacttctaaaggcaaacacttattgtcagaattaaagaagattcatagctcagacttctctctggtgaagacagatatggagtcaaccgtggacaagtggctggatgtgagcgaaaaactggaggaaaacatggaccgcctgagagtctctctcagtatatgggacgacgtactcagcacaagagatgagatcgaaggttggagcaataattgcgttccccagatggccgagaacatttcaaacctggataaccatctgcgagcagaagagctcttaaaagagttcgagagtgaggtgaagaataaagcactgcgcctcgaagagcttcatagcaaagtcaatgatttaaaggagctgaccaagaatctggagacccctccagacttacagtttattgaggcagatctgatgcagaagctggaacacgctaaagaaatcaccgaggtggccaaagggaccctcaaggacttcaccgctcagtcaacacaggtcgagaagtttattaacgatattaccacatggtttactaaggttgaagagagcctgatgaattgcgcgcagaatgagacctgtgaggccctcaaaaaggtcaaggacattcagaaggagctccagagccagcagagcaacatctcaagcacacaggagaatctcaattcactctgtcggaaatatcactctgccgaactggaatctttgggacgtgcaatgacggggcttattaagaaacatgaagccgtgtcgcagctgtgctctaagacacaggcaagccttcaggaaagtctggagaagcacttcagcgaagaaagcatgcaagaatttcaagaatggtttctgggcgccaaagctgccgctaaggaatccagtgatcgcacaggagactccaaagtgctggaagccaagctgcacgatctgcaacagaacattctggattcggtgagtgacggacagagcaagctggacgctgtgacacaagagggccagactctatatgctcacctgtcgaagcagattgtgagcagcatccaagagcagatcactaaagccaacgaagagtttcaggcctttctcaagcagtgcctcaaagataaacaagccttacaggattgtgcatctgagctgggctccttcgaggaccagcaccgaaagctgaacctgtggatccacgagatggaagaacggtttaacaccgagaacctcggagaatccaagcagcatatccctgagaaaaagaacgaagtgcataaggtggagatgtttctgggtgaattgctcgctgcaagggaaagcttggacaagctgagtcaacgggggcagcttctgtccgaggagggccatggtgcggggcaagaagggagactatgctcgcagctgctgaccagtcatcagaatctgctccggatgacaaaggagaagctccggagttgtcaggtggccctacaggaacacgaggctctggaagaggccctgcaaagtatgtggttctgggtcaaggccatccaggacagattggcttgtgcagagtcaaccttgggatctaaggacaccctggaaaaacgcctatcccagatccaagatattcttctgatgaaaggggaaggggaagttaagcttaacatggctattggcaagggcgagcaagccctgcgttccagcaataaggaagggcagcgggtcattcagacgcagctggaaactctgaaggaggtttgggccgacattatgagctcctccgtgcatgcccagtccactttggagagcgtgatcagccaatggaatgactacgtcgagcggaaaaatcagcttgagcagtggatggagtccgttgatcaaaaaatcgagcaccctctgcaaccacagcctggtttaaaggaaaaatttgtcctgctcgatcacctccagtcaattctcagtgaggctgaggatcataccagagcccttcacagattgattgcaaagagtagagaactatatgagaaaactgaagatgagagcttcaaggacacggcgcaggaagagctgaagacacaatttaacgacatcatgaccgttgctaaagaaaaaatgaggaaagtggaagaaatcgtgaaggaccaccttatgtatttagatgctgtccacgagttcaccgactggttgcatagcgccaaggaggaattacaccgctggagtgacatgtccggcgactccagcgccactcagaaaaagttgagcaaaatcaaggagctgattgactctagggaaattggggctagccgactgagccgcgtagagagccttgctcccgaggtaaagcagaacaccactgccagcggatgcgaactgatgcataccgaaatgcaggctctcagggccgactggaaacagtgggaggactcggtattccagactcagagctgcctcgaaaatctggtgagccaaatggccctcagtgaacaggaattctccggacaagtagcccaactcgagcaggctctggagcagttcagcgctctgctaaagacttgggcccagcagctgacactcctcgagggcaaaaataccgacgaagagattgtggagtgctggcataaagggcaggaaattctggacgctcttcagaaagccgaacctaggaccgaagacttgaagagtcagctgaacgagctttgtagattctccagagatttgagcacatattccgggaaagtcagtgggctgatcaaagaatataactgtctgtgcctgcaggcaagtaagggctgccagaacaaggagcagattctccagcagaggttccgtaaggctttcagagatttccaacagtggcttgtgaatgcaaaaatcactaccgccaagtgcttcgacattcctcagaacatcagcgaagtttccacttccctgcagaaaattcaggaatttctcagtgagtcagagaatggccagcacaagttaaacatgatgcttagcaagggcgaactcctctccaccttactcacaaaggaaaaagctaagggaatccaggccaaagttacggccgccaaagaggactggaagaattttcactccaacctgcatcagaaggaatcggccctcgagaatttaaagattcagatgaaagattttgaggtctctgcagaaccaattcaggattggctatcgaagacggagaaaatggtgcatgagtcaagcaacagattgtacgacctccccgccaagcgccgggagcagcaaaagcttcagagtgtcctggaggagattcactgttacgaacctcaacttaatcgtctcaaggagaaagctcaacaactctgggaaggccaggcagcctcgaagagcttcaggcatcgggtcagccagctgtctagtcaatatttggccctgagcaatcttaccaaggaaaaggtgtcaaggttggatcggatcgtggccgagcataaccagtttagccttggcatcaaggaactccaagattggatgacagatgcaatccacatgctggactcatactgccatcccacgagtgataagtcagtgctggactcccgtaccctcaagctggaagccttgctgagtgtgaaacaggaaaaggagattcagatgaaaatgattgtcacccgcggagaatcagtgctgcagaatacaagccccgagggtatcccaaccattcaacagcagctgcaatcagtaaaggacatgtgggcgtctctcctgagcgcgggcatcaggtgcaagagagtgagacttccctgcgcttacattgccctgaaactgcgcgttcaccagcacgctgagctccgggacaaaactacaatgctaggaaaggcaaaggaagccgtgacaaaatcagaaaagctcgtgcggctgcaccaggagtatcagcgcgacttgaaggccttcgaggtgtggctgggtcaagagcaagagaaacttgatcaatactctgtcctagagggcgacgcccacacgcatgagaccacattgcgagacctacaggagttacaggttcactgcgccgagggacaagcccttctcaactcggtgctacacactagggaagacgtgatacccagcggcattccgcaggccgaggatcgtgcgctggaatctttgcgccaggactggcaagcctaccagcaccggctgtccgagactcgcacgcagtttaataatgttgtgaacaagctcagacttatggaacagaagtttcagcaggttgatgagtggctcaagacagcagaggagaaggtgagccctcggacaaggcggcaaagtaatagggccacaaaagagatccagctgcatcaaatgaaaaagtggcatgaagaggtcacagcatacagggacgaagtggaggaagtgggggctcgggctcaggaaatcctcgacgagtcccacgttaattcaagaatggggtgtcaggcaacccagctgacttctaggtaccaggcgctcctcctccaagttctcgaacagatcaagtttttagaagaagagatccagtcattggaggagagcgaatctagcctgtctagctacagcgactggtatggttccacccataagaacttcaaaaatgtcgccacgaagattgataaagttgacacagtgatgatggggaaaaagctgaaaaccctcgaggtcttactgaaagacatggagaaaggtcactcactgctgaaatctgcccgcgagaagggggaacgcgccgtgaagtacctggaggagggcgaggccgagaggcttcggaaagaaattcatgatcacatggagcaattaaaagagctgacctccactgttcgaaaagagcacatgactctggagaagtctctccaacagactgtgttgagccatgaaccttccgtaaaaagcgttagagagaaaggtgaagcactcttagagctggttcaggatgtgacgctcaaagacaaaattgatcagctgcagagcgactatcaggatctttgctcgattggtaaagagcatgtgtttagcttagaagccaaagttaaggaccacgaagactacaacagcgaactgcaggaagtggagaagtggcttctgcagatgtccggcaggctcgtggcccctgatttgctggagacgagcagcctagagaccatcactcagcagctggcgcatcataagatgtaccagagcctggagcatgagctgcagaagcacgtaagccggcaagatacactgcagcagtgtcaggcttggctctcggctgtgcagcccgacctcgagcccagtccgcagccacccctatcaagggccgaggccatcaaacaagtcaagcatttcagggctctgcaggagcaggccagaacttatctggacctactgtgctctatgtgtgatctgtccaatgcatcagtaaaaacaaccgctaaggacatacagcagacagaacagactattgagcaaaaattagtgcaagcccaaaacctgacgcagggatgggaagagatcaagcatcttaagtccgaactgtggatttatctccaggacgcagatcagcaactccagaatatgaagcgccggcactccgaactggagctaaatattgcccaaaatatggtctctcaggtgaaggacttcgtaaagaagttacagtctaaacaggcctcagtcaacactattatcgaaaaagtgaacaagctaacaaaaaaggaggagagcccagagcataaggaaatcaatcatctgaatgatcagtggttggacctatgcagacagtcgaataatctctgcctgcagcgtgaggaagacctgcaacgtaccagagactaccatgactgtatgaatgtggtcgaagtgtttttggagaaatttacaacagagtgggataacctggccaggagcgatgcggagtcaactgccgtgcatctggaagccctcaaaaagcttgccctggccctgcaagagcgtaaatacgcgattgaagacctaaaagatcagaagcagaagatgatcgagcacctgaacttagatgacaaagagttagtgaaggaacagaccagccatttggagcagaggtggttccagctggaggatcttatcaaacggaaaatccaggttagtgtcaccaacctggaggagctcaacgtcgtccagtctaggttccaggagctgatggagtgggcagaagagcagcagcccaatatcgccgaggcattaaagcagtcccctccccctgacatggcccagaatctgctgatggaccatctcgccatttgcagcgagttggaagctaagcagatgcttcttaaatccctaatcaaggacgccgaccgggtgatggcagatcttggtttaaatgagcgacaggtgatacagaaagccctgagtgacgctcagtcccatgtaaactgcttaagtgaccttgtcgggcagcgtcgtaagaagcatttcaaggaggacttcgataaggcttgtcattggctgaagcaggctgatatcgtaacatttccagaaattaacctgatgaatgagtctagcgagctgcacacccagctggccaaataccagaatatactcgagcagtcacccgagtacgagaacctcctcctgactctccagcgcactggtcagacaatactccccagcctgaacgaagtcgaccattcctacctgtctgagaaactgaatgccctcccccgccagttcaacgttatcgttgctctcgctaaggataaattctacaaggtccaggaggctattctggcaaggaaagagtacgcgtccctgattgaactcactactcagagcctgtctgagcttgaggcgcaatttctcagaatgtcaaaagtgcctacagacctcgctgtcgaagaagcgctgagcttgcaggacggctgccgagccattctcgatgaggtcgccggattgggcgaggccgtggatgaactgaatcagaaaaaggaaggtttccgatctactggacagccatggcagccggataagatgttgcaccttgtcaccctttatcataggctcaagagacagactgaacagcgagtgagcctcctggaggacaccactagcgcgtaccaggaacatgaaaaaatgtgccaacaacttgagaggcagttgaagtccgttaaagaggagcagtcgaaagttaatgaagaaacccttccggccgaggaaaagctcaaaatgtaccattctcttgctggctcactccaggactcaggaatcgtgcttaagagggtgacaattcatctcgaggacttagctccacacctagatcccctcgcctacgaaaaggcccgacaccagatccaatcctggcagggggagttgaagctgctcacttcagccattggcgaaaccgtgacggaatgtgaaagcagaatggtacagtccatcgatttccagaccgagatgtccagaagtttggactggctgcggcgagttaaagcggaactcagtggaccagtgtacctggatctcaacttacaggatatccaagaagaaatccgcaagatccagattcaccaggaagaggttcagtcaagcctgcgaataatgaatgcactgtcgcacaaggaaaaggagaagttcacaaaggcaaaggagcttatatccgcagatctggagcactcccttgcggagctctctgagctggacggcgatatacaagaggctctgaggaccaggcaagccaccctcacagagatatatagtcagtgccaaagatattatcaggtttttcaagctgccaacgattggctggaagacgctcaggaactcttacagctggccggcaatggcctggatgtagaatcggcagaggaaaacctgaaaagccacatggaattcttctccacagaggaccagtttcacagcaacctggaggaactccacagcttggtggctactttggatcccctgataaagcccacagggaaggaggaccttgagcagaaagtagcttctctggaactgaggagccagcggatgagcagagatagcggtgcccaagccctcgtctctgtcgtgaactccttccatgagaagattgtggccctggaggaaaaggcttcccaactcgagaaaacaggaaacgacgccagtaaagccacactgtcacggtctatgacgactgtgtggcaaaggtggacaaggctgcgagccgtagcacaagatcaggagaagattctcgaggacgcagtggatgaatggacaggtttcaataataaagtgaagaaagctacggaaatgatcgatcagcttcaagataagctcccagggtcctcagctgagaaagcttccaaggctgaactgctgacattgctggagtaccacgacacattcgtcctcgagctcgaacagcagcagtcagccctcggcatgctccggcagcaaaccctgtcaatgctgcaggatggtgctgcccctactcccggtgaggaacctcctctcatgcaagagatcacggctatgcaggaccggtgtttgaaaatggtagaaacccagatcaacagtgtcaagtgctgggtgcaggaaactaaggaatatttgggaaatccgaccattgagatcgatgctcaactagaagagcttcagatactgctgacagaagctacaaatcacaggcagaacatagagaaaatggccgaggagcagaaagaaaagtacctgggcctctacactatcctgccgtcagagttgtctttgcaactggcggaagtggcactggacctgaagatcagggatcagatacaggacaaaatcaaggaggtcgaacagtctaaggccacctcacaggagttgtctcggcagatccagaagctggctaaagacttgaccacgatattaacaaaactaaaagcaaaaacagataatgtcgtgcaggctaagaccgaccagaaagcggcctcacacctggaagaatacaacgagatgctggaacttatcctgaaatggatcgagaaggctaaggtgctcgcacacggaacaattgcttggaattccgcaagtcagctgagggaacagtacatactccaccagactctacttgaggagagtaaagaaatagattctgaactagaggcaatgactgagaaattgcagtacctcacctctgtgtactgcaccgagaagatgtctcagcaagtcgccgaactgggaagagaaacagaagagctgcgccagatgattaaaattcggctccagaatcttcaggacgcggctaaggacatgaaaaagtttgaggcagaattaaagaagttgcaggctgctctagagcaggcccaggcaaccctcacgagccccgaggtcgggagactcagtctgaaagaacagctaagtcatcggcagcaccttctgtcggaaatggagtctctgaaaccgaaggtgcaggcggtgcaactatgccagagcgccttgcgtattcccgaagatgtagtcgcctctctgcccctttgccacgcggccctgcgcctgcaagaagaggcctcccgattgcagcacacagccatccagcagtgtaacattatgcaggaagcggtggtccagtatgaacaatacgaacaggagatgaagcaccttcagcagcttattgaaggtgcccatcgagagattgaagataaaccagttgcaacatctaatattcaggagctccaggcccagatatctcgccacgaggagcttgcccaaaagatcaaagggtaccaggagcaaatcgccagccttaatagcaaatgtaagatgctgactatgaaagcgaagcatgctacaatgcttctcaccgtcactgaggtagagggcttggccgagggcaccgaagatctggatggcgagcttctacccactccatccgcgcatcccagtgtcgtcatgatgacagcaggcagatgccatacccttctctcacccgtgaccgaggagagtggcgaggaggggacaaattcggagataagctcaccccccgcctgtcgatcaccctcccctgtcgctaatacggatgcatcggttaatcaggatatcgcatactaccaagctctgagtgcagagagactccagaccgatgccgccaagatacacccctcaacttccgcaagtcaggaattttatgagcctggtttggaaccctctgccaccgccaaattaggagaccttcaaaggagctgggaaactcttaagaatgtcattagtgagaaacagaggacgctgtacgaggccctggaaagacagcagaaatatcaggactccctccaaagtatctcaacaaagatggaagccatagagttaaagcttagtgagtctccagaacctggacgatctccagagagccaaatggccgaacatcaagccctgatggacgagatcctgatgctgcaggatgagatcaacgaactgcaatccagcctggcggaggaactcgtctccgaaagctgtgaggcagaccccgccgaacaactagccttgcagtctacccttacagtgcttgctgagcgcatgagtactatccgaatgaaggcctctgggaaacgtcaactacttgaggagaaactgaatgatcagctggaagaacaacggcaagaacaggcccttcagagatatcgctgtgaggcggatgagctggatagctggctgctgtctaccaaggctacactggacacagcactttcaccccccaaggagccgatggacatggaagctcaacttatggattgccagaatatgctcgtcgagatcgagcagaaggtggtggctctatcagaattgtcagtgcataatgaaaacttattgttggaggggaaggcccacacaaaagatgaagctgagcaacttgctgggaaattgaggaggttaaagggctctttactagaactccagcgggcccttcacgacaagcagctgaacatgcaaggcactgctcaagagaaggaagagagcgacgtcgacctgacagcgactcagtcaccaggagtccaggagtggcttgcccaggcgcgaaccacctggacacagcagaggcagtccagcctccagcagcagaaagagctggagcaggaactcgccgaacaaaaatctcttcttcgttcagtcgccagcaggggtgaggagattttaattcagcactcagccgctgaaacctccggcgacgctggggagaaacccgatgtgctttcccaggagctaggcatggaaggtgagaaatcaagcgctgaggatcagatgagaatgaagtgggagtctctccaccaggagttcagcaccaagcaaaagttactgcagaatgtgcttgagcaggagcaggagcaagtgctttatagcaggccaaaccgtcttctttccggggtcccactgtacaaaggcgacgttcctacgcaggacaaaagtgccgtgacaagcctcttggatgggctcaaccaagccttcgaggaggtgtcttcccagtccggtggagcgaaacgacagtccattcacctggagcagaaactgtacgatggtgtaagcgcaacctctacctggctcgacgatgtcgaggagcggctcttcgtggccaccgcactcctgcccgaggaaaccgaaacatgcctgttcaaccaagagatcttggctaaagacataaaagaaatgtccgaagaaatggataagaataagaatctattcagtcaggccttccctgaaaatggcgataaccgagacgtaattgaggatacgctgggatgcctgctgggacggctgagcctgctcgactctgtggtcaaccagagatgccaccagatgaaagagcgcctccaacagattttgaacttccagaacgacctgaaggttcttttcacaagtcttgccgacaacaaatacattatattacagaagctcgcaaatgtgttcgaacaacccgtagctgagcagatcgaggcaattcaacaggcagaagatggcctgaaagagtttgatgctggaatcatagagcttaagagaagaggcgacaaacttcaagtagaacagccatctatgcaggaactgtctaagctgcaggacatgtacgatgaactcatgatgatcattggcagcagacggagtgggctgaatcagaatttaaccctgaagtcccagtatgagagggcactgcaagacctggcggacctcctggaaaccgggcaggaaaagatggctggagaccagaaaatcatcgtttcctccaaggaggagattcagcagttgctcgataagcataaggaatacttccagggattggaaagccacatgatcctgactgagaccctgttccgaaaaataatctcttttgctgtgcagaaagagacacagtttcatacggagcttatggcacaggctagcgccgtgttgaaacgagcacataagagaggagtggagcttgagtatattttggaaacctggtcacatcttgacgaggaccagcaggagctgagtaggcagctagaggtggttgaatcctcaatcccgtccgtggggctggtcgaagaaaatgaggataggctcatcgacaggatcaccctgtaccagcaccttaaatcctcccttaatgaatatcagcctaagctgtaccaagtgttagacgatggcaagcgtctactgatcagcatttcttgtagcgatctggagagtcagctcaaccagctgggagaatgctggttgtctaacaccaacaaaatgagcaaagaactccacagactcgagaccattctcaaacactggactcggtaccagtccgaatccgcagacctcatccattggctgcagtccgcaaaagataggttagagttttggacacagcagagtgtgacagtcccacaggaactggaaatggtgcgcgatcacttgaatgccttcctggagttttccaaggaggtcgatgcccagtcttctctcaaaagcagtgttctgtctaccggtaatcagcttctccggctgaagaaagtggatactgccactctgcgctctgaactatctcggattgatagccaatggactgacctactgaccaatatacccgccgtacaggagaagttgcaccagctgcaaatggacaaacttcctagccgacacgccatatccgaggtgatgtcatggattagcctgatggagaacgttattcagaaggacgaagataatatcaagaactctattggctacaaggccatacatgagtacctgcagaagtacaaaggtttcaagatcgatataaattgtaaacagttgacggtggacttcgtaaatcaatccgtcctccagattagctcacaggatgtggagtccaagcgcagtgacaagacagactttgcggaacagctaggcgccatgaacaaaagttggcaaatactgcaaggtctggtgaccgaaaaaattcagctgctggaaggtttgttagaatcgtggtctgagtacgaaaataacgttcagtgccttaaaacatggtttgagacacaggagaagcgactaaagcagcagcatcgcattggagaccaagccagtgtgcagaacgccctcaaggactgtcaggatctcgaggacttgataaaagcaaaggaaaaggaagttgagaagatcgaacagaacggtttagccttgatccagaacaaaaaagaagacgtctcatccatcgtaatgtcgacactgcgcgaactgggccagacctgggccaacctggatcacatggtggggcagctgaaaattctgcttaaatcagtcttggaccagtggtctagtcacaaggtggcattcgataagataaactcctacctcatggaggcacgatacagcttgtcacgctttcgactacttaccgggagtctcgaagccgtacaggtacaggtggacaatttgcaaaatctccaggatgatttagaaaagcaggagaggtctcttcagaagtttggatccataactaatcaattgctgaaggaatgccatcctcccgtgaccgaaactttaactaacacgctcaaggaagtgaacatgaggtggaacaacctgttggaggaaattgctgagcagctacagagcagcaaagcgctcttacaattgtggcagagatacaaggactacagtaaacagtgcgcctctactgtgcaacaacaggaggatcggaccaacgagcttctgaaggcagccactaataaggacatcgccgatgacgaggtggccacatggatccaggattgtaatgatctactgaaaggcctcggcaccgtaaaagactctttattttttctgcacgagctaggcgagcagctcaagcagcaggtcgatgcctccgctgcctccgcgatccagtccgatcagctgtccctctcccaacacctgtgtgcgctagaacaagcgctgtgcaaacagcagacttccctgcaagcaggggtactggattacgaaaccttcgcaaagagcttggaagcgcttgaggcctggattgtggaggctgaagagatcctgcaaggtcaagatccatcgcacagctcagatctctccaccatacaggagcggatggaagagctcaaaggacagatgttgaagttcagtagcatggcccccgacctggaccgtcttaacgaactcggctatcgacttcctctgaatgataaggagattaaacgtatgcagaacctcaacagacactggagtctcatatccagccagaccaccgagcgcttttccaaactccagtcttttctccttcagcaccagactttcctggagaaatgcgagacttggatggaattcctcgtacagacagaacagaagctggctgtggaaatcagtggaaactaccagcacttactggagcaacagcgggcccatgaactatttcaggccgagatgttctctaggcagcagatcttgcacagtataattatcgatggtcagcggcttctcgagcaggggcaggttgatgaccgagacgagttcaacctgaagctgacccttttatctaatcaatggcagggagtcattaggcgcgcacagcagagaagggggataatcgattcacagatccggcagtggcagcggtaccgcgaaatggctgagaagctgaggaagtggctggtggaggtctcataccttcctatgtcaggactgggctcagtgcccattcctctgcaacaggccagaaccctgtttgatgaggtgcagttcaaagagaaagtgttcctgcgacaacaggggagttatatcctgacagtggaagctgggaaacagctgttactgagcgctgatagcggagctgaggcagcacttcaggccgaattagcagagattcaggagaagtggaagtccgcatccatgcgtttggaggagcagaaaaagaagctagcattcctgcttaaagactgggaaaagtgcgagaagggaattgctgactccctggagaaattgcgcacttttaagaaaaagttgagccagtccctgcctgatcatcatgaggagttgcacgccgagcaaatgcggtgcaaggaactggagaacgccgtggggagctggacagacgatctgacccagctgtcactgctgaaagacacactgtctgcctacatcagcgcggacgacatcagtatcctgaacgagagggtggagctcctgcaaagacagtgggaagaactctgtcatcaactgagccttaggcgccagcagataggggaacggctgaacgagtgggctgtattttcagagaaaaataaagaactgtgcgagtggcttacacagatggaaagcaaagtgtctcagaacggtgacattctgatcgaagagatgatcgaaaaactcaaaaaagactaccaggaggagatcgcgattgcacaggagaataaaattcaactgcagcagatgggcgagagactggcaaaggcttctcacgagagcaaggcgtctgagatcgagtataagttgggaaaagttaacgaccgttggcaacacctactagaccttatcgccgccagggtcaagaaactcaaggagacactggtggctgtgcagcagctggacaaaaacatgtcgtcgctgcggacttggctcgctcatatcgaaagtgagctggcaaaaccgatcgtttacgatagctgtaacagtgaggaaatccagcgcaaactaaatgaacagcaggagcttcagcgggacatcgagaagcatagcactggggtggctagcgtgctgaatctgtgcgaggtgctgctccatgattgcgatgcttgtgcgactgatgctgagtgtgactccattcaacaagctactcggaatctcgacagacggtggcgcaacatttgtgccatgtctatggaacgtcgcttaaagatagaagagacgtggcggttatggcagaagttcctcgacgattactcacggttcgaagactggctgaagagctctgaacgaacagctgcctttccatcgtcatctggcgttatttataccgtggcaaaagaagagttgaaaaaattcgaagcgtttcagcggcaggtgcatgagtgtcttacccagttagagctaattaataagcaatataggcggctggctcgggagaacagaaccgactccgcctgctcactgaaacagatggtccacgaggggaatcaacggtgggataatctgcagaagagagtgactagtattctccggagacttaagcatttcataggccagcgcgaggagttcgagactgccagggactccatattagtttggctgaccgaaatggacctgcagctgacaaatatcgaacatttctcagaatgtgatgtgcaggctaaaataaaacagctcaaagccttccagcaggagataagtctaaatcacaacaaaatcgagcagatcatcgcacaaggggaacagttaatcgaaaaaagtgagcctcttgacgcagcaatcattgaggaggagctagatgagctacgtagatactgtcaggaagtgtttggaagggtcgagagataccataaaaaattgattcggcttcccctgcccgacgatgaacacgacctgtctgaccgcgagctcgagcttgaggactctgccgccctgtccgacctccattggcacgatcgttctgctgactcacttctgagtccccaaccatccagcaacctgtccttgagccttgcccagccactgcgatcagagcgctcaggccgagatacccctgcatcagtggattctataccccttgaatgggaccatgattatgacttgagcagagatttggaatcggctatgtcacgagccctcccctccgaggacgaggaaggtcaggatgataaggacttctacctgaggggtgccgtgggtctgagcggggaccattctgccctcgagtctcagatcagacagctcggtaaagctctcgacgacagtaggtttcagatacagcagaccgagaatataattagatcgaaaacgccgaccggacctgagctcgatacctcctacaagggatacatgaagcttctaggagaatgctcttcctccattgactccgtcaaaaggttggagcacaagttgaaggaagaagaagaaagcctccctggatttgtgaacctgcattccacggagacccagacagctggcgtgatcgacaggtgggaattactccaagcacaggccctgtctaaagagctgaggatgaagcagaatcttcagaagtggcagcagttcaactcagatctaaactcaatttgggcctggcttggagacaccgaggaagagcttgagcagctgcagcggctcgagttgtcgacagatatacagacgatcgagctgcaaattaagaagctcaaagaattacagaaagcagttgaccaccgcaaagccatcatcctgagtattaacctttgttcccctgagttcacccaagctgactctaaagaaagcagggatctgcaagacagactgtcacagatgaacgggcgatgggatagggtttgctctctgctagaggaatggagaggtctcctgcaggatgccctgatgcagtgccagggatttcacgaaatgtcacacggcctgttgttgatgcttgagaatatcgatcgcagaaagaatgagatcgtcccaattgactccaatctggacgctgagattctgcaggatcaccataaacagctgatgcagatcaagcacgaattactcgagagccagctgagggtggcgagcctccaagacatgagttgccaactactggtcaacgccgagggtacagattgtctggaagccaaggagaaggtccacgtgataggaaataggctaaagcttctgctgaaagaggtgtctagacacatcaaagagctggaaaagctgcttgatgtgtcctcctcacaacaggatctgtcgtcgtggtcctccgccgacgaactggacacatccggctctgtctctcctacgagcgggcgttccaccccgaacaggcaaaagacacctaggggaaagtgctcattgagtcagcccggtccttctgtaagtagccctcatagccgttcaaccaaaggcggatccgattcatcactaagcgagcccgggcccggccgtagcggtcggggttttctctttcgagtactgcgcgcagcgctgccgcttcagttactcttactcctgctaattggtctggcatgtctcgttccgatgtctgaggaggactatagctgtgctctgtcaaacaacttcgcccgaagcttccatccaatgcttcggtataccaacggcccaccacccctctag

SEQ ID NO: 257458 - DNA, 26394 bp, Artificial Sequence
  derived and/or modified sequence
atggccacatcacggggtgcgtccagatgtccacgcgatattgctaacgtgatgcagaggcttcaggacgaacaggaaatcgtccagaaaaggacattcacaaagtggatcaactcacacctcgccaagagaaagccacctatggtggtggacgacctgttcgaagatatgaaggatggcgtgaagctgcttgcactcttagaggttttgagcggtcagaagcttccctgtgagcaaggtcggagaatgaaacgaattcacgccgtagcgaacatcggcaccgctttgaaatttctagagggacggaaaatcaaactggtgaacatcaactccacagacatcgccgatgggagaccatctattgttcttgggctgatgtggacaattatactgtactttcaaatagaggaactgaccagcaatctacctcagctgcagagcttgtcttccagcgcaagtagcgtcgattctatcgtgtccagcgagacaccctctcctcctagtaaaaggaaagttaccaccaagatacagggtaatgccaagaaggctctcctcaagtgggtccagtatacagccggcaaacagactgggatcgaggttaaggatttcggaaagagctggcgcagtggagtggccttccacagcgttatccacgcgatccgccctgagctggtcgacctcgagaccgtgaaaggacgttccaatagggaaaatttagaggacgccttcaccatcgcagagactgagctcgggatacccagattgttggatccagaagatgtggatgtcgacaagcctgacgaaaagtcaattatgacctacgtcgctcagttcctgaagcattacccagatatacacaatgccagtaccgacggacaggaagatgacgagattctgccagggttcccgtctttcgctaatagcgtccagaactttaaaagagaggatcgggttattttcaaagaaatgaaggtttggattgagcagttcgagagagatctgacacgtgcccagatggtggaatcgaacctccaagacaagtatcagtcattcaagcacttccgcgtacagtacgaaatgaaaagaaagcagatcgagcacctgatccaacctttgcatagggatggaaagttatctttagaccaagccctggttaagcagtcatgggatcgtgttacatctaggttatttgattggcatatccagctggataagtctttgcctgcaccgctcggaactatcggagcatggttgtacagagcggaggttgcactccgagaagagatcacggtacaacaggtacatgaagaaactgccaatacaatccagcggaagctcgaacaacataaagatctcctacagaatacagatgcacataaacgagcctttcatgaaatatacagaacaagaagcgtgaacggtatccccgtgccaccagaccaactggaagacatggccgagagatttcacttcgtgtcgtccacatccgaactccatctgatgaagatggagtttctggaactcaaatatagactgctctcgctgctggtgctcgctgaatcaaaattaaaatcatggatcatcaaatatggtaggcgggagtccgtcgaacaactgcttcaaaactatgtcagcttcatcgagaactccaagttttttgaacagtacgaggtgacataccagattctgaaacagaccgctgagatgtacgttaaggccgacggctcagtggaagaagcagagaacgtgatgaagtttatgaatgagacgaccgcacagtggcggaacctgtcagtagaagtccgatcagtgagaagtatgctagaagaggtcatttccaactgggacagatacggaaatacagtggctagtctgcaagcctggctggaggacgcagaaaagatgctcaatcagagcgagaatgccaagaaggattttttcagaaatttgcctcattggattcagcagcatactgccatgaatgatgcggggaattttttgatcgagacctgtgatgagatggtatcccgagatctcaagcagcagctactcctgctcaacggcagatggcgggaacttttcatggaagtgaagcagtatgctcaggccgacgagatggacaggatgaaaaaagagtacaccgactgcgtggtcactctgtccgccttcgccacagaagcacacaaaaagttgagtgaaccattagaagtatcatttatgaacgtgaaactactgattcaagacctcgaggacatagagcagagggtgccggtcatggatgctcagtataaaataattactaaaacagctcacctgattacaaaagagtccccacaggaagaggggaaagaaatgtttgcaactatgagtaagctcaaggagcagttaactaaagtgaaagagtgctactctccgttactctacgagagtcaacagctcctgatcccactcgaggaactggagaagcagatgacgagcttttatgatagcctgggtaagatcaacgagatcatcaccgtgctagagagagaagctcagtcgtcggccttgtttaagcagaaacaccaagaactgctcgcttgccaggaaaactgcaaaaaaaccctgacactgattgagaagggttcacaaagtgtgcagaagttcgttactctatcaaatgtactcaaacacttcgaccaaacccgtctccagaggcagatcgccgatatacacgtcgcatttcagagcatggtgaagaagaccggagactggaagaagcacgtggagactaattccagactcatgaagaagtttgaagagagtagggccgaattagagaaggttctccgaattgcccaagagggactggaggagaaaggggatcctgaggaactgctccgtcgtcacaccgagtttttcagccaactagatcagagggtgttaaacgcttttctgaaggcatgtgatgagttgactgacattttgccagagcaggagcagcagggtctgcaagaggctgttcggaagttgcataagcagtggaaagacctccagggagaggccccatatcacctccttcatcttaagattgatgtggaaaagaatcgtttcttagcctctgtagaggagtgtaggacagagctggatcgcgaaacaaagctgatgccgcaagaaggtagtgaaaagattatcaaagagcatcgtgtgttcttttctgataagggaccccaccatctctgtgagaagcgactgcagcttattgaggaactgtgcgtgaagctccctgtgcgcgaccctgtcagagacaccccgggcacctgtcatgtgaccctaaaagagctgcgagctgctatcgattccacctaccggaagttaatggaggacccggacaaatggaaggattacacttctagatttagcgaattctcttcctggataagtacgaatgaaacccaactaaaagggatcaagggggaggcaatagacaccgcgaatcacggagaggtgaaacgcgccgtggaggagatacggaacggtgtgaccaagcggggggaaacactgtcatggctgaaaagtcgacttaaggtgttgacggaggtgtctagtgaaaacgaggcccagaagcaaggagatgagctggctaagttaagctcctccttcaaagcgctggttaccctactgtccgaggtggaaaaaatgctgagtaatttcggcgactgtgtacagtacaaggagatcgtgaagaatagtctggaagaactgatatctgggagcaaggaggtgcaggagcaggcagagaaaattctggatacggaaaacctcttcgaagctcagcagctgcttctgcaccatcaacagaagaccaaacgaatttcagccaagaaacgggatgtgcaacagcagattgctcaggcgcagcagggcgagggcggccttccggataggggccacgaagagctccgaaagcttgaatccacactggacgggctggaaagaagcagggagaggcaggagaggcgtatccaagttacgctgcgaaaatgggaacgcttcgaaaccaacaaagaaaccgttgttagatatttgtttcagacagggtcaagccatgaacgattcctaagcttctcttcacttgaaagcttgagctcagagttggagcagacgaaggagttcagcaagcgcaccgaatcaattgcagtgcaggcagaaaacctggtgaaagaagcctccgagattcccctgggccctcagaacaagcagctgctccagcaacaggccaagtccattaaagagcaggttaagaaactggaagatactctcgaagaagacatcaagacgatggaaatggtgaagacaaaatgggatcattttgggtccaacttcgaaacccttagtgtctggatcaccgaaaaggaaaaggagttaaatgccctggaaacatcttcctccgccatggatatgcagatctcccagatcaaagtgacgattcaggagattgagtcgaaattaagttcgatagtgggactggaggaagaggcccagtccttcgcccaattcgttactactggagaatccgccagaatcaaagcaaagcttactcaaatccggagatacggcgaggaactgcgcgagcacgcccagtgtctcgaaggaacaatccttggccatctgagccaacagcagaagtttgaggagaacctccgcaagattcagcagagcgtgtcagagtttgaggataaactggctgtgcctatcaaaatctgttcaagtgccacagagacttacaaagtactgcaagaacacatggatttgtgccaggctcttgagtccctgtcctctgccattacggctttcagcgcatccgcccgcaaggtcgtgaatagggactcatgtgtgcaggaggcagccgccctacagcagcagtacgaggacatccttcgccgcgctaaggaacgccagactgccctagaaaatctgctggcccattggcagagactagagaaagaactgtccagctttctcacttggctggagcggggagaagccaaggcatcaagcccagagatggatatttcagcggacagagtcaaggtagagggcgagttgcaattaatccaagcgctgcagaacgaggtcgtatcccaagcttctttttactcaaagctgcttcagctgaaagaatctctgttttcagtagccagcaaggacgatgttaaaatgatgaagctgcacctcgagcagctggatgagcgatggcgagacctgcctcagatcataaacaagcggatcaatttcctgcagtcggtggtggctgagcaccagcagtttgacgagctgctgctgagctttagcgtgtggatcaagctgtttctcagtgaacttcagaccaccagcgagataagtatcatggatcaccaagtggccctgacccgacataaagatcacgcagcggaggtggaatctaagaagggcgaattacagtccctacagggccatcttgctaagttgggatcactcggccgggccgaagatttgcacctgttgcaaggcaaagcggaggactgctttcagttatttgaagaagcttcccaagttgtggaaaggcgccagctggcactcagccatctggccgagttccttcagtcccatgcgtcactgagcggaatccttaggcagttacggcagactgttgaggcaaccaattctatgaataaaaacgagagtgacctgatcgaaaaggacctcaatgacgcgctacagaacgcaaaagctctggagtccgctgcagttagtctggacgggatcctgtcaaaggcccagtatcaccttaagattgggagcagtgaacagagaaccagctgtcgcgctaccgccgaccagttatgcggagaagtcgagcgcatacagaatctgcttggcacgaaacagtccgaagccgacgctctggctgtgctgaagaaggcttttcaggaccaaaaagaggaacttctcaagagcatcgaagatatcgaagaacggaccgataaagagcgcctaaaggagccaacccgccaggccttgcagcagagactgagggttttcaaccagctagaggatgaattgaacagtcatgaacacgaactctgttggttgaaagataaggccaaacagattgcccagaaggacgtcgctttcgcaccggaggtagaccgggagattaaccggcttgaagtcacctgggacgacacgaagagattaattcacgagaaccagggccagtgctgtggcttgattgatcttatgagagaataccaaaacctcaaaagtgcagtgagcaaggtgcttgagaacgcgagctccgtcatagtgacacggactacaatcaaggatcaggaggacctgaaatgggcattttcgaagcatgagactgctaaaaacaaaatgaattacaagcagaaggacctagacaactttacaagcaaaggtaagcacctgttgtccgagcttaagaaaattcattccagcgatttcagtctggtgaagacagatatggaatccactgtcgataagtggcttgatgtgtccgagaaactggaggagaatatggatcggttgagggtcagcctttctatctgggatgacgttctgagcacacgtgacgagatagaggggtggagtaacaactgtgtgccccaaatggcagaaaacatatccaacctggataatcatctgagagccgaagagctgctgaaggaatttgaaagcgaggtcaagaataaagcgttgagactagaggagctgcattctaaggttaatgacctgaaggagctaactaagaatctcgaaaccccaccagacttacagtttattgaggccgaccttatgcagaaattggagcatgcaaaagagatcaccgaagtggccaaaggtacactgaaggactttaccgctcaatctacccaggtagagaagttcataaacgatatcaccacttggttcacgaaggttgaagaatccttgatgaactgcgcccaaaatgagacatgcgaggccctaaagaaggttaaagatattcagaaggaactgcagtcgcagcagtctaacatctcctcaacccaggagaatcttaattcattgtgtcggaagtatcactctgcagagctggagagcctgggacgtgccatgactgggttgatcaaaaaacacgaggcagtatcccagctttgctcaaaaacacaggcctcactccaggaatctctggaaaagcacttttcagaaagtatgcaagaattccaggagtggtttctgggcgcgaaggccgcggccaaggagtcatctgatagaacgggtgactcaaaggtgctagaggccaagctacacgacctgcaaaacattctggactctgtctctgacgggcagtcgaagctggatgcagtgacccaggaaggccaaaccttgtacgcacacctgtctaagcagattgtcagctcaattcaggaacagatcacgaaggctaatgaagagttccaagcgttcctgaagcagtgcctgaaggacaagcaggcgttgcaagattgtgcttctgagctaggatcctttgaggatcagcatagaaaactgaacctgtggatacacgaaatggaggagcggttcaacaccgagaatttgggggagtctaagcagcatatccctgagaaaaagaacgaagtccataaggtcgagatgtttctcggagaactcctcgccgcacgggaaagcttagacaaactgtcccaaaggggacagctactgtcagaagagggccacggcgccggacaggaggggcgtctgtgcagccaattgctcacctctcaccaaaatctgcttcgcatgactaaagagaaactgaggtcttgccaagtggctttgcaggagcatgaggcacttgaggaggccttacagtcgatgtggttctgggtgaaggccatccaggatagactggcgtgtgccgaatccacattgggcagcaaggatacactagagaagcggttatcgcagatccaggacattctgctgatgaaaggagaaggggaggtcaaactgaacatggccatcggaaaaggggaacaagccctgcgctcaagcaataaggagggtcaacgagtaatccagacacagctggaaactctcaaggaggtttgggctgacatcatgagttctagcgtacatgcccagagtaccctagagtccgtgatctcccagtggaatgactatgtggagcggaagaatcagcttgaacagtggatggaatccgtcgatcagaagattgagcaccctctccagccgcagcctggcttgaaggagaagtttgtcctccttgatcatctccagtcaatacttagcgaagctgaagaccatacacgagccctgcaccggctcatcgctaagagtagggaactgtacgaaaagaccgaagacgaatcatttaaggacacagcccaggaggagctcaagacccagttcaacgacattatgacagtggcgaaagagaagatgcgaaaagtcgaagagattgtgaaagatcacctgatgtacctcgacgcggttcacgaatttaccgactggctacatagcgctaaagaagagcttcatcgctggtccgatatgtccggcgattcttctgccacacagaaaaaattatcaaaaataaaggagttaattgattccagggaaataggagccagccgactatccagagtggagtctcttgcacctgaggtgaaacagaacacaactgcaagcggatgcgagctgatgcataccgaaatgcaggcactgcgggccgattggaaacaatgggaggactcagtattccagacacagagctgtctcgagaatttggtgagtcagatggccctcagcgagcaagaattttcaggtcaggtcgctcagctggaacaagctctcgaacaattctccgctctcttgaagacatgggcccagcagcttacgcttctcgagggaaaaaataccgacgaggagattgtggaatgctggcataaaggacaggaaatcctcgatgctttacaaaaggcagaaccaaggaccgaggatctgaagagccaactgaacgaactgtgtcggttctccagggatttgtcaacctacagcggcaaggtgtcagggctgatcaaggaatataattgcctctgcttgcaggcctccaaaggctgccagaataaggagcagatacttcagcagaggtttaggaaagcgttccgagacttccaacagtggctggtaaatgcaaaaattaccactgcgaaatgctttgacattcctcagaacatatccgaagtaagcacctcactgcaaaagatccaggagtttctctcagaaagcgagaacgggcagcacaagctgaatatgatgctgtccaaaggtgagttactgtctacactgttaaccaaggaaaaggctaaggggattcaagccaaagtgaccgccgccaaagaagattggaagaattttcattcaaatctgcaccagaaggaatctgctcttgagaatctgaaaattcagatgaaggatttcgaagtgtccgccgaacccatacaggactggctttccaagacggaaaaaatggtgcatgaaagcagcaatagactctacgacctgcccgcgaaaagacgggagcaacagaagttgcaaagcgtactcgaagaaatacactgctatgagcctcagcttaatcggctcaaggaaaaagctcaacagctgtgggaggggcaagccgccagcaagtccttcagacatcgtgtatcccaattaagttcccaatatctcgcgttgtctaacctcacaaaggaaaaagtctcgaggttggaccgcatcgtggcagagcacaatcagttttccctcggcataaaggagctgcaggactggatgacagatgcgatacatatgctcgactcatactgtcatccaacatctgataagtcagttcttgactcgaggaccctcaaactggaggcactcctgtctgtaaagcaggagaaagagattcagatgaagatgatcgttacccgaggggagtcagtgttgcagaatacttcccctgagggcattcccacgattcagcagcagctgcaatccgtaaaagatatgtgggcatcccttctaagtgctggcattcggtgtaagtcacagctcgagggagcattatccaagtggactagttatcaggatggggttcgacagttcagcggatggatggatagcatggaagccaacctcaatgagagcgagagacagcacgcagaacttagagataaaactaccatgctggggaaggctaagctgctgaacgaagaggtactgagctacagcagtctgcttgaaacgattgaggtgaagggcgcaggcatgacggaacactacgtcacccagcttgaactgcaggacctgcaggagcgctaccgagccatacaggagcgggcgaaagaagcagtcactaagagcgaaaaactggtgcgccttcatcaagaatatcagcgtgatctgaaagctttcgaggtctggttggggcaggaacaagagaagttggaccagtacagtgtactcgaaggggacgcccacacacacgaaacaacactgcgcgatctccaggagctgcaggtgcattgcgccgagggccaggcactgctaaactccgtcctgcacacacgggaagatgtgattccgagcggtattccacaggctgaagacagggccctcgagtcactcagacaggattggcaggcttaccagcacagattatcagaaaccaggacccagttcaataacgtggttaataagctccggttaatggaacagaaattccagcaggtcgacgagtggctgaagaccgctgaagagaaagtgagccctagaaccagacgccagtccaatagagccaccaaggagatacagctccaccagatgaaaaaatggcacgaagaggttacggcatatagggatgaagtggaggaggtcggggcaagggcccaggagatattagacgaatctcatgtcaactcccggatggggtgccaggccactcagctaacatcccggtatcaggctctcctcctgcaagtgttggaacagataaagtttctggaggaggaaatccagtcactggaggaatcagagtcttccctcagctcatactcagattggtacggttctactcacaaaaactttaagaatgttgcgacaaaaatcgacaaagtcgatacagtgatgatgggcaagaagctaaagacattggaggtgctgttgaaggatatggaaaagggacatagcctgctcaagagtgcacgcgagaagggagagcgggcggtgaaatatctggaagaaggcgaggccgaaagactgcgtaaggaaattcacgatcacatggagcagctgaaggagctcacttctaccgtcagaaaggagcacatgacactagagaaaggactgcacctcgctaaggagttctccgacaagtgtaaagcgctgacccagtggatcgctgagtaccaggagatcttgcatgtgcctgaagagccaaagatggagctgtatgaaaagaaagctcaattgtccaagtataagtcattgcaacagacagtactcagccacgaaccctcagtcaaatcagttcgcgaaaaaggcgaagcgctactcgagttggtgcaggatgtaacactgaaagacaaaattgaccagctccagtccgattaccaagatttatgcagcatcggcaaggagcatgtgtttagcctcgaagccaaagtcaaggaccacgaggattacaacagcgaattacaggaagtagaaaagtggttgctccaaatgtccggaaggcttgtggcacccgatttactcgaaactagctcgctcgaaacaattactcagcagctcgcacatcacaaggcaatgatggaggaaatcgctggctttgaggaccggctcaacaatctacagatgaaaggggatacattgatcggccagtgcgccgaccacttacaagccaagctcaaacagaacgtgcacgcccatctgcaggggacaaaagacagctattctgcaatctgctcaactgcacagagaatgtatcagagcctcgaacacgagctgcagaagcatgtaagcaggcaggacacccttcagcaatgccaggcatggctgtctgcagtgcagcctgatttagagccttcacctcaaccgcccttgagtagagctgaagctattaaacaggtaaagcatttccgcgcattacaggagcaagccaggacgtacttagatctcttatgttcaatgtgcgatttatcaaatgcgtccgttaagaccaccgctaaggatattcaacagacagaacagactatcgagcagaagctggtccaggcgcagaatttgacgcagggctgggaagagattaagcatttaaagtccgagctttggatctatctgcaagacgcagaccagcagctgcaaaacatgaaaaggcgccatagcgagcttgaattgaatatcgcacagaatatggtgtcccaggttaaagattttgtgaagaagctgcaatccaagcaggccagcgtcaacaccatcatcgaaaaggttaataagttgacaaagaaagaagaatccccagagcataaggagatcaaccatctcaacgaccagtggctggatctgtgccgccaaagcaataacctgtgcctgcagcgagaagaagacttgcaacgcactcgggactaccatgattgtatgaacgtcgtcgaggtcttcctagagaagtttactaccgaatgggataacctcgcaagatcagacgcagaaagtaccgccgtccacctggaagccctcaagaagctggcacttgccctgcaggagagaaagtacgcaatcgaggatcttaaagaccagaaacagaaaatgatcgagcatctgaaccttgatgacaaggagcttgtgaaagagcagaccagtcacctggagcaacggtggtttcagcttgaggatctgatcaaacgaaagattcaggtctctgtgacaaacttggaggaactgaatgttgtccagtcaaggtttcaagagctgatggaatgggccgaggaacagcaaccaaacatagctgaggcattgaagcagtcacctccaccagacatggcgcagaatctgcttatggatcaccttgccatctgctctgaactggaggcgaaacagatgctgctgaagagccttatcaaagatgcagacagagtgatggctgacctggggctgaacgagaggcaggtcatacaaaaggcgttgtctgacgcgcagtctcatgtcaattgcctgagtgatctggtcgggcagcggaggaagtatctcaacaaggccctgagcgaaaaaacacagttcctgatggctgtgtttcaggcgacttcgcagatacagcagcacgagcggaaaattatgtttagggaacacatttgcttgctcccggatgacgtgagcaagcaggtgaagacatgcaagtccgcccaggcttcgcttaaaacttatcagaatgaagtaactgggttatgggcccagggacgggagctgatgaaggaagttacagaacaagagaagtccgaggtgctgggaaagctgcaggagctgcagtcagtttacgacagtgttctacaaaagtgctcacaccgtttacaggagctcgagaagaacctggtatctaggaagcactttaaggaagacttcgataaggcttgccactggctgaagcaggccgatattgtgacgtttcccgaaattaaccttatgaacgagagctccgagctccacactcagctggctaagtaccagaacatactggaacagtcccccgagtacgagaacctcttactgacacttcaaaggaccggccagacgatcctgccgagtctgaacgaggttgatcactcctacctgtccgaaaagctgaacgccttgcctcgtcaatttaacgtgattgtggccttagctaaagacaagttttacaaggtgcaagaagcaatcctcgcccgaaaagagtatgcctccctcattgaactcacaacacagagcctctctgagttagaagcacaattcctccgcatgagcaaagtgccaacagacctggccgtggaggaagctctgtctttacaagacggctgccgggctatccttgacgaagtcgcaggcttaggggaggccgtggacgagctcaatcagaagaaagaaggattcagaagtactgggcagccttggcagccagacaaaatgctgcatttagtaacactctaccaccgactgaagcggcagaccgagcagagagtaagtctactcgaggacaccaccagtgcataccaggagcacgagaagatgtgccagcagcttgaaaggcagctgaagtctgtgaaggaggaacagtcaaaggtgaacgaggaaacccttccagccgaagagaagctgaagatgtatcactcactggcaggttctctccaggactccgggattgtcctcaaacgggtgactatacacttagaggacctagcccctcacctggacccactcgcttatgagaaggcccgccaccagatccaaagctggcaaggagagctgaaactgttgacttctgccatcggcgaaacggtcaccgaatgcgaatctaggatggttcagtccatcgatttccagactgagatgtccaggagcttagactggctgcgccgcgtgaaagctgaactttctgggccagtgtaccttgatttaaacctgcaggatattcaggaggagataagaaagatccaaattcatcaggaggaagtacagtcttctctgagaatcatgaatgctctttctcataaagaaaaggaaaaattcactaaggcaaaagagcttatcagcgcagacttggagcactccctcgctgagctgtccgaactggatggcgacattcaggaagctctgcgcaccagacaggcgacactaaccgagatatactcacaatgtcagaggtactatcaggtcttccaagctgcaaacgactggctcgaagacgcccaggaactcctacagctggctgggaacggcctagacgtagagagcgccgaggagaatctaaagtcacacatggagtttttctccaccgaagatcaatttcattctaacttggaagaactgcatagccttgtagccactttggaccccctcatcaagcctacagggaaggaagatctggaacaaaaagtagcaagccttgaattgaggtcacagcggatgagtcgcgattcaggcgcccaggtcgaccttctccaaaggtgtacagcccagtggcacgattaccaaaaggctcgggaagaggttatagagctcatgaacgacaccgagaagaagctcagcgaattctctctccttaagacctctagctctcatgaagctgaggagaagctaagcgagcacaaggcgctggtctccgtggtgaattccttccacgagaagatagtagcactggaagagaaggcttctcagttagagaagacagggaacgacgccagtaaagcaacactaagccgctcaatgactactgtgtggcagagatggaccaggctgcgagcagtcgctcaggatcaggaaaagatcctagaagatgcggtggacgaatggacagggtttaataataaagtcaagaaggccacagaaatgatcgaccaactccaggacaaactccctgggtcgagtgccgagaaagcctctaaggctgagctgctcacacttttggaatatcacgatacgtttgttttggagctagaacaacaacagagtgcccttgggatgctacgtcagcagacactctccatgctgcaggatggcgctgcgcctacccccggcgaggaaccccccctaatgcaggaaatcaccgccatgcaggaccgctgcctgaacatgcaggagaaagtcaaaaccaacggcaagctggtcaagcaggaactcaaggaccgcgagatggtagagacacaaatcaactctgtgaaatgctgggtgcaagagaccaaagagtacctgggtaaccccacaatcgagatagacgctcagctggaagaactccaaatcctcctaaccgaagctactaaccaccggcaaaatatcgaaaagatggctgaggagcagaaagaaaaatatctgggactatacacaattcttcccagcgagctgagtcttcaattggccgaggtcgccctcgatctaaagatccgggaccagattcaagacaaaatcaaagaggtggagcaatccaaggcaacctcacaggaactgtcacgccagatccagaaacttgctaaggacctaacaaccatcctgacaaaactcaaggctaagacagacaacgtagtacaggcgaagacagaccagaaggtgcttggcgaggagctggacggctgcaactccaagctgatggagctagacgccgccgttcagaagttcctggaacagaacggccagctcggtaaacccctcgctaagaagataggcaaattgaccgagctccaccagcaaactatcaggcaggccgagaatcggctatcgaaacttaatcaggctgctagtcacctcgaagagtacaacgaaatgttggaactgatcctgaagtggatagagaaggccaaagtactcgcccatgggacaattgcctggaatagtgcatcgcaattgcgagaacagtatatactgcaccaaactttgctcgaagaatcgaaggaaatagattctgaactggaggccatgaccgagaagctgcagtatctgacaagtgtgtactgtaccgagaaaatgtcacagcaggtggctgagcttgggcgggagacagaggagttgagacagatgataaagattcggctccagaatttacaggacgccgccaaagatatgaagaaattcgaagcagagttgaagaaattgcaggccgccctagagcaggcccaggccacattgacctcacccgaagtcggacgactgagcctgaaagaacagctgtcacataggcagcatttgctgtcagagatggaaagtctcaagcccaaggtgcaggcggtgcagctgtgtcagtcagccttgaggatacccgaagacgtggtggccagcctgccactatgtcacgcggcgctgcgcctgcaagaggaagcatcaaggctgcaacacacagcaatacaacaatgcaacatcatgcaggaggccgtcgtgcaatacgaacagtacgaacaggagatgaaacatctccagcagcttattgagggcgcccacagggagatcgaggacaaacccgtggcgacctctaacattcaagaactgcaggcccagatatccaggcacgaggaactcgctcagaagattaaaggttatcaggagcagattgccagccttaattccaagtgcaaaatgttgaccatgaaggcgaaacatgctacaatgctgctaactgttacagaggtggagggtctcgccgaagggaccgaagatttggatggggagctgttacccaccccgagtgctcaccctagcgtggtgatgatgacagccgggagatgccatacactgctgagcccggtgacagaggagtccggagaggaaggaactaacagcgaaattagctctcctcccgcatgtagatcaccttcacctgttgcaaacaccgatgcttctgtgaatcaggatatcgcttactaccaggccctgtccgccgaaaggttgcagacagacgcagcgaagatacaccccagcacctcagcatctcaagagttctacgagccaggcttggagccttcagcaacagctaaactgggtgacctgcagcggagctgggaaactctcaaaaacgtgatttcagaaaagcagagaactctctatgaagctctggagcgccaacaaaaataccaagactccctgcagtcaattagcactaagatggaggccattgaactgaagctgtccgaaagcccagagcccgggcggagtccagagagccagatggcggaacatcaggctctcatggacgaaattctcatgcttcaggacgaaataaacgagttacagagctccctggccgaggagctggtcagtgagtcttgtgaggcggatcccgccgagcagctggccttgcaatccactcttaccgtcctggcagaacgtatgtcgacaattcgaatgaaggcatccggtaaacgacagctcctggaagaaaagctgaacgaccagttggaagaacagcggcaggagcaggcactccaacggtatcgctgtgaggcagatgagttagactcttggctgctctcaactaaagctaccctggacactgccctgagtccccctaaagagcctatggacatggaagctcagcttatggactgtcagaatatgctggtggagattgagcaaaaggttgttgcattgagtgaacttagcgtgcataatgaaaacctcctcctggagggtaaggcacacacaaaggacgaggcagagcagctcgctgggaaattgcggaggctcaaagggtccctgctggagctacagagagcactgcacgacaagcagttaaatatgcagggcacagcccaggaaaaagaggagtccgatgtggatcttaccgccactcagagtccgggggttcaggagtggcttgcccaggctagaaccacctggacacagcaacgtcagtcctccttacaacagcagaaagagcttgagcaggagttggcagagcagaagagcctgcttcgcagcgtggctagtcggggggaagagattttgatccagcattcagccgcagaaacctccggcgacgccggtgagaaacctgacgtcctatcacaagaactgggcatggagggcgaaaaatcaagcgccgaggaccaaatgaggatgaagtgggaatctctgcatcaggagttcagcacgaagcagaaactgttgcagaacgttctcgaacaggagcaggagcaggtgctgtatagccgcccaaatcgcctgctgtctggagttccactttataaaggagatgtacccactcaggacaagtctgccgtaacctccctcctagatgggttgaaccaggctttcgaagaggtgtcctctcagtcaggaggggcaaagagacaaagtatccacttggagcagaaactatatgatggggtgtccgcgaccagcacttggctcgacgacgttgaggaaaggctgtttgtcgccaccgctctgctcccagaagagaccgaaacatgtctctttaaccaggaaattctggccaaagatataaaagaaatgagtgaggagatggataaaaacaaaaacttattctcccaagccttccctgagaacggcgataaccgggacgtgattgaagatactctcggatgcctcttggggaggctgtcgctgctggactcagtggtcaatcagcgatgccatcagatgaaagagaggctccaacagattttgaacttccagaacgatctgaaggtgttgtttactagtctggcggacaataaatatattatcctccagaagctggccaacgtcttcgagcagcctgttgcagagcagatcgaggccatccagcaagcagaagacggcctcaaggagtttgacgccggcatcatagagctgaagcgtcgcggcgataagctgcaggtggagcagccatctatgcaggaactgtccaagctccaggatatgtacgacgaacttatgatgatcattgggagccggaggagtggtctaaatcagaacctcaccctgaaaagccagtacgaaagggcactacaggatttggccgacctcttagagactggacaggagaaaatggccggggaccagaaaatcattgtgagctccaaggaagagattcaacagctcttggacaagcacaaggagtacttccagggattagaatcgcacatgattctgacggaaactctgtttcgtaagatcatcagcttcgccgtgcaaaaggaaacacagttccatacagagttgatggcgcaggccagtgcagtgttgaaacgagcccataagaggggcgtggagctagaatacatcctggaaacatggtcccacctggacgaggatcagcaagagctcagtagacagctggaggtagtcgaatcttccatcccctctgttggtctcgtggaggagaacgaagaccgcctgattgacagaataaccctctatcagcacctcaagtcatctctaaacgagtaccagccaaagttgtaccaggttctggatgatggaaagcgcctcttaataagcatttcctgtagtgatttagaatctcagctgaaccagctgggagaatgttggctgagtaacacaaacaaaatgtcaaaggagcttcaccgacttgagacgattctcaaacactggacaagataccagtctgagtcagcggatctcatccactggttgcagtccgccaaggatagactggagttttggactcaacagtctgtgacagtgcctcaggagctggagatggtccgggatcacctgaacgcatttctcgagttcagcaaagaggtggacgcccagtcttctctgaaatcatctgtgctgagtacaggcaaccaacttctacgtctcaaaaaggtagacactgctaccctgcgcagcgagcttagccgaattgactcccagtggaccgacctgttgaccaacattcccgcggtgcaggagaaactccatcaactgcagatggacaagctgccaagccgtcacgctatttccgaagtgatgtcatggataagcctgatggagaacgttattcagaaggacgaagacaatatcaaaaacagcatcggttacaaggccattcacgaatacctgcagaaatataagggcttcaaaatagacataaactgtaagcagcttactgtcgattttgtcaaccagtccgttctccaaatttcctcccaggacgtagaatccaagaggtccgacaagacggactttgcggaacagcttggcgctatgaacaagtcctggcagatcctgcagggactggtgaccgagaagatccagctcctggaaggactgctggagagctggagcgagtacgagaataatgtccagtgtctgaaaacatggttcgagacccaggagaaaagactcaagcagcagcatcgcattggagaccaggccagcgtgcagaacgcattgaaagactgccaggatctggaagatctgatcaaagccaaagaaaaggaggtggagaagatagagcaaaatggccttgcgctgatacagaataaaaaggaggacgtgagttctatcgtgatgagtactttgagagagctgggccagacctgggcaaatctggatcacatggtgggccagctcaagatcctcctgaaatccgtgctggaccaatggtccagtcacaaggtcgctttcgataagattaactcatacctgatggaagcccggtatagcctgtcaaggtttagactcctgactggatctctggaggctgttcaagttcaggttgacaacctccagaacctacaggacgatcttgagaaacaagaaagatcactgcagaagtttggctctattaccaaccagctcctgaaagaatgccatccaccagtcactgaaaccctgacaaacacactgaaggaagtgaacatgcgctggaacaatctacttgaggagatcgccgagcagctccagagctccaaggcccttctacaattgtggcagagatataaggactatagcaaacaatgcgcgtccaccgtgcagcagcaggaggaccgtaccaatgaacttttgaaagcagcgacgaataaggacatagcagatgatgaggtagccacgtggatccaggactgcaatgatctcctgaagggcctgggcaccgtgaaagactcactgttctttctacatgagctcggagagcaactgaagcagcaggtagatgcaagcgcggcaagcgcaatccagtcagaccagctgagtctgagccagcatctctgcgccctcgagcaggcactgtgcaaacaacagacgtcgctccaggctggagtgctagactatgagactttcgccaagtctctagaggccttggaggcatggatcgtggaggccgaagagatcctgcagggacaggatccttctcacagttctgatctgagtaccatccaagagaggatggaggagctaaagggtcagatgctcaaattttcctccatggcacctgatctggacagactgaacgagcttggatacagactacccttgaatgacaaggaaatcaaacgcatgcagaatcttaaccggcactggagcctgatttcctcccagacaaccgagaggttctcaaagttgcagagtttcctcctgcagcaccagacattcttagaaaaatgcgaaacttggatggagtttctggtccagacggagcagaagctcgccgtggagatctcgggcaattatcagcacttattagagcagcagcgagcacacgagcttttccaggccgaaatgttctccagacaacaaatcctgcacagcataattatagatgggcaacggctactggagcagggtcaagtggatgacagagatgagttcaatttgaagctcacgctactgtccaatcaatggcaaggtgtgattcgccgagcacaacagcggcggggtataatcgactctcagatacggcaatggcagaggtatcgagagatggctgaaaagctgagaaaatggctggttgaagtgtcttatctgccaatgtctgggcttgggtccgtaccaatccccctgcagcaggcccgtaccttgttcgatgaggttcaattcaaagagaaggtgtttttgagacaacagggttcatatatcctaacagttgaggccgggaagcagctgctgttaagtgccgacagcggcgccgaagccgctctgcaggccgaactggccgaaattcaagagaagtggaagtccgcctctatgagactcgaagagcagaagaaaaaactggcctttctgctgaaggactgggaaaaatgcgagaaaggaattgccgactcgctagagaagctgcggaccttcaaaaaaaaactgtctcagtccctgccagaccaccatgaggagctgcacgctgagcagatgagatgtaaggagctggaaaacgccgtgggctcctggactgacgacctgacccagctctccctgctgaaggacaccctgtctgcttacatatcagccgacgacatctccatcctcaatgagcgggtagagttacttcagaggcagtgggaagaactctgtcaccaattgtctttgaggaggcagcagatcggcgaacgcctgaacgaatgggccgtgtttagtgaaaagaacaaagagttgtgcgagtggttgacccagatggaaagcaaagtgagccaaaacggtgacattcttatcgaagaaatgatcgaaaagctgaagaaggattatcaggaagagattgcaatcgcacaagagaacaagattcaactgcagcaaatgggagaaagattggcaaaggcgtcccacgaatccaaggcttccgagatagaatataagttgggcaaggtaaacgatcgatggcagcatttgcttgatctcatagctgctcgggtcaaaaagttgaaggagacattggtggctgtacagcagcttgacaagaatatgtcctcactgcggacttggctcgcccatattgaatctgaactcgcgaagccaatagtctatgattcatgcaacagcgaggagatccagaggaaactgaacgaacagcaggaacttcagcgagacattgaaaagcattcgaccggcgtggcttcagtactgaacctttgcgaggtacttctgcatgattgcgatgcatgcgcaacagacgctgaatgtgattctatacagcaagccacccgcaacctggacaggcggtggcgaaacatctgtgccatgtctatggagcggaggcttaagattgaagagacctggcgcctatggcaaaagttcctggacgactactctcggtttgaggactggctcaagtcgtccgagaggaccgctgcttttccttcatcttccggtgtaatttatacagtggcgaaggaggagctaaaaaaatttgaagcatttcagagacaggtccatgaatgtctgacgcagctggaactgattaataagcagtaccggcggctggcccgcgaaaataggaccgatagtgcctgcagtctgaagcagatggtgcacgaaggcaaccagcggtgggacaatctgcagaagagagtgacttccatactgcgcagactcaagcattttatcggacaaagggaggaattcgagaccgccagagattccatactggtttggctgactgaaatggatttgcagctgactaatattgagcatttttcagaatgtgatgttcaggcaaagatcaagcaactcaaagcattccaacaggaaatcagcctgaaccacaacaagatagagcaaattattgcacagggtgagcagctgattgagaaaagtgagccacttgatgctgccatcattgaggaggaattggatgaattgcgcaggtactgccaggaggtgttcggccgcgttgagagataccacaagaaactcatcagactcccacttcctgatgatgagcacgatctgagtgaccgtgagttggaactggaagacagtgcggcattgagtgatctgcattggcacgacaggtcagcagacagtctactttctccacagccttctagtaatctgagcctgtctttggcgcagccactcagaagcgagcggtcggggcgcgacacccctgcttcagtggatagtattcccctggagtgggatcacgattacgatctgagtcgtgacctagagtccgccatgtctagagccctgccctcggaggatgaagagggtcaagatgataaagatttttatttgcgcggtgccgtcggactgtccggggaccacagcgccttggaatcccagatcagacaacttggaaaagccctagatgattccaggttccagatccaacaaactgagaacatcatccggtctaagacccccactggcccagagttagacacatcttacaagggctacatgaagctgttgggtgagtgtagttcctccatagatagtgtgaagcgcctcgagcacaaactcaaggaagaggaagaaagtcttcccggatttgttaatctccactctaccgagactcagactgcgggtgtgattgaccgctgggagctcctgcaagcccaagcactctctaaagagctgcgaatgaaacagaatctgcagaagtggcagcaattcaacagtgacctgaactctatctgggcttggttaggcgataccgaggaggagctcgagcaactccagaggttagagctgtcaaccgacatccaaaccatcgaactgcaaattaaaaaactaaaggagttacagaaggccgtagatcaccgaaaggcgataatactgagcatcaacctgtgcagcccagaattcacacaggcagactctaaggaaagcagggacctgcaggatcggctgagtcagatgaacgggagatgggatagagtttgtagtctcctagaggagtggcgcggcttgctgcaggacgctttaatgcaatgccagggtttccatgaaatgtcacacggtttgctgctaatgctggaaaatatcgaccggaggaagaatgagatcgtgcctatcgactcaaatctggacgctgagatacttcaggatcaccacaaacagttaatgcagattaagcatgagcttttggagtctcagttgcgcgttgctagtctgcaagacatgagctgccagcttctcgtgaatgcggaggggacagattgccttgaggccaaagagaaggtgcacgtgatcgggaaccgcctgaaactgttgttgaaggaggtaagcaggcacatcaaagaacttgagaaacttctcgacgtctcttcgagtcagcaggacctttcgagctggagctcagctgatgaacttgacacatctggatcggtctcccctactagcggcagatccactcctaacagacagaagacccccagggggaaatgctctctctcccagcccggcccctccgtgagttccccccattctcgcagcactaaggggggatctgattcttcattatctgaacccgggccaggcaggtctggcaggggcttcctgtttcgggtgctgagagcagcactgccactgcagctattgttgctgcttctgattgggctcgcgtgtctggtgccaatgtcggaagaggactatagttgcgcactgtcaaacaattttgcacgcagtttccaccccatgctgcgatacacaaacgggcctccaccgctctag

SEQ ID NO: 257459 - DNA, 26394 bp, Artificial Sequence
  derived and/or modified sequence
atggccaccagcagaggagccagccgctgcccccgggacatcgccaacgtgatgcagaggctgcaggatgagcaggagatcgtgcagaagaggaccttcaccaagtggatcaacagccacctggccaagaggaagccacccatggtggtggatgacctgtttgaggacatgaaggatggagtgaagctgctggccctgctggaggtgctgagcggccagaagctgccctgtgagcagggccgcaggatgaagagaattcatgctgtggccaacatcggcacagccctgaagttcctggagggcaggaagatcaagctggtgaacatcaacagcacagacattgctgatggccggcccagcatcgtgctgggcctgatgtggaccatcatcctgtacttccagatcgaggagctgaccagcaacctgccccagctgcagagcctgagcagcagcgccagctctgtggacagcatcgtgtcctctgagacccccagcccccccagcaagaggaaggtgaccaccaagatccagggcaatgccaagaaggccctgctgaagtgggtgcagtacacagctgggaagcagacaggcatcgaggtgaaggactttgggaagtcctggaggtctggagtggccttccacagcgtcatccacgccatccggcctgagctggtggacctggagaccgtgaagggccgcagcaaccgggagaacctggaggatgccttcaccatcgccgagacagagctgggcatcccccggctgctggaccctgaagatgtggatgtggacaagccagatgagaagagcatcatgacctacgtggcccagttcctgaagcactacccagacatccacaatgccagcacagatggccaggaggatgatgagatcctgcccggcttccccagctttgccaacagcgtgcagaacttcaagagagaagatagagtcatcttcaaggagatgaaggtgtggattgagcagtttgagcgggacctgacccgggcccagatggtggagagcaacctgcaggacaagtaccagagcttcaagcacttccgggtgcagtatgagatgaagaggaagcagatcgagcacctgatccagcccctgcacagagatggcaagctgagcctggaccaggccctggtgaagcagagctgggacagagtgaccagccggctgtttgactggcacatccagctggacaagagcctgcctgcccccctgggcaccatcggggcctggctgtacagagctgaggtggccctgcgggaggagatcaccgtgcagcaggtgcatgaggagacagccaacaccatccagaggaagctggagcagcacaaggacctgctgcagaacacagatgcccacaagagggccttccacgagatctaccgcaccaggtctgtgaatggcatccctgtgcccccagaccagctggaggacatggccgagcgcttccactttgtgagcagcaccagcgagctgcacctgatgaagatggagttcctggagctgaagtaccgcctgctgagcctgctggtgctggccgagagcaagctgaagtcctggatcatcaagtatggccggcgggagagcgtggagcagctgctgcagaactacgtgtccttcatcgagaacagcaagttctttgagcagtatgaggtgacctaccagatcctgaagcagacagctgagatgtatgtgaaggcagatggctctgtggaggaggctgaaaatgtgatgaagttcatgaatgagaccacagcccagtggaggaacctgtctgtggaggtgcgctctgtgcgctccatgctggaggaggtgatcagcaactgggacagatatggcaacacagtggccagcctgcaggcctggctggaggatgctgagaagatgctgaaccagagtgaaaatgccaagaaggacttcttcaggaacctgccccactggatccagcagcacacagccatgaatgatgctggcaacttcctgattgagacctgtgatgagatggtgtcccgggacctgaagcagcagctgctgctgctgaatggccgctggagggagctgttcatggaggtgaagcagtatgcccaggctgatgagatggacaggatgaagaaggagtacacagactgtgtggtgaccctgagcgcctttgccacagaggcccacaagaagctgtctgagcccctggaggtgtccttcatgaatgtgaagctgctgatccaggacctggaggacatcgagcagagggtgcctgtgatggatgcccagtacaagatcatcaccaagacagcccacctgatcaccaaggagagcccccaggaggagggcaaggagatgtttgccaccatgagcaagctgaaggagcagctgaccaaggtgaaggagtgctacagccccctgctgtatgagagccagcagctgctgatccccctggaggagctggagaagcagatgaccagcttctatgacagcctgggcaagatcaatgagatcatcaccgtgctggagcgggaggcccagagcagcgccctcttcaagcagaagcaccaggagctgctggcctgccaggagaactgcaagaagaccctgaccctcatcgagaagggcagccagagcgtgcagaagtttgtgaccctgagcaatgtgctgaagcactttgaccagacccggctgcagaggcagattgctgacatccacgtggccttccagagcatggtgaagaagacaggagactggaagaagcacgtggagaccaacagccggctgatgaagaagtttgaggagagcagagctgagctggagaaggtgctgagaattgcccaggagggcctggaggagaagggggaccctgaggagctgctgcggcggcacacagagttcttcagccagctggaccagagggtgctgaatgccttcctgaaggcctgtgatgagctgacagacatcctgcctgagcaggagcagcagggcctgcaggaggccgtgaggaagctgcacaagcagtggaaggacctgcagggcgaggccccctaccacctgctgcacctgaagattgatgtggagaagaaccgcttcctggcctctgtggaggagtgcaggacagagctggaccgggagaccaagctgatgccccaggagggcagcgagaagatcatcaaggagcacagggtcttcttcagtgacaagggcccccaccacctgtgtgagaagaggctgcagctgattgaggagctgtgtgtgaagctgcctgtgcgggaccctgtgcgggacaccccaggcacctgccacgtgaccctgaaggagctgcgggccgccatcgacagcacctacaggaagctgatggaggaccctgacaagtggaaggactacaccagccgcttcagcgagttcagctcctggatcagcaccaatgagacccagctgaagggcatcaagggggaggccatcgacacagccaaccacggggaggtgaagagagctgtggaggagatcagaaatggagtgaccaagagaggagagaccctgtcctggctgaagagccggctgaaggtgctgacagaggtgtccagtgaaaatgaggcccagaagcagggagatgagctggccaagctgagcagcagcttcaaggccctggtgaccctgctgtctgaggtggagaagatgctgagcaactttggagactgtgtgcagtacaaggagatcgtgaagaacagcctggaggagctgatcagcggcagcaaggaggtgcaggagcaggccgagaagatcctggacacagagaacctgtttgaggcccagcagctgctgctgcaccaccagcagaagaccaagaggatcagcgccaagaagagagatgtgcagcagcagatcgcccaggcccagcagggcgagggcggcctgcctgaccggggccacgaggagctgaggaagctggagagcaccctggatggcctggagaggagccgggagcggcaggagcggcgcatccaggtgaccctgaggaagtgggagagatttgagaccaacaaggagaccgtggtgcgctacctgttccagacaggcagcagccatgagcgcttcctgtccttcagcagcctggagagcctgagcagcgagctggagcagaccaaggagttcagcaagaggacagagagcattgctgtgcaggccgagaacctggtgaaggaggccagcgagatccccctgggcccccagaacaagcagctgctgcagcagcaggccaagagcatcaaggagcaggtgaagaagctggaggacaccctggaggaggacatcaagaccatggagatggtgaagaccaagtgggaccacttcggcagcaactttgagaccctgtctgtgtggatcacagagaaggagaaggagctgaatgccctggagaccagcagcagcgccatggacatgcagatcagccagatcaaggtgaccatccaggagattgagagcaagctgagcagcatcgtgggcctggaggaggaggcccagagctttgcccagtttgtgaccaccggggagagcgcccgcatcaaggccaagctgacccagatccgccgctacggggaggagctgcgggagcacgcccagtgcctggagggcaccatcctgggccacctgagccagcagcagaagtttgaggagaacctgaggaagatccagcagagcgtgtctgaatttgaggacaagctggccgtgcccatcaagatctgcagcagcgccacagagacctacaaggtgctgcaggagcacatggacctgtgccaggccctggagagcctgagcagcgccatcacagccttcagcgccagcgccaggaaggtggtgaacagagacagctgtgtgcaggaggccgccgccctgcagcagcagtatgaggacatcctgcggcgggccaaggagcggcagacagccctggagaacctgctggcccactggcagaggctggagaaggagctgagcagcttcctgacctggctggagcggggggaggccaaggccagcagccctgagatggacatctctgctgacagagtgaaggtggagggggagctgcagctgatccaggccctgcagaatgaggtggtgtcccaggccagcttctacagcaagctgctgcagctgaaggagagcctcttctctgtggccagcaaggatgatgtgaagatgatgaagctgcacctggagcagctggatgagcgctggagggacctgccccagatcatcaacaagaggatcaacttcctgcagagcgtggtggccgagcaccagcagtttgatgagctgctgctgtccttctctgtgtggatcaagctgttcctgtctgagctgcagaccaccagcgagatcagcatcatggaccaccaggtggccctgaccaggcacaaggaccacgccgctgaggtggagagcaagaagggggagctgcagagcctgcagggccacctggccaagctgggcagcctgggccgggcagaggacctgcacctgctgcagggcaaggccgaggactgcttccagctgtttgaggaggccagccaggtggtggagcggcggcagctggccctgagccacctggccgagttcctgcagagccacgccagcctgagcggcatcctgcggcagctgcggcagacagtggaggccaccaacagcatgaacaagaatgaaagtgacctgattgagaaggacctgaatgatgccctgcagaatgccaaggccctggagagcgctgctgtgtccctggatggcatcctgagcaaggcccagtaccacctgaagattggcagcagcgagcagaggaccagctgccgggccacagctgaccagctgtgtggggaggtggagcgcatccagaacctgctgggcaccaagcagagcgaggctgatgccctggccgtgctgaagaaggccttccaggaccagaaggaggagctgctgaagagcattgaagatattgaggagaggacagacaaggagcggctgaaggagcccacccggcaggccctgcagcagaggctgcgggtcttcaaccagctggaggatgagctgaacagccatgaacatgagctgtgctggctgaaggacaaggccaagcagatcgcccagaaggatgtggcctttgcccctgaggtggaccgggagatcaaccggctggaggtgacctgggatgacaccaagaggctcatccacgagaaccagggccagtgctgcggcctgattgacctgatgagggagtaccagaacctgaagtctgctgtgtccaaggtgctggagaatgccagctctgtgattgtgaccaggaccaccatcaaggaccaggaggacctgaagtgggccttcagcaagcatgaaacagccaagaacaagatgaactacaagcagaaggacctggacaacttcaccagcaagggcaagcacctgctgtctgagctgaagaagatccacagcagtgacttcagcctggtgaagacagacatggagagcacagtggacaagtggctggatgtgtctgagaagctggaggagaacatggaccggctgcgggtgtccctgagcatctgggatgatgtgctgagcaccagagatgaaattgagggctggagcaacaactgtgtgccccagatggccgagaacatcagcaacctggacaaccacctgcgggcagaggagctgctgaaggagtttgagagcgaggtgaagaacaaggccctgcggctggaggagctgcacagcaaggtgaatgacctgaaggagctgaccaagaacctggagaccccaccagacctgcagttcattgaagctgacctgatgcagaagctggagcacgccaaggagatcacagaggtggccaagggcaccctgaaggacttcaccgcccagagcacccaggtggagaagttcatcaatgacatcaccacctggttcaccaaggtggaggagagcctgatgaactgtgcccagaatgagacctgtgaggccctgaagaaggtgaaggacatccagaaggagctgcagagccagcagagcaacatcagcagcacccaggagaacctgaacagcctgtgcaggaagtaccacagcgctgagctggagagcctgggccgggccatgacaggcctcatcaagaagcatgaagctgtgtcccagctgtgcagcaagacccaggccagcctgcaggagagcctggagaagcacttcagcgagagcatgcaggagttccaggagtggttcctgggcgccaaggccgccgccaaggagagcagtgacagaactggagacagcaaggtgctggaggccaagctgcatgacctgcagaacatcctggacagcgtgtctgatggccagagcaagctggatgctgtgacccaggagggccagaccctgtatgcccacctgagcaagcagatcgtgagcagcatccaggagcagatcaccaaggccaatgaggagttccaggccttcctgaagcagtgcctgaaggacaagcaggccctgcaggactgtgccagcgagctgggcagctttgaggaccagcacaggaagctgaacctgtggatccacgagatggaggagcgcttcaacacagagaacctgggggagagcaagcagcacatccctgagaagaagaatgaggtgcacaaggtggagatgttcctgggggagctgctggccgcccgggagagcctggacaagctgagccagaggggccagctgctgtctgaggagggccatggagctggccaggagggccgcctgtgcagccagctgctgaccagccaccagaacctgctgaggatgaccaaggagaagctgcggagctgccaggtggccctgcaggagcacgaggccctggaggaggccctgcagagcatgtggttctgggtgaaggccatccaggaccggctggcctgtgccgagagcaccctgggcagcaaggacaccctggagaagaggctgagccagatccaggacatcctgctgatgaagggggagggggaggtgaagctgaacatggccatcggcaaaggagagcaggccctgcggagcagcaacaaggagggccagagggtcatccagacccagctggagaccctgaaggaggtgtgggccgacatcatgagcagctctgtgcacgcccagagcaccctggagagcgtcatcagccagtggaatgactatgtggagaggaagaaccagctggagcagtggatggagagcgtggaccagaagattgagcaccccctgcagccccagcccggcctgaaggagaagtttgtgctgctggaccacctgcagagcatcctgtctgaggccgaggaccacacccgggccctgcacaggctcatcgccaagagccgggagctgtatgagaagacagaagatgagagcttcaaggacacagcccaggaggagctgaagacccagttcaatgacatcatgacagtggccaaggagaagatgaggaaggtggaggagatcgtgaaggaccacctgatgtacctggatgctgtgcatgagttcacagactggctgcacagcgccaaggaggagctgcaccgctggagcgacatgtctggggacagcagcgccacccagaagaagctgagcaagatcaaggagctgattgacagccgggagatcggggccagccggctgagccgggtggagagcctggcccctgaggtgaagcagaacaccacagccagcggctgtgagctgatgcacacagagatgcaggccctgcgggctgactggaagcagtgggaggacagcgtcttccagacccagagctgcctggagaacctggtgtcccagatggccctgtctgagcaggagttcagcggccaggtggcccagctggagcaggccctggagcagttcagcgccctgctgaagacctgggcccagcagctgaccctgctggagggcaagaacacagatgaggagatcgtggagtgctggcacaagggccaggagatcctggatgccctgcagaaggccgagcccaggacagaggacctgaagagccagctgaatgagctgtgccgcttcagccgggacctgagcacctacagcggcaaggtgtctggcctcatcaaggagtacaactgcctgtgcctgcaggccagcaagggctgccagaacaaggagcagatcctgcagcagcgcttcaggaaggccttccgggacttccagcagtggctggtgaatgccaagatcaccacagccaagtgctttgacatcccccagaacatcagcgaggtgtccaccagcctgcagaagatccaggagttcctgtctgagagtgaaaatggccagcacaagctgaacatgatgctgagcaaaggagagctgctgagcaccctgctgaccaaggagaaggccaagggcatccaggccaaggtgacagctgccaaggaggactggaagaacttccacagcaacctgcaccagaaggagagcgccctggagaacctgaagatccagatgaaggactttgaggtgtctgctgagcccatccaggactggctgagcaagacagagaagatggtgcatgagagcagcaaccggctgtatgacctgcctgccaagaggcgggagcagcagaagctgcagagcgtgctggaggagatccactgctatgagccccagctgaaccggctgaaggagaaggcccagcagctgtgggagggccaggccgccagcaagagcttccgccaccgggtgtcccagctgagcagccagtacctggccctgagcaacctgaccaaggagaaggtgtcccggctggaccgcatcgtggccgagcacaaccagttcagcctgggcatcaaggagctgcaggactggatgacagatgccatccacatgctggacagctactgccaccccaccagtgacaagtctgtgctggacagcaggaccctgaagctggaggccctgctgtctgtgaagcaggagaaggagatccagatgaagatgattgtgaccagaggagagagcgtgctgcagaacaccagccctgagggcatccccaccatccagcagcagctgcagagcgtgaaggacatgtgggccagcctgctgtctgctggcatccgctgcaagagccagctggagggcgccctgagcaagtggaccagctaccaggatggagtgcggcagttcagcggctggatggacagcatggaggccaacctgaatgaaagtgagcggcagcacgccgagctgcgggacaagaccaccatgctgggcaaggccaagctgctgaatgaggaggtgctgagctacagcagcctgctggagaccatcgaggtgaagggggccggcatgacagagcactacgtgacccagctggagctgcaggacctgcaggagcgctaccgggccatccaggagcgggccaaggaggccgtgaccaagtctgagaagctggtgcggctgcaccaggagtaccagagggacctgaaggcctttgaggtgtggctgggccaggagcaggagaagctggaccagtacagcgtgctggagggagatgcccacacccatgagaccaccctgcgggacctgcaggagctgcaggtgcactgtgccgagggccaggccctgctgaacagcgtgctgcacaccagagaagatgtgatccccagcggcatcccccaggccgaggaccgggccctggagagcctgcggcaggactggcaggcctaccagcaccggctgtctgagaccaggacccagttcaacaacgtggtgaacaagctgcggctgatggagcagaagttccagcaggtggatgagtggctgaagacagctgaggagaaggtgagccccaggacccggcggcagagcaacagagccaccaaggagatccagctgcaccagatgaagaagtggcatgaggaggtgacagcctacagagatgaggtggaggaggtgggcgcccgggcccaggagatcctggatgagagccacgtgaacagcaggatgggctgccaggccacccagctgaccagccgctaccaggccctgctgctgcaggtgctggagcagatcaagttcctggaggaggagatccagagcctggaggagagcgagagcagcctgagcagctacagcgactggtacggcagcacccacaagaacttcaagaatgtggccaccaagattgacaaggtggacacagtgatgatgggcaagaagctgaagaccctggaggtgctgctgaaggacatggagaagggccacagcctgctgaagagcgcccgggagaagggggagagagctgtgaagtacctggaggagggggaggccgagcggctgaggaaggagatccatgaccacatggagcagctgaaggagctgaccagcacagtgaggaaggagcacatgaccctggagaagggcctgcacctggccaaggagttcagtgacaagtgcaaggccctgacccagtggattgctgagtaccaggagatcctgcacgtgcctgaggagcccaagatggagctgtatgagaagaaggcccagctgagcaagtacaagagcctgcagcagacagtgctgagccatgagcccagcgtgaagtctgtgcgggagaagggggaggccctgctggagctggtgcaggatgtgaccctgaaggacaagattgaccagctgcagagcgactaccaggacctgtgcagcatcggcaaggagcacgtgttcagcctggaggccaaggtgaaggaccacgaggactacaacagcgagctgcaggaggtggagaagtggctgctgcagatgagcggccgcctggtggccccagacctgctggagaccagcagcctggagaccatcacccagcagctggcccaccacaaggccatgatggaggagattgctggctttgaagatcggctgaacaacctgcagatgaagggggacaccctgattggccagtgtgccgaccacctgcaggccaagctgaagcagaatgtgcacgcccacctgcagggcaccaaggacagctacagcgccatctgcagcacagcccagaggatgtaccagagcctggagcacgagctgcagaagcacgtgtcccggcaggacaccctgcagcagtgccaggcctggctgtctgctgtgcagcctgacctggagcccagcccccagccccccctgagcagagctgaggccatcaagcaggtgaagcacttccgggccctgcaggagcaggcccggacctacctggacctgctgtgcagcatgtgtgacctgagcaatgcctctgtgaagaccacagccaaggacatccagcagacagagcagaccatcgagcagaagctggtgcaggcccagaacctgacccagggctgggaggagatcaagcacctgaagtctgagctgtggatctacctgcaggatgctgaccagcagctgcagaacatgaagaggaggcacagcgagctggagctgaacatcgcccagaacatggtgtcccaggtgaaggactttgtgaagaagctgcagagcaagcaggcctctgtgaacaccatcatcgagaaggtgaacaagctgaccaagaaggaggagagccctgagcacaaggagatcaaccacctgaatgaccagtggctggacctgtgccggcagagcaacaacctgtgcctgcagcgggaggaggacctgcagaggacccgggactaccatgactgcatgaatgtggtggaggtgttcctggagaagttcaccacagagtgggacaacctggcccggagtgatgctgagagcacagctgtgcacctggaggccctgaagaagctggccctggccctgcaggagaggaaatatgccatcgaggacctgaaggaccagaagcagaagatgattgagcacctgaacctggatgacaaggagctggtgaaggagcagaccagccacctggagcagcgctggttccagctggaggacctgatcaagaggaagatccaggtgtctgtgaccaacctggaggagctgaatgtggtgcagagccgcttccaggagctgatggagtgggccgaggagcagcagcccaacattgctgaggccctgaagcagagccccccaccagacatggcccagaacctgctgatggaccacctggccatctgcagcgagctggaggccaagcagatgctgctgaagagcctcatcaaggatgctgacagagtgatggctgacctgggcctgaatgaaaggcaggtgatccagaaggccctgagtgatgcccagagccacgtgaactgcctgagtgacctggtgggccagaggaggaagtacctgaacaaggccctgtctgagaagacccagttcctgatggctgtgttccaggccaccagccagatccagcagcacgagaggaagatcatgttccgggagcacatctgcctgctgcctgatgatgtgtccaagcaggtgaagacctgcaagagcgcccaggccagcctgaagacctaccagaatgaggtgacaggcctgtgggcccagggccgggagctgatgaaggaggtgacagagcaggagaagtctgaggtgctgggcaagctgcaggagctgcagagcgtgtatgattctgtgctgcagaagtgcagccaccggctgcaggagctggagaagaacctggtgtccaggaagcacttcaaggaggactttgacaaggcctgccactggctgaagcaggccgacatcgtgaccttccctgagatcaacctgatgaatgaaagcagcgagctgcacacccagctggccaagtaccagaacatcctggagcagagcccagaatatgagaacctgctgctgaccctgcagaggacaggccagaccatcctgcccagcctgaatgaggtggaccacagctacctgtctgagaagctgaatgccctgccccggcagttcaacgtgattgtggccctggccaaggacaagttctacaaggtgcaggaggccatcctggccaggaaggagtatgccagcctcatcgagctgaccacccagagcctgtctgagctggaggcccagttcctgaggatgagcaaggtgcccacagacctggccgtggaggaggccctgagcctgcaggacggctgccgggccatcctggatgaggtggccggcctgggggaggccgtggatgagctgaaccagaagaaggagggcttccgcagcacaggccagccctggcagcctgacaagatgctgcacctggtgaccctgtaccaccggctgaagaggcagacagagcagagggtgtccctgctggaggacaccaccagcgcctaccaggagcacgagaagatgtgccagcagctggagcggcagctgaagtctgtgaaggaggagcagagcaaggtgaatgaggagaccctgcctgctgaggagaagctgaagatgtaccacagcctggccggcagcctgcaggacagcggcatcgtgctgaagagggtgaccatccacctggaggacctggccccccacctggaccccctggcctatgagaaggcccggcaccagatccagagctggcagggcgagctgaagctgctgaccagcgccatcggggagaccgtgacagaatgtgagagcaggatggtgcagagcattgacttccagacagagatgagccgcagcctggactggctgcggcgggtgaaggccgagctgagcggccctgtgtacctggacctgaacctgcaggacatccaggaggagatcaggaagatccagatccaccaggaggaggtgcagagcagcctgcgcatcatgaatgccctgagccacaaggagaaggagaagttcaccaaggccaaggagctgatctctgctgacctggagcacagcctggccgagctgtctgagctggatggagacatccaggaggccctgcggacccggcaggccaccctgacagagatctacagccagtgccagcgctactaccaggtgttccaggccgccaatgactggctggaggatgcccaggagctgctgcagctggccggaaatggcctggatgtggagagcgctgaggagaacctgaagagccacatggagttcttcagcacagaggaccagttccacagcaacctggaggagctgcacagcctggtggccaccctggaccccctcatcaagcccaccgggaaggaggacctggagcagaaggtggccagcctggagctgcggagccagaggatgagccgggacagcggggcccaggtggacctgctgcagcgctgcacagcccagtggcatgactaccagaaggcccgggaggaggtgattgagctgatgaatgacacagagaagaagctgtctgagttcagcctgctgaagaccagcagcagccatgaggccgaggagaagctgtctgagcacaaggccctggtgtctgtggtgaacagcttccacgagaagatcgtggccctggaggagaaggccagccagctggagaagacaggaaatgatgccagcaaggccaccctgagccgctccatgaccaccgtgtggcagcgctggacccggctgcgggctgtggcccaggaccaggagaagatcctggaggatgctgtggatgagtggacaggcttcaacaacaaggtgaagaaggccacagagatgattgaccagctgcaggacaagctgcccggcagcagcgctgagaaggccagcaaggccgagctgctgaccctgctggagtaccatgacacctttgtgctggagctggagcagcagcagagcgccctgggcatgctgcggcagcagaccctgtccatgctgcaggatggagctgcccccaccccaggagaggagccccccctgatgcaggagatcacagccatgcaggaccgctgcctgaacatgcaggagaaggtgaagaccaacgggaagctggtgaagcaggagctgaaggaccgggagatggtggagacccagatcaacagcgtgaagtgctgggtgcaggagaccaaggagtacctgggcaaccccaccattgaaattgatgcccagctggaggagctgcagatcctgctgacagaggccaccaaccaccggcagaacatcgagaagatggccgaggagcagaaggagaagtacctgggcctgtacaccatcctgcccagcgagctgagcctgcagctggccgaggtggccctggacctgaagatccgggaccagatccaggacaagatcaaggaggtggagcagagcaaggccaccagccaggagctgagccggcagatccagaagctggccaaggacctgaccaccatcctgaccaagctgaaggccaagacagacaacgtggtgcaggccaagacagaccagaaggtgctgggggaggagctggatggctgcaacagcaagctgatggagctggatgctgctgtgcagaagttcctggagcagaatggccagctgggcaagcccctggccaagaagattggcaagctgacagagctgcaccagcagaccatccggcaggccgagaaccggctgagcaagctgaaccaggccgccagccacctggaggagtacaatgagatgctggagctgatcctgaagtggattgagaaggccaaggtgctggcccacggcaccatcgcctggaacagcgccagccagctgcgggagcagtacatcctgcaccagaccctgctggaggagagcaaggagattgattctgagctggaggccatgacagagaagctgcagtacctgacctctgtgtactgcacagagaagatgagccagcaggtggccgagctgggccgggagacagaggagctgcggcagatgatcaagatccggctgcagaacctgcaggatgctgccaaggacatgaagaagtttgaagctgagctgaagaagctgcaggccgccctggagcaggcccaggccaccctgaccagccctgaggtgggccgcctgagcctgaaggagcagctgagccaccggcagcacctgctgtctgagatggagagcctgaagcccaaggtgcaggccgtgcagctgtgccagagcgccctgcgcatcccagaagatgtggtggccagcctgcccctgtgccacgccgccctgcggctgcaggaggaggccagccggctgcagcacacagccatccagcagtgcaacatcatgcaggccgctgtggtgcagtatgagcagtatgagcaggagatgaagcacctgcagcagctgattgagggcgcccaccgggagattgaggacaagcctgtggccaccagcaacatccaggagctgcaggcccagatcagcagacatgaggagctggcccagaagatcaagggctaccaggagcagatcgccagcctgaacagcaagtgcaagatgctgaccatgaaggccaagcacgccaccatgctgctgactgtgacagaggtggagggcctggccgagggcacagaggacctggatggagagctgctgcccacccccagcgcccaccccagcgtggtgatgatgacagctggccgctgccacaccctgctgagccctgtgacagaggagagcggggaggagggcaccaacagcgagatcagcagccccccagcctgccgcagccccagccctgtggccaacacagatgcctctgtgaaccaggacatcgcctactaccaggccctgtctgctgagcggctgcagacagatgctgccaagatccaccccagcaccagcgccagccaggagttctatgagcccggcctggagcccagcgccacagccaagctgggggacctgcagaggtcctgggagaccctgaagaatgtcatcagcgagaagcagaggaccctgtatgaggccctggagcggcagcagaagtaccaggacagcctgcagagcatcagcaccaagatggaggccatcgagctgaagctgtctgagagccctgagcccggccgcagccctgagagccagatggccgagcaccaggccctgatggatgagatcctgatgctgcaggatgagatcaatgagctgcagagcagcctggccgaggagctggtgtctgagagctgtgaggccgaccctgctgagcagctggccctgcagagcaccctgactgtgctggccgagaggatgagcaccatccgcatgaaggccagcggcaagaggcagctgctggaggagaagctgaatgaccagctggaggagcagaggcaggagcaggccctgcagcgctaccgctgtgaggctgatgagctggacagctggctgctgagcaccaaggccaccctggacacagccctgagcccccccaaggagcccatggacatggaggcccagctgatggactgccagaacatgctggtggagattgagcagaaggtggtggccctgtctgagctgtctgtgcacaatgaaaacctgctgctggagggcaaggcccacaccaaggatgaggccgagcagctggccggcaagctgcggcggctgaagggcagcctgctggagctgcagagggccctgcatgacaagcagctgaacatgcagggcacagcccaggagaaggaggagagtgatgtggacctgacagccacccagagccctggggtgcaggagtggctggcccaggcccggaccacctggacccagcagaggcagagcagcctgcagcagcagaaggagctggagcaggagctggccgagcagaagagcctgctgcggtctgtggccagcagaggagaggagatcctgatccagcacagcgctgctgagaccagcggagatgctggggagaagccagatgtgctgagccaggagctgggcatggagggggagaagagcagcgctgaggaccagatgaggatgaagtgggagagcctgcaccaggagttcagcaccaagcagaagctgctgcagaatgtgctggagcaggagcaggagcaggtgctgtacagccggcccaaccggctgctgagcggcgtgcccctgtacaagggagatgtgcccacccaggacaagtctgctgtgaccagcctgctggatggcctgaaccaggcctttgaggaggtgagcagccagagcggcggggccaagaggcagagcatccacctggagcagaagctgtatgatggagtgtctgccaccagcacctggctggatgatgtggaggagcggctgtttgtggccacagccctgctgcctgaggagacagagacctgcctcttcaaccaggagatcctggccaaggacatcaaggagatgtctgaggagatggacaagaacaagaacctcttcagccaggccttcccagaaaatggagacaacagagatgtgattgaggacaccctgggctgcctgctgggccgcctgagcctgctggacagcgtggtgaaccagcgctgccaccagatgaaggagcggctgcagcagatcctgaacttccagaatgacctgaaggtgctcttcaccagcctggccgacaacaagtacatcatcctgcagaagctggccaacgtgtttgagcagcctgtggccgagcagatcgaggccatccagcaggccgaggatggcctgaaggagtttgatgctggcatcatcgagctgaagagaagaggagacaagctgcaggtggagcagcccagcatgcaggagctgagcaagctgcaggacatgtatgatgagctgatgatgatcatcggcagcagaagaagtggcctgaaccagaacctgaccctgaagagccagtatgagcgggccctgcaggacctggccgacctgctggagaccggccaggagaagatggccggggaccagaagatcatcgtgagcagcaaggaggagatccagcagctgctggacaagcacaaggagtacttccagggcctggagagccacatgatcctgacagagaccctcttcaggaagatcatcagctttgctgtgcagaaggagacccagttccacacagagctgatggcccaggccagcgctgtgctgaagagggcccacaagaggggcgtggagctggagtacatcctggagacctggagccacctggatgaggaccagcaggagctgagccggcagctggaggtggtggagagcagcatccccagcgtgggcctggtggaggagaatgaagatcggctgattgaccgcatcaccctgtaccagcacctgaagagcagcctgaatgagtaccagcccaagctgtaccaggtgctggatgatggcaagaggctgctgatcagcatcagctgcagcgacctggagagccagctgaaccagctgggggagtgctggctgagcaacaccaacaagatgagcaaggagctgcaccggctggagaccatcctgaagcactggacccgctaccagagcgagagcgctgacctgatccactggctgcagagcgccaaggaccggctggagttctggacccagcagagcgtgacagtgccccaggagctggagatggtgcgggaccacctgaatgccttcctggagttcagcaaggaggtggatgcccagagcagcctgaagagctctgtgctgagcacaggcaaccagctgctgcggctgaagaaggtggacacagccaccctgcggtctgagctgagcagaattgacagccagtggacagacctgctgaccaacatcccagctgtgcaggagaagctgcaccagctgcagatggacaagctgcccagcagacatgccatcagcgaggtgatgtcctggatcagcctgatggagaatgtcatccagaaggatgaggacaacatcaagaacagcatcggctacaaggccatccacgagtacctgcagaagtacaagggcttcaagattgacatcaactgcaagcagctgactgtggactttgtgaaccagagcgtgctgcagatcagcagccaggatgtggagagcaagagaagtgacaagacagactttgctgagcagctgggcgccatgaacaagtcctggcagatcctgcagggcctggtgacagagaagatccagctgctggagggcctgctggagagctggagcgaatatgagaacaacgtgcagtgcctgaagacctggtttgagacccaggagaagaggctgaagcagcagcacagaattggagaccaggcctctgtgcagaatgccctgaaggactgccaggacctggaggacctgatcaaggccaaggagaaggaggtggagaagattgagcagaatggcctggccctgatccagaacaagaaggaggatgtgagcagcatcgtgatgagcaccctgcgggagctgggccagacctgggccaacctggaccacatggtgggccagctgaagatcctgctgaagtctgtgctggaccagtggagcagccacaaggtggcctttgacaagatcaacagctacctgatggaggcccgctacagcctgagccgcttccggctgctgaccggcagcctggaggccgtgcaggtgcaggtggacaacctgcagaacctgcaggatgacctggagaagcaggagaggagcctgcagaagtttggcagcatcaccaaccagctgctgaaggagtgccacccccctgtgacagagaccctgaccaacaccctgaaggaggtgaacatgcgctggaacaacctgctggaggagattgctgagcagctgcagagcagcaaggccctgctgcagctgtggcagcgctacaaggactacagcaagcagtgtgccagcacagtgcagcagcaggaggacaggaccaatgagctgctgaaggccgccaccaacaaggacattgctgatgatgaggtggccacctggatccaggactgcaatgacctgctgaagggcctgggcaccgtgaaggacagcctcttcttcctgcacgagctgggggagcagctgaagcagcaggtggatgccagcgctgccagcgccatccagagcgaccagctgagcctgagccagcacctgtgtgccctggagcaggccctgtgcaagcagcagaccagcctgcaggccggcgtgctggactatgagacctttgccaagagcctggaggccctggaggcctggatcgtggaggccgaggagatcctgcagggccaggaccccagccacagcagtgacctgagcaccatccaggagaggatggaggagctgaagggccagatgctgaagttcagctccatggccccagacctggaccggctgaatgagctgggctaccgcctgcccctgaatgacaaggagatcaagaggatgcagaacctgaacagacactggagcctcatcagcagccagaccacagagcgcttcagcaagctgcagagcttcctgctgcagcaccagaccttcctggagaagtgtgagacctggatggagttcctggtgcagacagagcagaagctggccgtggagatcagcggcaactaccagcacctgctggagcagcagagggcccacgagctgttccaggccgagatgttcagccggcagcagatcctgcacagcatcatcattgatggccagaggctgctggagcagggccaggtggatgacagagatgagttcaacctgaagctgaccctgctgagcaaccagtggcagggcgtcatcagaagagcccagcagaggcggggcatcatcgacagccagatccggcagtggcagcgctaccgggagatggccgagaagctgaggaagtggctggtggaggtgtcctacctgcccatgagcggcctgggctctgtgcccatccccctgcagcaggcccggaccctgtttgatgaggtgcagttcaaggagaaggtgttcctgcggcagcagggcagctacatcctgactgtggaggccggcaagcagctgctgctgtctgctgacagcggggctgaggccgccctgcaggccgagctggccgagatccaggagaagtggaagagcgcctccatgaggctggaggagcagaagaagaagctggccttcctgctgaaggactgggagaagtgtgagaagggcattgctgacagcctggagaagctgcggaccttcaagaagaagctgagccagagcctgcctgaccaccacgaggagctgcatgctgagcagatgcgctgcaaggagctggagaatgctgtgggctcctggacagatgacctgacccagctgagcctgctgaaggacaccctgagcgcctacatctctgcagatgacatcagcatcctgaatgaaagagtggagctgctgcagaggcagtgggaggagctgtgccaccagctgagcctgcggcggcagcagattggagagcggctgaatgagtgggccgtgttcagcgagaagaacaaggagctgtgtgagtggctgacccagatggagagcaaggtgtcccagaatggagacatcctgattgaggagatgattgagaagctgaagaaggactaccaggaggagatcgccatcgcccaggagaacaagatccagctgcagcagatgggagagcggctggccaaggccagccatgagagcaaggccagcgagattgagtacaagctgggcaaggtgaatgaccgctggcagcacctgctggacctgattgctgcccgggtgaagaagctgaaggagaccctggtggccgtgcagcagctggacaagaacatgagcagcctgcggacctggctggcccacatcgagagcgagctggccaagcccatcgtgtatgacagctgcaacagcgaggagatccagaggaagctgaatgagcagcaggagctgcagagggacatcgagaagcacagcactggagtggcctctgtgctgaacctgtgtgaggtgctgctgcatgactgtgatgcctgtgccacagatgctgaatgtgacagcatccagcaggccaccaggaacctggaccggcgctggaggaacatctgtgccatgtccatggagcggcggctgaagattgaggagacctggaggctgtggcagaagttcctggatgactacagcagatttgaggactggctgaagagcagcgagaggacagctgccttccccagcagcagcggggtcatctacacagtggccaaggaggagctgaagaagtttgaggccttccagaggcaggtgcatgaatgtctgacccagctggagctgatcaacaagcagtaccgccgcctggccagagaaaatagaacagacagcgcctgcagcctgaagcagatggtgcatgagggcaaccagcgctgggacaacctgcagaagagggtgaccagcatcctgcggcggctgaagcacttcatcggccagcgggaggagtttgaaacagcccgggacagcatcctggtgtggctgacagagatggacctgcagctgaccaacatcgagcacttctctgaatgtgatgtgcaggccaagatcaagcagctgaaggccttccagcaggagatcagcctgaaccacaacaagattgagcagatcatcgcccagggcgagcagctgattgagaagtctgagcccctggatgctgccatcatcgaggaggagctggatgagctgcggcgctactgccaggaggtgtttggccgggtggagcgctaccacaagaagctgatccggctgcccctgcctgatgatgaacatgacctgagtgaccgggagctggagctggaggacagcgctgccctgagtgacctgcactggcatgacagatctgctgacagcctgctgagcccccagcccagcagcaacctgagcctgagcctggcccagcccctgcggtctgagaggagcggccgggacaccccagcctctgtggacagcatccccctggagtgggaccatgactatgacctgagccgggacctggagagcgccatgagccgggccctgcccagtgaagatgaggagggccaggatgacaaggacttctacctgcggggagctgtgggcctgagcggggaccacagcgccctggagagccagatccggcagctgggcaaggccctggatgacagccgcttccagatccagcagacagagaacatcatccgcagcaagacccccaccggccctgagctggacaccagctacaagggctacatgaagctgctgggagaatgtagcagcagcattgacagcgtgaagaggctggagcacaagctgaaggaggaggaggagagcctgcccggctttgtgaacctgcacagcacagagacccagacagctggggtcatcgaccgctgggagctgctgcaggcccaggccctgagcaaggagctgaggatgaagcagaacctgcagaagtggcagcagttcaacagcgacctgaacagcatctgggcctggctgggggacacagaggaggagctggagcagctgcagaggctggagctgagcacagacatccagaccatcgagctgcagatcaagaagctgaaggagctgcagaaggctgtggaccacaggaaggccatcatcctgagcatcaacctgtgcagccctgagttcacccaggccgacagcaaggagagccgggacctgcaggaccggctgagccagatgaatggccgctgggacagagtgtgcagcctgctggaggagtggaggggcctgctgcaggatgccctgatgcagtgccagggcttccacgagatgagccacggcctgctgctgatgctggagaacatcgacaggaggaagaatgagatcgtgcccatcgacagcaacctggatgctgagatcctgcaggaccaccacaagcagctgatgcagatcaagcatgagctgctggagagccagctgcgggtggccagcctgcaggacatgagctgccagctgctggtgaatgctgagggcacagactgcctggaggccaaggagaaggtgcacgtgattggcaaccggctgaagctgctgctgaaggaggtgagccgccacatcaaggagctggagaagctgctggatgtgagcagcagccagcaggacctgagctcctggagcagcgcagatgagctggacaccagcggctctgtgagccccaccagcggccgcagcacccccaaccggcagaagaccccccggggcaagtgcagcctgagccagcccggccccagcgtgagcagcccccacagccgcagcaccaagggcggcagtgacagcagcctgtctgagcccggccctggccgcagcggccggggcttcctgttccgggtgctgcgggccgccctgcccctgcagctgctgctgctgctgctgattggcctggcctgcctggtgcccatgtctgaggaggactacagctgtgccctgagcaacaactttgcccgctccttccaccccatgctgcgctacaccaacggccccccacccctgtag

SEQ ID NO: 257460 - DNA, 25230 bp, Artificial Sequence
  derived and/or modified sequence
atggccaccagcagaggagccagccgctgcccccgggacatcgccaacgtgatgcagaggctgcaggatgagcaggagatcgtgcagaagaggaccttcaccaagtggatcaacagccacctggccaagaggaagccacccatggtggtggatgacctgtttgaggacatgaaggatggagtgaagctgctggccctgctggaggtgctgagcggccagaagctgccctgtgagcagggccgcaggatgaagagaattcatgctgtggccaacatcggcacagccctgaagttcctggagggcaggaagatcaagctggtgaacatcaacagcacagacattgctgatggccggcccagcatcgtgctgggcctgatgtggaccatcatcctgtacttccagatcgaggagctgaccagcaacctgccccagctgcagagcctgagcagcagcgccagctctgtggacagcatcgtgtcctctgagacccccagcccccccagcaagaggaaggtgaccaccaagatccagggcaatgccaagaaggccctgctgaagtgggtgcagtacacagctgggaagcagacaggcatcgaggtgaaggactttgggaagtcctggaggtctggagtggccttccacagcgtcatccacgccatccggcctgagctggtggacctggagaccgtgaagggccgcagcaaccgggagaacctggaggatgccttcaccatcgccgagacagagctgggcatcccccggctgctggaccctgaagatgtggatgtggacaagccagatgagaagagcatcatgacctacgtggcccagttcctgaagcactacccagacatccacaatgccagcacagatggccaggaggatgatgagatcctgcccggcttccccagctttgccaacagcgtgcagaacttcaagagagaagatagagtcatcttcaaggagatgaaggtgtggattgagcagtttgagcgggacctgacccgggcccagatggtggagagcaacctgcaggacaagtaccagagcttcaagcacttccgggtgcagtatgagatgaagaggaagcagatcgagcacctgatccagcccctgcacagagatggcaagctgagcctggaccaggccctggtgaagcagagctgggacagagtgaccagccggctgtttgactggcacatccagctggacaagagcctgcctgcccccctgggcaccatcggggcctggctgtacagagctgaggtggccctgcgggaggagatcaccgtgcagcaggtgcatgaggagacagccaacaccatccagaggaagctggagcagcacaagaggaagctgagaaatgtgattgacctgctgcagaacacagatgcccacaagagggccttccacgagatctaccgcaccaggtctgtgaatggcatccctgtgcccccagaccagctggaggacatggccgagcgcttccactttgtgagcagcaccagcgagctgcacctgatgaagatggagttcctggagctgaagtaccgcctgctgagcctgctggtgctggccgagagcaagctgaagtcctggatcatcaagtatggaagaagagagagcgtggagcagctgctgcagaactacgtgtccttcatcgagaacagcaagttctttgagcagtatgaggtgacctaccagatcctgaagcagacagctgagatgtatgtgaaggcagatggctctgtggaggaggccgagaatgtgatgaagttcatgaatgagaccacagcccagtggaggaacctgtctgtggaggtgcgctctgtgcgctccatgctggaggaggtgatcagcaactgggacagatatggcaacacagtggccagcctgcaggcctggctggaggatgctgagaagatgctgaaccagagtgaaaatgccaagaaggacttcttcaggaacctgccccactggatccagcagcacacagccatgaatgatgctggcaacttcctgattgagacctgtgatgagatggtgtcccgggacctgaagcagcagctgctgctgctgaatggccgctggagggagctgttcatggaggtgaagcagtatgcccaggctgatgagatggacaggatgaagaaggagtacacagactgtgtggtgaccctgagcgcctttgccacagaggcccacaagaagctgtctgagcccctggaggtgtccttcatgaatgtgaagctgctgatccaggacctggaggacatcgagcagagggtgcctgtgatggatgcccagtacaagatcatcaccaagacagcccacctgatcaccaaggagagcccccaggaggagggcaaggagatgtttgccaccatgagcaagctgaaggagcagctgaccaaggtgaaggagtgctacagccccctgctgtatgagagccagcagctgctgatccccctggaggagctggagaagcagatgaccagcttctatgacagcctgggcaagatcaatgagatcatcaccgtgctggagcgggaggcccagagcagcgccctcttcaagcagaagcaccagctgcgcatcctgaagtgcaagtggtgcaacagcagccagaagatgaccctgtgcctggtgctgggctccatgatctccatgctgagcacagccaagatcaccatcgccggctacaagtctgaggtggaggtgtctgagctgctggcctgccaggagaactgcaagaagaccctgaccctcatcgagaagggcagccagagcgtgcagaagtttgtgaccctgagcaatgtgctgaagcactttgaccagacccggctgcagacagactgccgctacagctgctgcttctctgtgatgaggaagcagcaccacatcatgattgtgttccacatcaagtccatggtgaagaagacaggagactggaagaagcacgtggagaccaacagccggctgatgaagaagtttgaggagagcagagctgagctggagaaggtgctgagaattgcccaggagggcctggaggagaagggggaccctgaggagctgctgcggcggcacacagagttcttcagccagctggaccagagggtgctgaatgccttcctgaaggcctgtgatgagctgacagacatcctgcctgagcaggagcagcagggcctgcaggaggccgtgaggaagctgcacaagcagtggaaggacctgcagggcgaggccccctaccacctgctgcacctgaagattgatgtggagaagaaccgcttcctggcctctgtggaggagtgcaggacagagctggaccgggagaccaagctgatgccccaggagggcagcgagaagatcatcaaggagcacagggtcttcttcagtgacaagggcccccaccacctgtgtgagaagaggctgcagctgattgaggagctgtgtgtgaagctgcctgtgcgggaccctgtgcgggacaccccaggcacctgccacgtgaccctgaaggagctgcgggccgccatcgacagcacctacaggaagctgatggaggaccctgacaagtggaaggactacaccagccgcttcagcgagttcagctcctggatcagcaccaatgagacccagctgaagggcatcaagggggaggccatcgacacagccaaccacggggaggtgaagagagctgtggaggagatcagaaatggagtgaccaagagaggagagaccctgtcctggctgaagagccggctgaaggtgctgacagaggtgtccagtgaaaatgaggcccagaagcagggagatgagctggccaagctgagcagcagcttcaaggccctggtgaccctgctgtctgaggtggagaagatgctgagcaactttggagactgtgtgcagtacaaggagatcgtgaagaacagcctggaggagctgatcagcggcagcaaggaggtgcaggagcaggccgagaagatcctggacacagagaacctgtttgaggcccagcagctgctgctgcaccaccagcagaagaccaagaggatcagcgccaagaagagagatgtgcagcagcagatcgcccaggcccagcagggcgagggcggcctgcctgaccggggccacgaggagctgaggaagctggagagcaccctggatggcctggagaggagccgggagcggcaggagcggcgcatccaggtgaccctgaggaagtgggagagatttgagaccaacaaggagaccgtggtgcgctacctgttccagacaggcagcagccatgagcgcttcctgtccttcagcagcctggagagcctgagcagcgagctggagcagaccaaggagttcagcaagaggacagagagcattgctgtgcaggccgagaacctggtgaaggaggccagcgagatccccctgggcccccagaacaagcagctgctgcagcagcaggccaagagcatcaaggagcaggtgaagaagctggaggacaccctggaggaggagtatgtgattgacaacaagaccatggagatggtgaagaccaagtgggaccacttcggcagcaactttgagaccctgtctgtgtggatcacagagaaggagaaggagctgaatgccctggagaccagcagcagcgccatggacatgcagatcagccagatcaaggtgaccatccaggagattgagagcaagctgagcagcatcgtgggcctggaggaggaggcccagagctttgcccagtttgtgaccaccggggagagcgcccgcatcaaggccaagctgacccagatccgccgctacggggaggagctgcgggagcacgcccagtgcctggagggcaccatcctgggccacctgagccagcagcagaagtttgaggagaacctgaggaagatccagcagagcgtgtctgaatttgaggacaagctggccgtgcccatcaagatctgcagcagcgccacagagacctacaaggtgctgcaggagcacatggacctgtgccaggccctggagagcctgagcagcgccatcacagccttcagcgccagcgccaggaaggtggtgaacagagacagctgtgtgcaggaggccgccgccctgcagcagcagtatgaggacatcctgcggcgggccaaggagcggcagacagccctggagaacctgctggcccactggcagaggctggagaaggagctgagcagcttcctgacctggctggagcggggggaggccaaggccagcagccctgagatggacatctctgctgacagagtgaaggtggaggccagcaaggatgatgtgaagatgatgaagctgcacctggagcagctggatgagcgctggagggacctgccccagatcatcaacaagaggatcaacttcctgcagagcgtggtggccgagcaccagcagtttgatgagctgctgctgtccttctctgtgtggatcaagctgttcctgtctgagctgcagaccaccagcgagatcagcatcatggaccaccaggtggccctgaccaggcacaaggaccatgctgctgaggtggagagcaagaagggggagctgcagagcctgcagggccacctggccaagctgggcagcctgggccgggcagaggacctgcacctgctgcagggcaaggccgaggactgcttccagctgtttgaggaggccagccaggtggtggagcggcggcagctggccctgagccacctggccgagttcctgcagagccacgccagcctgagcggcatcctgcggcagctgcggcagacagtggaggccaccaacagcatgaacaagaatgaaagtgacctgattgagaaggacctgaatgatgccctgcagaatgccaaggccctggagagcgctgctgtgtccctggatggcatcctgagcaaggcccagtaccacctgaagattggcagcagcgagcagaggaccagctgccgggccacagctgaccagctgtgtggggaggtggagcgcatccagaacctgctgggcaccaagcagagcgaggctgatgccctggccgtgctgaagaaggccttccaggaccagaaggaggagctgctgaagagcattgaggacatcgaggagaggacagacaaggagcggctgaaggagcccacccggcaggccctgcagcagaggctgcgggtcttcaaccagctggaggatgagctgaacagccatgagcacgagctgtgctggctgaaggacaaggccaagcagatcgcccagaaggatgtggcctttgcccctgaggtggaccgggagatcaaccggctggaggtgacctgggatgacaccaagaggctcatccacgagaaccagggccagtgctgcggcctgattgacctgatgagggagtaccagaacctgaagtctgctgtgtccaaggtgctggagaatgccagcagcgtcatcgtgaccaggaccaccatcaaggaccaggaggacctgaagtgggccttcagcaagcatgaaacagccaagaacaagatgaactacaagcagaaggacctggacaacttcaccagcaagggcaagcacctgctgtctgagctgaagaagatccacagcagtgacttcagcctggtgaagacagacatggagagcacagtggacaagtggctggatgtgtctgagaagctggaggagaacatggaccggctgcgggtgtccctgagcatctgggatgatgtgctgagcaccagagatgaaattgagggctggagcaacaactgtgtgccccagatggccgagaacatcagcaacctggacaaccacctgcgggcagaggagctgctgaaggagtttgaaagtgaggtgaagaacaaggccctgcggctggaggagctgcacagcaaggtgaatgacctgaaggagctgaccaagaacctggagaccccaccagacctgcagttcatcgaggccgacctgatgcagaagctggagcacgccaaggagatcacagaggtggccaagggcaccctgaaggacttcaccgcccagagcacccaggtggagaagttcatcaatgacatcaccacctggttcaccaaggtggaggagagcctgatgaactgtgcccagaatgagacctgtgaggccctgaagaaggtgaaggacatccagaaggagctgcagagccagcagagcaacatcagcagcacccaggagaacctgaacagcctgtgcaggaagtaccacagcgctgagctggagagcctgggccgggccatgacaggcctcatcaagaagcatgaggccgtgtcccagctgtgcagcaagacccaggccagcctgcaggagagcctggagaagcacttcagcgaggagagcatgcaggagttccaggagtggttcctgggcgccaaggccgccgccaaggagagcagtgacagaactggagacagcaaggtgctggaggccaagctgcatgacctgcagcagaacatcctggacagcgtgtctgatggccagagcaagctggatgctgtgacccaggagggccagaccctgtatgcccacctgagcaagcagatcgtgagcagcatccaggagcagatcaccaaggccaatgaggagttccaggccttcctgaagcagtgcctgaaggacaagcaggccctgcaggactgtgccagcgagctgggcagctttgaggaccagcacaggaagctgaacctgtggattcatgagatggaggagcgcttcaacacagagaacctgggggagagcaagcagcacatccctgagaagaagaatgaggtgcacaaggtggagatgttcctgggggagctgctggccgcccgggagagcctggacaagctgagccagaggggccagctgctgtctgaggagggccacggggccggccaggagggccgcctgtgcagccagctgctgaccagccaccagaacctgctgaggatgaccaaggagaagctgcggagctgccaggtggccctgcaggagcacgaggccctggaggaggccctgcagagcatgtggttctgggtgaaggccatccaggaccggctggcctgtgccgagagcaccctgggcagcaaggacaccctggagaagaggctgagccagatccaggacatcctgctgatgaagggggagggggaggtgaagctgaacatggccatcggcaagggggagcaggccctgcggagcagcaacaaggagggccagagggtcatccagacccagctggagaccctgaaggaggtgtgggccgacatcatgagcagctctgtgcacgcccagagcaccctggagagcgtcatcagccagtggaatgactatgtggagaggaagaaccagctggagcagtggatggagagcgtggaccagaagattgagcaccccctgcagccccagcccggcctgaaggagaagtttgtgctgctggaccacctgcagagcatcctgtctgaggccgaggaccacacccgggccctgcaccggctgattgccaagagccgggagctgtatgagaagacagaagatgagagcttcaaggacacagcccaggaggagctgaagacccagttcaatgacatcatgacagtggccaaggagaagatgaggaaggtggaggagatcgtgaaggaccacctgatgtacctggatgctgtgcatgagttcacagactggctgcacagcgccaaggaggagctgcaccgctggagcgacatgtctggggacagcagcgccacccagaagaagctgagcaagatcaaggagctgattgacagccgggagattggagccagccggctgagccgggtggagagcctggcccctgaggtgaagcagaacaccacagccagcggctgtgagctgatgcacacagagatgcaggccctgcgggctgactggaagcagtgggaggacagcgtcttccagacccagagctgcctggagaacctggtgtcccagatggccctgtctgagcaggagttcagcggccaggtggcccagctggagcaggccctggagcagttcagcgccctgctgaagacctgggcccagcagctgaccctgctggagggcaagaacacagatgaggagatcgtggagtgctggcacaagggccaggagatcctggatgccctgcagaaggccgagcccaggacagaggacctgaagagccagctgaatgagctgtgccgcttcagccgggacctgagcacctacagcggcaaggtgtctggcctcatcaaggagtacaactgcctgtgcctgcaggccagcaagggctgccagaacaaggagcagatcctgcagcagcgcttcaggaaggccttccgggacttccagcagtggctggtgaatgccaagatcaccacagccaagtgctttgacatcccccagaacatcagcgaggtgtccaccagcctgcagaagatccaggagttcctgtctgagagtgaaaatggccagcacaagctgaacatgatgctgagcaagggggagctgctgagcaccctgctgaccaaggagaaggccaagggcatccaggccaaggtgacagctgccaaggaggactggaagaacttccacagcaacctgcaccagaaggagagcgccctggagaacctgaagatccagatgaaggactttgaggtgtctgctgagcccatccaggactggctgagcaagacagagaagatggtgcatgagagcagcaaccggctgtatgacctgcctgccaagagaagagagcagcagaagctgcagagcgtgctggaggagatccactgctatgagccccagctgaaccggctgaaggagaaggcccagcagctgtgggagggccaggccgccagcaagagcttccgccaccgggtgtcccagctgagcagccagtacctggccctgagcaacctgaccaaggagaaggtgtcccggctggacagaattgtggccgagcacaaccagttcagcctgggcatcaaggagctgcaggactggatgacagatgccatccacatgctggacagctactgccaccccaccagtgacaagtctgtgctggacagcaggaccctgaagctggaggccctgctgtctgtgaagcaggagaaggagatccagatgaagatgattgtgaccagaggagagagcgtgctgcagaacaccagccctgagggcatccccaccatccagcagcagctgcagagcgtgaaggacatgtgggccagcctgctgtctgctggcatccgctgcaagagggtgcggctgccctgtgcctacatcgccctgaagctgcgggtgcaccagcacgccgagctgcgggacaagaccaccatgctgggcaaggccaaggaggccgtgaccaagtctgagaagctggtgcggctgcaccaggagtaccagagggacctgaaggcctttgaggtgtggctgggccaggagcaggagaagctggaccagtacagcgtgctggagggagatgcccacacccatgagaccaccctgcgggacctgcaggagctgcaggtgcactgtgccgagggccaggccctgctgaacagcgtgctgcacacccgggaggatgtgatccccagcggcatcccccaggctgaagatcgggccctggagagcctgcggcaggactggcaggcctaccagcaccggctgtctgagaccaggacccagttcaacaacgtggtgaacaagctgcggctgatggagcagaagttccagcaggtggatgagtggctgaagacagctgaggagaaggtgagccccaggacccggcggcagagcaacagagccaccaaggagatccagctgcaccagatgaagaagtggcatgaggaggtgacagcctacagagatgaggtggaggaggtgggcgcccgggcccaggagatcctggatgagagccacgtgaacagcaggatgggctgccaggccacccagctgaccagccgctaccaggccctgctgctgcaggtgctggagcagatcaagttcctggaggaggagatccagagcctggaggagagcgagagcagcctgagcagctacagcgactggtacggcagcacccacaagaacttcaagaatgtggccaccaagattgacaaggtggacacagtgatgatgggcaagaagctgaagaccctggaggtgctgctgaaggacatggagaagggccacagcctgctgaagagcgcccgggagaagggggagagagctgtgaagtacctggaggagggggaggccgagcggctgaggaaggagatccatgaccacatggagcagctgaaggagctgaccagcacagtgaggaaggagcacatgaccctggagaagagcctgcagcagacagtgctgagccatgagcccagcgtgaagtctgtgcgggagaagggggaggccctgctggagctggtgcaggatgtgaccctgaaggacaagattgaccagctgcagagcgactaccaggacctgtgcagcatcggcaaggagcacgtgttcagcctggaggccaaggtgaaggaccacgaggactacaacagcgagctgcaggaggtggagaagtggctgctgcagatgagcggccgcctggtggccccagacctgctggagaccagcagcctggagaccatcacccagcagctggcccaccacaagatgtaccagagcctggagcacgagctgcagaagcacgtgtcccggcaggacaccctgcagcagtgccaggcctggctgtctgctgtgcagcctgacctggagcccagcccccagccccccctgagcagagctgaggccatcaagcaggtgaagcacttccgggccctgcaggagcaggcccggacctacctggacctgctgtgcagcatgtgtgacctgagcaatgcctctgtgaagaccacagccaaggacatccagcagacagagcagaccatcgagcagaagctggtgcaggcccagaacctgacccagggctgggaggagatcaagcacctgaagtctgagctgtggatctacctgcaggatgctgaccagcagctgcagaacatgaagagaagacacagcgagctggagctgaacatcgcccagaacatggtgtcccaggtgaaggactttgtgaagaagctgcagagcaagcaggcctctgtgaacaccatcatcgagaaggtgaacaagctgaccaagaaggaggagagccctgagcacaaggagatcaaccacctgaatgaccagtggctggacctgtgccggcagagcaacaacctgtgcctgcagcgggaggaggacctgcagaggacccgggactaccatgactgcatgaatgtggtggaggtgttcctggagaagttcaccacagagtgggacaacctggcccggagtgatgctgagagcacagctgtgcacctggaggccctgaagaagctggccctggccctgcaggagaggaaatatgccatcgaggacctgaaggaccagaagcagaagatgattgagcacctgaacctggatgacaaggagctggtgaaggagcagaccagccacctggagcagcgctggttccagctggaggacctgatcaagaggaagatccaggtgtctgtgaccaacctggaggagctgaatgtggtgcagagccgcttccaggagctgatggagtgggccgaggagcagcagcccaacattgctgaggccctgaagcagagccccccaccagacatggcccagaacctgctgatggaccacctggccatctgcagcgagctggaggccaagcagatgctgctgaagagcctcatcaaggatgctgacagagtgatggctgacctgggcctgaatgaaaggcaggtgatccagaaggccctgagtgatgcccagagccacgtgaactgcctgagtgacctggtgggccagaggaggaagaagcacttcaaggaggactttgacaaggcctgccactggctgaagcaggccgacatcgtgaccttccctgagatcaacctgatgaatgaatcttctgagctgcacacccagctggccaagtaccagaacatcctggagcagagcccagaatatgagaacctgctgctgaccctgcagaggacaggccagaccatcctgcccagcctgaatgaggtggaccacagctacctgtctgagaagctgaatgccctgccccggcagttcaacgtcatcgtggccctggccaaggacaagttctacaaggtgcaggaggccatcctggccaggaaggagtatgccagcctgattgagctgaccacccagagcctgtctgagctggaggcccagttcctgaggatgagcaaggtgcccacagacctggccgtggaggaggccctgagcctgcaggacggctgccgggccatcctggatgaggtggccggcctgggggaggccgtggatgagctgaaccagaagaaggagggcttccgcagcacaggccagccctggcagcctgacaagatgctgcacctggtgaccctgtaccaccggctgaagaggcagacagagcagagggtgtccctgctggaggacaccaccagcgcctaccaggagcacgagaagatgtgccagcagctggagcggcagctgaagtctgtgaaggaggagcagagcaaggtgaatgaggagaccctgcctgctgaggagaagctgaagatgtaccacagcctggccggcagcctgcaggacagcggcatcgtgctgaagagggtgaccatccacctggaggacctggccccccacctggaccccctggcctatgagaaggcccggcaccagatccagagctggcagggcgagctgaagctgctgaccagcgccatcggggagaccgtgacagaatgtgagagcaggatggtgcagagcattgacttccagacagagatgagccgcagcctggactggctgcggcgggtgaaggccgagctgagcggccctgtgtacctggacctgaacctgcaggacatccaggaggagatcaggaagatccagatccaccaggaggaggtgcagagcagcctgcgcatcatgaatgccctgagccacaaggagaaggagaagttcaccaaggccaaggagctgatctctgctgacctggagcacagcctggccgagctgtctgagctggatggagacatccaggaggccctgcggacccggcaggccaccctgacagagatctacagccagtgccagcgctactaccaggtgttccaggccgccaatgactggctggaggatgcccaggagctgctgcagctggccggaaatggcctggatgtggagagcgctgaggagaacctgaagagccacatggagttcttcagcacagaggaccagttccacagcaacctggaggagctgcacagcctggtggccaccctggaccccctcatcaagcccaccgggaaggaggacctggagcagaaggtggccagcctggagctgcggagccagaggatgagccgggacagcggggcccaggccctggtgtctgtggtgaacagcttccacgagaagatcgtggccctggaggagaaggccagccagctggagaagacaggaaatgatgccagcaaggccaccctgagccgctccatgaccaccgtgtggcagcgctggacccggctgcgggctgtggcccaggaccaggagaagatcctggaggatgctgtggatgagtggacaggcttcaacaacaaggtgaagaaggccacagagatgattgaccagctgcaggacaagctgcccggcagcagcgctgagaaggccagcaaggccgagctgctgaccctgctggagtaccatgacacctttgtgctggagctggagcagcagcagagcgccctgggcatgctgcggcagcagaccctgtccatgctgcaggatggagctgcccccaccccaggagaggagccccccctgatgcaggagatcacagccatgcaggaccgctgcctgaagatggtggagacccagatcaacagcgtgaagtgctgggtgcaggagaccaaggagtacctgggcaaccccaccatcgagattgatgcccagctggaggagctgcagatcctgctgacagaggccaccaaccaccggcagaacatcgagaagatggccgaggagcagaaggagaagtacctgggcctgtacaccatcctgcccagcgagctgagcctgcagctggccgaggtggccctggacctgaagatccgggaccagatccaggacaagatcaaggaggtggagcagagcaaggccaccagccaggagctgagccggcagatccagaagctggccaaggacctgaccaccatcctgaccaagctgaaggccaagacagacaacgtggtgcaggccaagacagaccagaaggccgccagccacctggaggagtacaatgagatgctggagctgatcctgaagtggattgagaaggccaaggtgctggcccacggcaccatcgcctggaacagcgccagccagctgcgggagcagtacatcctgcaccagaccctgctggaggagagcaaggagattgattctgagctggaggccatgacagagaagctgcagtacctgacctctgtgtactgcacagagaagatgagccagcaggtggccgagctgggccgggagacagaggagctgcggcagatgatcaagatccggctgcagaacctgcaggatgctgccaaggacatgaagaagtttgaagctgagctgaagaagctgcaggccgccctggagcaggcccaggccaccctgaccagccctgaggtgggccgcctgagcctgaaggagcagctgagccaccggcagcacctgctgtctgagatggagagcctgaagcccaaggtgcaggccgtgcagctgtgccagagcgccctgcgcatcccagaagatgtggtggccagcctgcccctgtgccacgccgccctgcggctgcaggaggaggccagccggctgcagcacacagccatccagcagtgcaacatcatgcaggaggccgtggtgcagtatgagcagtatgagcaggagatgaagcacctgcagcagctgattgagggcgcccaccgggagattgaggacaagcctgtggccaccagcaacatccaggagctgcaggcccagatcagcagacatgaggagctggcccagaagatcaagggctaccaggagcagatcgccagcctgaacagcaagtgcaagatgctgaccatgaaggccaagcacgccaccatgctgctgactgtgacagaggtggagggcctggccgagggcacagaggacctggatggagagctgctgcccacccccagcgcccaccccagcgtggtgatgatgacagctggccgctgccacaccctgctgagccctgtgacagaggagagcggggaggagggcaccaacagcgagatcagcagccccccagcctgccgcagccccagccctgtggccaacacagatgcctctgtgaaccaggacatcgcctactaccaggccctgtctgctgagcggctgcagacagatgctgccaagatccaccccagcaccagcgccagccaggagttctatgagcccggcctggagcccagcgccacagccaagctgggggacctgcagaggtcctgggagaccctgaagaatgtcatcagcgagaagcagaggaccctgtatgaggccctggagcggcagcagaagtaccaggacagcctgcagagcatcagcaccaagatggaggccatcgagctgaagctgtctgagagccctgagcccggccgcagccctgagagccagatggccgagcaccaggccctgatggatgagatcctgatgctgcaggatgagatcaatgagctgcagagcagcctggccgaggagctggtgtctgagagctgtgaggccgaccctgctgagcagctggccctgcagagcaccctgactgtgctggccgagaggatgagcaccatccgcatgaaggccagcggcaagaggcagctgctggaggagaagctgaatgaccagctggaggagcagaggcaggagcaggccctgcagcgctaccgctgtgaggctgatgagctggacagctggctgctgagcaccaaggccaccctggacacagccctgagcccccccaaggagcccatggacatggaggcccagctgatggactgccagaacatgctggtggagattgagcagaaggtggtggccctgtctgagctgtctgtgcacaatgaaaacctgctgctggagggcaaggcccacaccaaggatgaggccgagcagctggccggcaagctgcggcggctgaagggcagcctgctggagctgcagagggccctgcatgacaagcagctgaacatgcagggcacagcccaggagaaggaggagagtgatgtggacctgacagccacccagagccctggggtgcaggagtggctggcccaggcccggaccacctggacccagcagaggcagagcagcctgcagcagcagaaggagctggagcaggagctggccgagcagaagagcctgctgcggtctgtggccagcagaggagaggagatcctgatccagcacagcgctgctgagaccagcggagatgctggggagaagccagatgtgctgagccaggagctgggcatggagggggagaagagcagcgctgaggaccagatgaggatgaagtgggagagcctgcaccaggagttcagcaccaagcagaagctgctgcagaatgtgctggagcaggagcaggagcaggtgctgtacagccggcccaaccggctgctgagcggcgtgcccctgtacaagggagatgtgcccacccaggacaagtctgctgtgaccagcctgctggatggcctgaaccaggcctttgaggaggtgagcagccagagcggcggggccaagaggcagagcatccacctggagcagaagctgtatgatggagtgtctgccaccagcacctggctggatgatgtggaggagcggctgtttgtggccacagccctgctgcctgaggagacagagacctgcctcttcaaccaggagatcctggccaaggacatcaaggagatgtctgaggagatggacaagaacaagaacctcttcagccaggccttcccagaaaatggagacaacagagatgtgattgaggacaccctgggctgcctgctgggccgcctgagcctgctggacagcgtggtgaaccagcgctgccaccagatgaaggagcggctgcagcagatcctgaacttccagaatgacctgaaggtgctcttcaccagcctggccgacaacaagtacatcatcctgcagaagctggccaacgtgtttgagcagcctgtggccgagcagatcgaggccatccagcaggccgaggatggcctgaaggagtttgatgctggcatcatcgagctgaagagaagaggagacaagctgcaggtggagcagcccagcatgcaggagctgagcaagctgcaggacatgtatgatgagctgatgatgatcatcggcagcagaagaagtggcctgaaccagaacctgaccctgaagagccagtatgagcgggccctgcaggacctggccgacctgctggagaccggccaggagaagatggccggggaccagaagatcatcgtgagcagcaaggaggagatccagcagctgctggacaagcacaaggagtacttccagggcctggagagccacatgatcctgacagagaccctcttcaggaagatcatcagctttgctgtgcagaaggagacccagttccacacagagctgatggcccaggccagcgctgtgctgaagagggcccacaagaggggcgtggagctggagtacatcctggagacctggagccacctggatgaggaccagcaggagctgagccggcagctggaggtggtggagagcagcatccccagcgtgggcctggtggaggagaatgaagatcggctgattgaccgcatcaccctgtaccagcacctgaagagcagcctgaatgagtaccagcccaagctgtaccaggtgctggatgatggcaagaggctgctgatcagcatcagctgcagcgacctggagagccagctgaaccagctgggggagtgctggctgagcaacaccaacaagatgagcaaggagctgcaccggctggagaccatcctgaagcactggacccgctaccagagcgagagcgctgacctgatccactggctgcagagcgccaaggaccggctggagttctggacccagcagagcgtgacagtgccccaggagctggagatggtgcgggaccacctgaatgccttcctggagttcagcaaggaggtggatgcccagagcagcctgaagagctctgtgctgagcacaggcaaccagctgctgcggctgaagaaggtggacacagccaccctgcggtctgagctgagcagaattgacagccagtggacagacctgctgaccaacatcccagctgtgcaggagaagctgcaccagctgcagatggacaagctgcccagcagacatgccatcagcgaggtgatgtcctggatcagcctgatggagaatgtcatccagaaggatgaggacaacatcaagaacagcatcggctacaaggccatccacgagtacctgcagaagtacaagggcttcaagattgacatcaactgcaagcagctgactgtggactttgtgaaccagagcgtgctgcagatcagcagccaggatgtggagagcaagagaagtgacaagacagactttgctgagcagctgggcgccatgaacaagtcctggcagatcctgcagggcctggtgacagagaagatccagctgctggagggcctgctggagagctggagcgaatatgagaacaacgtgcagtgcctgaagacctggtttgagacccaggagaagaggctgaagcagcagcacagaattggagaccaggcctctgtgcagaatgccctgaaggactgccaggacctggaggacctgatcaaggccaaggagaaggaggtggagaagattgagcagaatggcctggccctgatccagaacaagaaggaggatgtgagcagcatcgtgatgagcaccctgcgggagctgggccagacctgggccaacctggaccacatggtgggccagctgaagatcctgctgaagtctgtgctggaccagtggagcagccacaaggtggcctttgacaagatcaacagctacctgatggaggcccgctacagcctgagccgcttccggctgctgaccggcagcctggaggccgtgcaggtgcaggtggacaacctgcagaacctgcaggatgacctggagaagcaggagaggagcctgcagaagtttggcagcatcaccaaccagctgctgaaggagtgccacccccctgtgacagagaccctgaccaacaccctgaaggaggtgaacatgcgctggaacaacctgctggaggagattgctgagcagctgcagagcagcaaggccctgctgcagctgtggcagcgctacaaggactacagcaagcagtgtgccagcacagtgcagcagcaggaggacaggaccaatgagctgctgaaggccgccaccaacaaggacattgctgatgatgaggtggccacctggatccaggactgcaatgacctgctgaagggcctgggcaccgtgaaggacagcctcttcttcctgcacgagctgggggagcagctgaagcagcaggtggatgccagcgctgccagcgccatccagagcgaccagctgagcctgagccagcacctgtgtgccctggagcaggccctgtgcaagcagcagaccagcctgcaggccggcgtgctggactatgagacctttgccaagagcctggaggccctggaggcctggatcgtggaggccgaggagatcctgcagggccaggaccccagccacagcagtgacctgagcaccatccaggagaggatggaggagctgaagggccagatgctgaagttcagctccatggccccagacctggaccggctgaatgagctgggctaccgcctgcccctgaatgacaaggagatcaagaggatgcagaacctgaacagacactggagcctcatcagcagccagaccacagagcgcttcagcaagctgcagagcttcctgctgcagcaccagaccttcctggagaagtgtgagacctggatggagttcctggtgcagacagagcagaagctggccgtggagatcagcggcaactaccagcacctgctggagcagcagagggcccacgagctgttccaggccgagatgttcagccggcagcagatcctgcacagcatcatcattgatggccagaggctgctggagcagggccaggtggatgacagagatgagttcaacctgaagctgaccctgctgagcaaccagtggcagggcgtcatcagaagagcccagcagaggcggggcatcatcgacagccagatccggcagtggcagcgctaccgggagatggccgagaagctgaggaagtggctggtggaggtgtcctacctgcccatgagcggcctgggctctgtgcccatccccctgcagcaggcccggaccctgtttgatgaggtgcagttcaaggagaaggtgttcctgcggcagcagggcagctacatcctgactgtggaggccggcaagcagctgctgctgtctgctgacagcggggctgaggccgccctgcaggccgagctggccgagatccaggagaagtggaagagcgcctccatgaggctggaggagcagaagaagaagctggccttcctgctgaaggactgggagaagtgtgagaagggcattgctgacagcctggagaagctgcggaccttcaagaagaagctgagccagagcctgcctgaccaccacgaggagctgcatgctgagcagatgcgctgcaaggagctggagaatgctgtgggctcctggacagatgacctgacccagctgagcctgctgaaggacaccctgagcgcctacatctctgcagatgacatcagcatcctgaatgaaagagtggagctgctgcagaggcagtgggaggagctgtgccaccagctgagcctgcggcggcagcagattggagagcggctgaatgagtgggccgtgttcagcgagaagaacaaggagctgtgtgagtggctgacccagatggagagcaaggtgtcccagaatggagacatcctgattgaggagatgattgagaagctgaagaaggactaccaggaggagatcgccatcgcccaggagaacaagatccagctgcagcagatgggagagcggctggccaaggccagccatgagagcaaggccagcgagattgagtacaagctgggcaaggtgaatgaccgctggcagcacctgctggacctgattgctgcccgggtgaagaagctgaaggagaccctggtggccgtgcagcagctggacaagaacatgagcagcctgcggacctggctggcccacatcgagagcgagctggccaagcccatcgtgtatgacagctgcaacagcgaggagatccagaggaagctgaatgagcagcaggagctgcagagggacatcgagaagcacagcactggagtggcctctgtgctgaacctgtgtgaggtgctgctgcatgactgtgatgcctgtgccacagatgctgaatgtgacagcatccagcaggccaccaggaacctggaccggcgctggaggaacatctgtgccatgtccatggagcggcggctgaagattgaggagacctggaggctgtggcagaagttcctggatgactacagcagatttgaggactggctgaagagcagcgagaggacagctgccttccccagcagcagcggggtcatctacacagtggccaaggaggagctgaagaagtttgaggccttccagaggcaggtgcatgaatgtctgacccagctggagctgatcaacaagcagtaccgccgcctggccagagaaaatagaacagacagcgcctgcagcctgaagcagatggtgcatgagggcaaccagcgctgggacaacctgcagaagagggtgaccagcatcctgcggcggctgaagcacttcatcggccagcgggaggagtttgaaacagcccgggacagcatcctggtgtggctgacagagatggacctgcagctgaccaacatcgagcacttctctgaatgtgatgtgcaggccaagatcaagcagctgaaggccttccagcaggagatcagcctgaaccacaacaagattgagcagatcatcgcccagggcgagcagctgattgagaagtctgagcccctggatgctgccatcatcgaggaggagctggatgagctgcggcgctactgccaggaggtgtttggccgggtggagcgctaccacaagaagctgatccggctgcccctgcctgatgatgaacatgacctgagtgaccgggagctggagctggaggacagcgctgccctgagtgacctgcactggcatgacagatctgctgacagcctgctgagcccccagcccagcagcaacctgagcctgagcctggcccagcccctgcggtctgagaggagcggccgggacaccccagcctctgtggacagcatccccctggagtgggaccatgactatgacctgagccgggacctggagagcgccatgagccgggccctgcccagtgaagatgaggagggccaggatgacaaggacttctacctgcggggagctgtgggcctgagcggggaccacagcgccctggagagccagatccggcagctgggcaaggccctggatgacagccgcttccagatccagcagacagagaacatcatccgcagcaagacccccaccggccctgagctggacaccagctacaagggctacatgaagctgctgggagaatgtagcagcagcattgacagcgtgaagaggctggagcacaagctgaaggaggaggaggagagcctgcccggctttgtgaacctgcacagcacagagacccagacagctggggtcatcgaccgctgggagctgctgcaggcccaggccctgagcaaggagctgaggatgaagcagaacctgcagaagtggcagcagttcaacagcgacctgaacagcatctgggcctggctgggggacacagaggaggagctggagcagctgcagaggctggagctgagcacagacatccagaccatcgagctgcagatcaagaagctgaaggagctgcagaaggctgtggaccacaggaaggccatcatcctgagcatcaacctgtgcagccctgagttcacccaggccgacagcaaggagagccgggacctgcaggaccggctgagccagatgaatggccgctgggacagagtgtgcagcctgctggaggagtggaggggcctgctgcaggatgccctgatgcagtgccagggcttccacgagatgagccacggcctgctgctgatgctggagaacatcgacaggaggaagaatgagatcgtgcccatcgacagcaacctggatgctgagatcctgcaggaccaccacaagcagctgatgcagatcaagcatgagctgctggagagccagctgcgggtggccagcctgcaggacatgagctgccagctgctggtgaatgctgagggcacagactgcctggaggccaaggagaaggtgcacgtgattggcaaccggctgaagctgctgctgaaggaggtgagccgccacatcaaggagctggagaagctgctggatgtgagcagcagccagcaggacctgagctcctggagcagcgcagatgagctggacaccagcggctctgtgagccccaccagcggccgcagcacccccaaccggcagaagaccccccggggcaagtgcagcctgagccagcccggccccagcgtgagcagcccccacagccgcagcaccaagggcggcagtgacagcagcctgtctgagcccggccctggccgcagcggccggggcttcctgttccgggtgctgcgggccgccctgcccctgcagctgctgctgctgctgctgattggcctggcctgcctggtgcccatgtctgaggaggactacagctgtgccctgagcaacaactttgcccgctccttccaccccatgctgcgctacaccaacggccccccacccctgtag

SEQ ID NO: 257461 - DNA, 26394 bp, Artificial Sequence
  derived and/or modified sequence
atggccaccagcagaggagccagccgctgcccccgggacatcgccaacgtgatgcagaggctgcaggatgagcaggagatcgtgcagaagaggaccttcaccaagtggatcaacagccacctggccaagaggaagccacccatggtggtggatgacctgtttgaggacatgaaggatggagtgaagctgctggccctgctggaggtgctgagcggccagaagctgccctgtgagcagggccgcaggatgaagagaattcatgctgtggccaacatcggcacagccctgaagttcctggagggcaggaagatcaagctggtgaacatcaacagcacagacattgctgatggccggcccagcatcgtgctgggcctgatgtggaccatcatcctgtacttccagatcgaggagctgaccagcaacctgccccagctgcagagcctgagcagcagcgccagctctgtggacagcatcgtgtcctctgagacccccagcccccccagcaagaggaaggtgaccaccaagatccagggcaatgccaagaaggccctgctgaagtgggtgcagtacacagctgggaagcagacaggcatcgaggtgaaggactttgggaagtcctggaggtctggagtggccttccacagcgtcatccacgccatccggcctgagctggtggacctggagaccgtgaagggccgcagcaaccgggagaacctggaggatgccttcaccatcgccgagacagagctgggcatcccccggctgctggaccctgaagatgtggatgtggacaagccagatgagaagagcatcatgacctacgtggcccagttcctgaagcactacccagacatccacaatgccagcacagatggccaggaggatgatgagatcctgcccggcttccccagctttgccaacagcgtgcagaacttcaagagagaagatagagtcatcttcaaggagatgaaggtgtggattgagcagtttgagcgggacctgacccgggcccagatggtggagagcaacctgcaggacaagtaccagagcttcaagcacttccgggtgcagtatgagatgaagaggaagcagatcgagcacctgatccagcccctgcacagagatggcaagctgagcctggaccaggccctggtgaagcagagctgggacagagtgaccagccggctgtttgactggcacatccagctggacaagagcctgcctgcccccctgggcaccatcggggcctggctgtacagagctgaggtggccctgcgggaggagatcaccgtgcagcaggtgcatgaggagacagccaacaccatccagaggaagctggagcagcacaaggacctgctgcagaacacagatgcccacaagagggccttccacgagatctaccgcaccaggtctgtgaatggcatccctgtgcccccagaccagctggaggacatggccgagcgcttccactttgtgagcagcaccagcgagctgcacctgatgaagatggagttcctggagctgaagtaccgcctgctgagcctgctggtgctggccgagagcaagctgaagtcctggatcatcaagtatggccggcgggagagcgtggagcagctgctgcagaactacgtgtccttcatcgagaacagcaagttctttgagcagtatgaggtgacctaccagatcctgaagcagacagctgagatgtatgtgaaggcagatggctctgtggaggaggctgaaaatgtgatgaagttcatgaatgagaccacagcccagtggaggaacctgtctgtggaggtgcgctctgtgcgctccatgctggaggaggtgatcagcaactgggacagatatggcaacacagtggccagcctgcaggcctggctggaggatgctgagaagatgctgaaccagagtgaaaatgccaagaaggacttcttcaggaacctgccccactggatccagcagcacacagccatgaatgatgctggcaacttcctgattgagacctgtgatgagatggtgtcccgggacctgaagcagcagctgctgctgctgaatggccgctggagggagctgttcatggaggtgaagcagtatgcccaggctgatgagatggacaggatgaagaaggagtacacagactgtgtggtgaccctgagcgcctttgccacagaggcccacaagaagctgtctgagcccctggaggtgtccttcatgaatgtgaagctgctgatccaggacctggaggacatcgagcagagggtgcctgtgatggatgcccagtacaagatcatcaccaagacagcccacctgatcaccaaggagagcccccaggaggagggcaaggagatgtttgccaccatgagcaagctgaaggagcagctgaccaaggtgaaggagtgctacagccccctgctgtatgagagccagcagctgctgatccccctggaggagctggagaagcagatgaccagcttctatgacagcctgggcaagatcaatgagatcatcaccgtgctggagcgggaggcccagagcagcgccctcttcaagcagaagcaccaggagctgctggcctgccaggagaactgcaagaagaccctgaccctcatcgagaagggcagccagagcgtgcagaagtttgtgaccctgagcaatgtgctgaagcactttgaccagacccggctgcagaggcagattgctgacatccacgtggccttccagagcatggtgaagaagacaggagactggaagaagcacgtggagaccaacagccggctgatgaagaagtttgaggagagcagagctgagctggagaaggtgctgagaattgcccaggagggcctggaggagaagggggaccctgaggagctgctgcggcggcacacagagttcttcagccagctggaccagagggtgctgaatgccttcctgaaggcctgtgatgagctgacagacatcctgcctgagcaggagcagcagggcctgcaggaggccgtgaggaagctgcacaagcagtggaaggacctgcagggcgaggccccctaccacctgctgcacctgaagattgatgtggagaagaaccgcttcctggcctctgtggaggagtgcaggacagagctggaccgggagaccaagctgatgccccaggagggcagcgagaagatcatcaaggagcacagggtcttcttcagtgacaagggcccccaccacctgtgtgagaagaggctgcagctgattgaggagctgtgtgtgaagctgcctgtgcgggaccctgtgcgggacaccccaggcacctgccacgtgaccctgaaggagctgcgggccgccatcgacagcacctacaggaagctgatggaggaccctgacaagtggaaggactacaccagccgcttcagcgagttcagctcctggatcagcaccaatgagacccagctgaagggcatcaagggggaggccatcgacacagccaaccacggggaggtgaagagagctgtggaggagatcagaaatggagtgaccaagagaggagagaccctgtcctggctgaagagccggctgaaggtgctgacagaggtgtccagtgaaaatgaggcccagaagcagggagatgagctggccaagctgagcagcagcttcaaggccctggtgaccctgctgtctgaggtggagaagatgctgagcaactttggagactgtgtgcagtacaaggagatcgtgaagaacagcctggaggagctgatcagcggcagcaaggaggtgcaggagcaggccgagaagatcctggacacagagaacctgtttgaggcccagcagctgctgctgcaccaccagcagaagaccaagaggatcagcgccaagaagagagatgtgcagcagcagatcgcccaggcccagcagggcgagggcggcctgcctgaccggggccacgaggagctgaggaagctggagagcaccctggatggcctggagaggagccgggagcggcaggagcggcgcatccaggtgaccctgaggaagtgggagagatttgagaccaacaaggagaccgtggtgcgctacctgttccagacaggcagcagccatgagcgcttcctgtccttcagcagcctggagagcctgagcagcgagctggagcagaccaaggagttcagcaagaggacagagagcattgctgtgcaggccgagaacctggtgaaggaggccagcgagatccccctgggcccccagaacaagcagctgctgcagcagcaggccaagagcatcaaggagcaggtgaagaagctggaggacaccctggaggaggacatcaagaccatggagatggtgaagaccaagtgggaccacttcggcagcaactttgagaccctgtctgtgtggatcacagagaaggagaaggagctgaatgccctggagaccagcagcagcgccatggacatgcagatcagccagatcaaggtgaccatccaggagattgagagcaagctgagcagcatcgtgggcctggaggaggaggcccagagctttgcccagtttgtgaccaccggggagagcgcccgcatcaaggccaagctgacccagatccgccgctacggggaggagctgcgggagcacgcccagtgcctggagggcaccatcctgggccacctgagccagcagcagaagtttgaggagaacctgaggaagatccagcagagcgtgtctgaatttgaggacaagctggccgtgcccatcaagatctgcagcagcgccacagagacctacaaggtgctgcaggagcacatggacctgtgccaggccctggagagcctgagcagcgccatcacagccttcagcgccagcgccaggaaggtggtgaacagagacagctgtgtgcaggaggccgccgccctgcagcagcagtatgaggacatcctgcggcgggccaaggagcggcagacagccctggagaacctgctggcccactggcagaggctggagaaggagctgagcagcttcctgacctggctggagcggggggaggccaaggccagcagccctgagatggacatctctgctgacagagtgaaggtggagggggagctgcagctgatccaggccctgcagaatgaggtggtgtcccaggccagcttctacagcaagctgctgcagctgaaggagagcctcttctctgtggccagcaaggatgatgtgaagatgatgaagctgcacctggagcagctggatgagcgctggagggacctgccccagatcatcaacaagaggatcaacttcctgcagagcgtggtggccgagcaccagcagtttgatgagctgctgctgtccttctctgtgtggatcaagctgttcctgtctgagctgcagaccaccagcgagatcagcatcatggaccaccaggtggccctgaccaggcacaaggaccacgccgctgaggtggagagcaagaagggggagctgcagagcctgcagggccacctggccaagctgggcagcctgggccgggcagaggacctgcacctgctgcagggcaaggccgaggactgcttccagctgtttgaggaggccagccaggtggtggagcggcggcagctggccctgagccacctggccgagttcctgcagagccacgccagcctgagcggcatcctgcggcagctgcggcagacagtggaggccaccaacagcatgaacaagaatgaaagtgacctgattgagaaggacctgaatgatgccctgcagaatgccaaggccctggagagcgctgctgtgtccctggatggcatcctgagcaaggcccagtaccacctgaagattggcagcagcgagcagaggaccagctgccgggccacagctgaccagctgtgtggggaggtggagcgcatccagaacctgctgggcaccaagcagagcgaggctgatgccctggccgtgctgaagaaggccttccaggaccagaaggaggagctgctgaagagcattgaagatattgaggagaggacagacaaggagcggctgaaggagcccacccggcaggccctgcagcagaggctgcgggtcttcaaccagctggaggatgagctgaacagccatgaacatgagctgtgctggctgaaggacaaggccaagcagatcgcccagaaggatgtggcctttgcccctgaggtggaccgggagatcaaccggctggaggtgacctgggatgacaccaagaggctcatccacgagaaccagggccagtgctgcggcctgattgacctgatgagggagtaccagaacctgaagtctgctgtgtccaaggtgctggagaatgccagctctgtgattgtgaccaggaccaccatcaaggaccaggaggacctgaagtgggccttcagcaagcatgaaacagccaagaacaagatgaactacaagcagaaggacctggacaacttcaccagcaagggcaagcacctgctgtctgagctgaagaagatccacagcagtgacttcagcctggtgaagacagacatggagagcacagtggacaagtggctggatgtgtctgagaagctggaggagaacatggaccggctgcgggtgtccctgagcatctgggatgatgtgctgagcaccagagatgaaattgagggctggagcaacaactgtgtgccccagatggccgagaacatcagcaacctggacaaccacctgcgggcagaggagctgctgaaggagtttgagagcgaggtgaagaacaaggccctgcggctggaggagctgcacagcaaggtgaatgacctgaaggagctgaccaagaacctggagaccccaccagacctgcagttcattgaagctgacctgatgcagaagctggagcacgccaaggagatcacagaggtggccaagggcaccctgaaggacttcaccgcccagagcacccaggtggagaagttcatcaatgacatcaccacctggttcaccaaggtggaggagagcctgatgaactgtgcccagaatgagacctgtgaggccctgaagaaggtgaaggacatccagaaggagctgcagagccagcagagcaacatcagcagcacccaggagaacctgaacagcctgtgcaggaagtaccacagcgctgagctggagagcctgggccgggccatgacaggcctcatcaagaagcatgaagctgtgtcccagctgtgcagcaagacccaggccagcctgcaggagagcctggagaagcacttcagcgagagcatgcaggagttccaggagtggttcctgggcgccaaggccgccgccaaggagagcagtgacagaactggagacagcaaggtgctggaggccaagctgcatgacctgcagaacatcctggacagcgtgtctgatggccagagcaagctggatgctgtgacccaggagggccagaccctgtatgcccacctgagcaagcagatcgtgagcagcatccaggagcagatcaccaaggccaatgaggagttccaggccttcctgaagcagtgcctgaaggacaagcaggccctgcaggactgtgccagcgagctgggcagctttgaggaccagcacaggaagctgaacctgtggatccacgagatggaggagcgcttcaacacagagaacctgggggagagcaagcagcacatccctgagaagaagaatgaggtgcacaaggtggagatgttcctgggggagctgctggccgcccgggagagcctggacaagctgagccagaggggccagctgctgtctgaggagggccatggagctggccaggagggccgcctgtgcagccagctgctgaccagccaccagaacctgctgaggatgaccaaggagaagctgcggagctgccaggtggccctgcaggagcacgaggccctggaggaggccctgcagagcatgtggttctgggtgaaggccatccaggaccggctggcctgtgccgagagcaccctgggcagcaaggacaccctggagaagaggctgagccagatccaggacatcctgctgatgaagggggagggggaggtgaagctgaacatggccatcggcaaaggagagcaggccctgcggagcagcaacaaggagggccagagggtcatccagacccagctggagaccctgaaggaggtgtgggccgacatcatgagcagctctgtgcacgcccagagcaccctggagagcgtcatcagccagtggaatgactatgtggagaggaagaaccagctggagcagtggatggagagcgtggaccagaagattgagcaccccctgcagccccagcccggcctgaaggagaagtttgtgctgctggaccacctgcagagcatcctgtctgaggccgaggaccacacccgggccctgcacaggctcatcgccaagagccgggagctgtatgagaagacagaagatgagagcttcaaggacacagcccaggaggagctgaagacccagttcaatgacatcatgacagtggccaaggagaagatgaggaaggtggaggagatcgtgaaggaccacctgatgtacctggatgctgtgcatgagttcacagactggctgcacagcgccaaggaggagctgcaccgctggagcgacatgtctggggacagcagcgccacccagaagaagctgagcaagatcaaggagctgattgacagccgggagatcggggccagccggctgagccgggtggagagcctggcccctgaggtgaagcagaacaccacagccagcggctgtgagctgatgcacacagagatgcaggccctgcgggctgactggaagcagtgggaggacagcgtcttccagacccagagctgcctggagaacctggtgtcccagatggccctgtctgagcaggagttcagcggccaggtggcccagctggagcaggccctggagcagttcagcgccctgctgaagacctgggcccagcagctgaccctgctggagggcaagaacacagatgaggagatcgtggagtgctggcacaagggccaggagatcctggatgccctgcagaaggccgagcccaggacagaggacctgaagagccagctgaatgagctgtgccgcttcagccgggacctgagcacctacagcggcaaggtgtctggcctcatcaaggagtacaactgcctgtgcctgcaggccagcaagggctgccagaacaaggagcagatcctgcagcagcgcttcaggaaggccttccgggacttccagcagtggctggtgaatgccaagatcaccacagccaagtgctttgacatcccccagaacatcagcgaggtgtccaccagcctgcagaagatccaggagttcctgtctgagagtgaaaatggccagcacaagctgaacatgatgctgagcaaaggagagctgctgagcaccctgctgaccaaggagaaggccaagggcatccaggccaaggtgacagctgccaaggaggactggaagaacttccacagcaacctgcaccagaaggagagcgccctggagaacctgaagatccagatgaaggactttgaggtgtctgctgagcccatccaggactggctgagcaagacagagaagatggtgcatgagagcagcaaccggctgtatgacctgcctgccaagaggcgggagcagcagaagctgcagagcgtgctggaggagatccactgctatgagccccagctgaaccggctgaaggagaaggcccagcagctgtgggagggccaggccgccagcaagagcttccgccaccgggtgtcccagctgagcagccagtacctggccctgagcaacctgaccaaggagaaggtgtcccggctggaccgcatcgtggccgagcacaaccagttcagcctgggcatcaaggagctgcaggactggatgacagatgccatccacatgctggacagctactgccaccccaccagtgacaagtctgtgctggacagcaggaccctgaagctggaggccctgctgtctgtgaagcaggagaaggagatccagatgaagatgattgtgaccagaggagagagcgtgctgcagaacaccagccctgagggcatccccaccatccagcagcagctgcagagcgtgaaggacatgtgggccagcctgctgtctgctggcatccgctgcaagagccagctggagggcgccctgagcaagtggaccagctaccaggatggagtgcggcagttcagcggctggatggacagcatggaggccaacctgaatgaaagtgagcggcagcacgccgagctgcgggacaagaccaccatgctgggcaaggccaagctgctgaatgaggaggtgctgagctacagcagcctgctggagaccatcgaggtgaagggggccggcatgacagagcactacgtgacccagctggagctgcaggacctgcaggagcgctaccgggccatccaggagcgggccaaggaggccgtgaccaagtctgagaagctggtgcggctgcaccaggagtaccagagggacctgaaggcctttgaggtgtggctgggccaggagcaggagaagctggaccagtacagcgtgctggagggagatgcccacacccatgagaccaccctgcgggacctgcaggagctgcaggtgcactgtgccgagggccaggccctgctgaacagcgtgctgcacaccagagaagatgtgatccccagcggcatcccccaggccgaggaccgggccctggagagcctgcggcaggactggcaggcctaccagcaccggctgtctgagaccaggacccagttcaacaacgtggtgaacaagctgcggctgatggagcagaagttccagcaggtggatgagtggctgaagacagctgaggagaaggtgagccccaggacccggcggcagagcaacagagccaccaaggagatccagctgcaccagatgaagaagtggcatgaggaggtgacagcctacagagatgaggtggaggaggtgggcgcccgggcccaggagatcctggatgagagccacgtgaacagcaggatgggctgccaggccacccagctgaccagccgctaccaggccctgctgctgcaggtgctggagcagatcaagttcctggaggaggagatccagagcctggaggagagcgagagcagcctgagcagctacagcgactggtacggcagcacccacaagaacttcaagaatgtggccaccaagattgacaaggtggacacagtgatgatgggcaagaagctgaagaccctggaggtgctgctgaaggacatggagaagggccacagcctgctgaagagcgcccgggagaagggggagagagctgtgaagtacctggaggagggggaggccgagcggctgaggaaggagatccatgaccacatggagcagctgaaggagctgaccagcacagtgaggaaggagcacatgaccctggagaagggcctgcacctggccaaggagttcagtgacaagtgcaaggccctgacccagtggattgctgagtaccaggagatcctgcacgtgcctgaggagcccaagatggagctgtatgagaagaaggcccagctgagcaagtacaagagcctgcagcagacagtgctgagccatgagcccagcgtgaagtctgtgcgggagaagggggaggccctgctggagctggtgcaggatgtgaccctgaaggacaagattgaccagctgcagagcgactaccaggacctgtgcagcatcggcaaggagcacgtgttcagcctggaggccaaggtgaaggaccacgaggactacaacagcgagctgcaggaggtggagaagtggctgctgcagatgagcggccgcctggtggccccagacctgctggagaccagcagcctggagaccatcacccagcagctggcccaccacaaggccatgatggaggagattgctggctttgaagatcggctgaacaacctgcagatgaagggggacaccctgattggccagtgtgccgaccacctgcaggccaagctgaagcagaatgtgcacgcccacctgcagggcaccaaggacagctacagcgccatctgcagcacagcccagaggatgtaccagagcctggagcacgagctgcagaagcacgtgtcccggcaggacaccctgcagcagtgccaggcctggctgtctgctgtgcagcctgacctggagcccagcccccagccccccctgagcagagctgaggccatcaagcaggtgaagcacttccgggccctgcaggagcaggcccggacctacctggacctgctgtgcagcatgtgtgacctgagcaatgcctctgtgaagaccacagccaaggacatccagcagacagagcagaccatcgagcagaagctggtgcaggcccagaacctgacccagggctgggaggagatcaagcacctgaagtctgagctgtggatctacctgcaggatgctgaccagcagctgcagaacatgaagaggaggcacagcgagctggagctgaacatcgcccagaacatggtgtcccaggtgaaggactttgtgaagaagctgcagagcaagcaggcctctgtgaacaccatcatcgagaaggtgaacaagctgaccaagaaggaggagagccctgagcacaaggagatcaaccacctgaatgaccagtggctggacctgtgccggcagagcaacaacctgtgcctgcagcgggaggaggacctgcagaggacccgggactaccatgactgcatgaatgtggtggaggtgttcctggagaagttcaccacagagtgggacaacctggcccggagtgatgctgagagcacagctgtgcacctggaggccctgaagaagctggccctggccctgcaggagaggaaatatgccatcgaggacctgaaggaccagaagcagaagatgattgagcacctgaacctggatgacaaggagctggtgaaggagcagaccagccacctggagcagcgctggttccagctggaggacctgatcaagaggaagatccaggtgtctgtgaccaacctggaggagctgaatgtggtgcagagccgcttccaggagctgatggagtgggccgaggagcagcagcccaacattgctgaggccctgaagcagagccccccaccagacatggcccagaacctgctgatggaccacctggccatctgcagcgagctggaggccaagcagatgctgctgaagagcctcatcaaggatgctgacagagtgatggctgacctgggcctgaatgaaaggcaggtgatccagaaggccctgagtgatgcccagagccacgtgaactgcctgagtgacctggtgggccagaggaggaagtacctgaacaaggccctgtctgagaagacccagttcctgatggctgtgttccaggccaccagccagatccagcagcacgagaggaagatcatgttccgggagcacatctgcctgctgcctgatgatgtgtccaagcaggtgaagacctgcaagagcgcccaggccagcctgaagacctaccagaatgaggtgacaggcctgtgggcccagggccgggagctgatgaaggaggtgacagagcaggagaagtctgaggtgctgggcaagctgcaggagctgcagagcgtgtatgattctgtgctgcagaagtgcagccaccggctgcaggagctggagaagaacctggtgtccaggaagcacttcaaggaggactttgacaaggcctgccactggctgaagcaggccgacatcgtgaccttccctgagatcaacctgatgaatgaaagcagcgagctgcacacccagctggccaagtaccagaacatcctggagcagagcccagaatatgagaacctgctgctgaccctgcagaggacaggccagaccatcctgcccagcctgaatgaggtggaccacagctacctgtctgagaagctgaatgccctgccccggcagttcaacgtgattgtggccctggccaaggacaagttctacaaggtgcaggaggccatcctggccaggaaggagtatgccagcctcatcgagctgaccacccagagcctgtctgagctggaggcccagttcctgaggatgagcaaggtgcccacagacctggccgtggaggaggccctgagcctgcaggacggctgccgggccatcctggatgaggtggccggcctgggggaggccgtggatgagctgaaccagaagaaggagggcttccgcagcacaggccagccctggcagcctgacaagatgctgcacctggtgaccctgtaccaccggctgaagaggcagacagagcagagggtgtccctgctggaggacaccaccagcgcctaccaggagcacgagaagatgtgccagcagctggagcggcagctgaagtctgtgaaggaggagcagagcaaggtgaatgaggagaccctgcctgctgaggagaagctgaagatgtaccacagcctggccggcagcctgcaggacagcggcatcgtgctgaagagggtgaccatccacctggaggacctggccccccacctggaccccctggcctatgagaaggcccggcaccagatccagagctggcagggcgagctgaagctgctgaccagcgccatcggggagaccgtgacagaatgtgagagcaggatggtgcagagcattgacttccagacagagatgagccgcagcctggactggctgcggcgggtgaaggccgagctgagcggccctgtgtacctggacctgaacctgcaggacatccaggaggagatcaggaagatccagatccaccaggaggaggtgcagagcagcctgcgcatcatgaatgccctgagccacaaggagaaggagaagttcaccaaggccaaggagctgatctctgctgacctggagcacagcctggccgagctgtctgagctggatggagacatccaggaggccctgcggacccggcaggccaccctgacagagatctacagccagtgccagcgctactaccaggtgttccaggccgccaatgactggctggaggatgcccaggagctgctgcagctggccggaaatggcctggatgtggagagcgctgaggagaacctgaagagccacatggagttcttcagcacagaggaccagttccacagcaacctggaggagctgcacagcctggtggccaccctggaccccctcatcaagcccaccgggaaggaggacctggagcagaaggtggccagcctggagctgcggagccagaggatgagccgggacagcggggcccaggtggacctgctgcagcgctgcacagcccagtggcatgactaccagaaggcccgggaggaggtgattgagctgatgaatgacacagagaagaagctgtctgagttcagcctgctgaagaccagcagcagccatgaggccgaggagaagctgtctgagcacaaggccctggtgtctgtggtgaacagcttccacgagaagatcgtggccctggaggagaaggccagccagctggagaagacaggaaatgatgccagcaaggccaccctgagccgctccatgaccaccgtgtggcagcgctggacccggctgcgggctgtggcccaggaccaggagaagatcctggaggatgctgtggatgagtggacaggcttcaacaacaaggtgaagaaggccacagagatgattgaccagctgcaggacaagctgcccggcagcagcgctgagaaggccagcaaggccgagctgctgaccctgctggagtaccatgacacctttgtgctggagctggagcagcagcagagcgccctgggcatgctgcggcagcagaccctgtccatgctgcaggatggagctgcccccaccccaggagaggagccccccctgatgcaggagatcacagccatgcaggaccgctgcctgaacatgcaggagaaggtgaagaccaacgggaagctggtgaagcaggagctgaaggaccgggagatggtggagacccagatcaacagcgtgaagtgctgggtgcaggagaccaaggagtacctgggcaaccccaccattgaaattgatgcccagctggaggagctgcagatcctgctgacagaggccaccaaccaccggcagaacatcgagaagatggccgaggagcagaaggagaagtacctgggcctgtacaccatcctgcccagcgagctgagcctgcagctggccgaggtggccctggacctgaagatccgggaccagatccaggacaagatcaaggaggtggagcagagcaaggccaccagccaggagctgagccggcagatccagaagctggccaaggacctgaccaccatcctgaccaagctgaaggccaagacagacaacgtggtgcaggccaagacagaccagaaggtgctgggggaggagctggatggctgcaacagcaagctgatggagctggatgctgctgtgcagaagttcctggagcagaatggccagctgggcaagcccctggccaagaagattggcaagctgacagagctgcaccagcagaccatccggcaggccgagaaccggctgagcaagctgaaccaggccgccagccacctggaggagtacaatgagatgctggagctgatcctgaagtggattgagaaggccaaggtgctggcccacggcaccatcgcctggaacagcgccagccagctgcgggagcagtacatcctgcaccagaccctgctggaggagagcaaggagattgattctgagctggaggccatgacagagaagctgcagtacctgacctctgtgtactgcacagagaagatgagccagcaggtggccgagctgggccgggagacagaggagctgcggcagatgatcaagatccggctgcagaacctgcaggatgctgccaaggacatgaagaagtttgaagctgagctgaagaagctgcaggccgccctggagcaggcccaggccaccctgaccagccctgaggtgggccgcctgagcctgaaggagcagctgagccaccggcagcacctgctgtctgagatggagagcctgaagcccaaggtgcaggccgtgcagctgtgccagagcgccctgcgcatcccagaagatgtggtggccagcctgcccctgtgccacgccgccctgcggctgcaggaggaggccagccggctgcagcacacagccatccagcagtgcaacatcatgcaggaggccgtggtgcagtatgagcagtatgagcaggagatgaagcacctgcagcagctgattgagggcgcccaccgggagattgaggacaagcctgtggccaccagcaacatccaggagctgcaggcccagatcagcagacatgaggagctggcccagaagatcaagggctaccaggagcagatcgccagcctgaacagcaagtgcaagatgctgaccatgaaggccaagcacgccaccatgctgctgactgtgacagaggtggagggcctggccgagggcacagaggacctggatggagagctgctgcccacccccagcgcccaccccagcgtggtgatgatgacagctggccgctgccacaccctgctgagccctgtgacagaggagagcggggaggagggcaccaacagcgagatcagcagccccccagcctgccgcagccccagccctgtggccaacacagatgcctctgtgaaccaggacatcgcctactaccaggccctgtctgctgagcggctgcagacagatgctgccaagatccaccccagcaccagcgccagccaggagttctatgagcccggcctggagcccagcgccacagccaagctgggggacctgcagaggtcctgggagaccctgaagaatgtcatcagcgagaagcagaggaccctgtatgaggccctggagcggcagcagaagtaccaggacagcctgcagagcatcagcaccaagatggaggccatcgagctgaagctgtctgagagccctgagcccggccgcagccctgagagccagatggccgagcaccaggccctgatggatgagatcctgatgctgcaggatgagatcaatgagctgcagagcagcctggccgaggagctggtgtctgagagctgtgaggccgaccctgctgagcagctggccctgcagagcaccctgactgtgctggccgagaggatgagcaccatccgcatgaaggccagcggcaagaggcagctgctggaggagaagctgaatgaccagctggaggagcagaggcaggagcaggccctgcagcgctaccgctgtgaggctgatgagctggacagctggctgctgagcaccaaggccaccctggacacagccctgagcccccccaaggagcccatggacatggaggcccagctgatggactgccagaacatgctggtggagattgagcagaaggtggtggccctgtctgagctgtctgtgcacaatgaaaacctgctgctggagggcaaggcccacaccaaggatgaggccgagcagctggccggcaagctgcggcggctgaagggcagcctgctggagctgcagagggccctgcatgacaagcagctgaacatgcagggcacagcccaggagaaggaggagagtgatgtggacctgacagccacccagagccctggggtgcaggagtggctggcccaggcccggaccacctggacccagcagaggcagagcagcctgcagcagcagaaggagctggagcaggagctggccgagcagaagagcctgctgcggtctgtggccagcagaggagaggagatcctgatccagcacagcgctgctgagaccagcggagatgctggggagaagccagatgtgctgagccaggagctgggcatggagggggagaagagcagcgctgaggaccagatgaggatgaagtgggagagcctgcaccaggagttcagcaccaagcagaagctgctgcagaatgtgctggagcaggagcaggagcaggtgctgtacagccggcccaaccggctgctgagcggcgtgcccctgtacaagggagatgtgcccacccaggacaagtctgctgtgaccagcctgctggatggcctgaaccaggcctttgaggaggtgagcagccagagcggcggggccaagaggcagagcatccacctggagcagaagctgtatgatggagtgtctgccaccagcacctggctggatgatgtggaggagcggctgtttgtggccacagccctgctgcctgaggagacagagacctgcctcttcaaccaggagatcctggccaaggacatcaaggagatgtctgaggagatggacaagaacaagaacctcttcagccaggccttcccagaaaatggagacaacagagatgtgattgaggacaccctgggctgcctgctgggccgcctgagcctgctggacagcgtggtgaaccagcgctgccaccagatgaaggagcggctgcagcagatcctgaacttccagaatgacctgaaggtgctcttcaccagcctggccgacaacaagtacatcatcctgcagaagctggccaacgtgtttgagcagcctgtggccgagcagatcgaggccatccagcaggccgaggatggcctgaaggagtttgatgctggcatcatcgagctgaagagaagaggagacaagctgcaggtggagcagcccagcatgcaggagctgagcaagctgcaggacatgtatgatgagctgatgatgatcatcggcagcagaagaagtggcctgaaccagaacctgaccctgaagagccagtatgagcgggccctgcaggacctggccgacctgctggagaccggccaggagaagatggccggggaccagaagatcatcgtgagcagcaaggaggagatccagcagctgctggacaagcacaaggagtacttccagggcctggagagccacatgatcctgacagagaccctcttcaggaagatcatcagctttgctgtgcagaaggagacccagttccacacagagctgatggcccaggccagcgctgtgctgaagagggcccacaagaggggcgtggagctggagtacatcctggagacctggagccacctggatgaggaccagcaggagctgagccggcagctggaggtggtggagagcagcatccccagcgtgggcctggtggaggagaatgaagatcggctgattgaccgcatcaccctgtaccagcacctgaagagcagcctgaatgagtaccagcccaagctgtaccaggtgctggatgatggcaagaggctgctgatcagcatcagctgcagcgacctggagagccagctgaaccagctgggggagtgctggctgagcaacaccaacaagatgagcaaggagctgcaccggctggagaccatcctgaagcactggacccgctaccagagcgagagcgctgacctgatccactggctgcagagcgccaaggaccggctggagttctggacccagcagagcgtgacagtgccccaggagctggagatggtgcgggaccacctgaatgccttcctggagttcagcaaggaggtggatgcccagagcagcctgaagagctctgtgctgagcacaggcaaccagctgctgcggctgaagaaggtggacacagccaccctgcggtctgagctgagcagaattgacagccagtggacagacctgctgaccaacatcccagctgtgcaggagaagctgcaccagctgcagatggacaagctgcccagcagacatgccatcagcgaggtgatgtcctggatcagcctgatggagaatgtcatccagaaggatgaggacaacatcaagaacagcatcggctacaaggccatccacgagtacctgcagaagtacaagggcttcaagattgacatcaactgcaagcagctgactgtggactttgtgaaccagagcgtgctgcagatcagcagccaggatgtggagagcaagagaagtgacaagacagactttgctgagcagctgggcgccatgaacaagtcctggcagatcctgcagggcctggtgacagagaagatccagctgctggagggcctgctggagagctggagcgaatatgagaacaacgtgcagtgcctgaagacctggtttgagacccaggagaagaggctgaagcagcagcacagaattggagaccaggcctctgtgcagaatgccctgaaggactgccaggacctggaggacctgatcaaggccaaggagaaggaggtggagaagattgagcagaatggcctggccctgatccagaacaagaaggaggatgtgagcagcatcgtgatgagcaccctgcgggagctgggccagacctgggccaacctggaccacatggtgggccagctgaagatcctgctgaagtctgtgctggaccagtggagcagccacaaggtggcctttgacaagatcaacagctacctgatggaggcccgctacagcctgagccgcttccggctgctgaccggcagcctggaggccgtgcaggtgcaggtggacaacctgcagaacctgcaggatgacctggagaagcaggagaggagcctgcagaagtttggcagcatcaccaaccagctgctgaaggagtgccacccccctgtgacagagaccctgaccaacaccctgaaggaggtgaacatgcgctggaacaacctgctggaggagattgctgagcagctgcagagcagcaaggccctgctgcagctgtggcagcgctacaaggactacagcaagcagtgtgccagcacagtgcagcagcaggaggacaggaccaatgagctgctgaaggccgccaccaacaaggacattgctgatgatgaggtggccacctggatccaggactgcaatgacctgctgaagggcctgggcaccgtgaaggacagcctcttcttcctgcacgagctgggggagcagctgaagcagcaggtggatgccagcgctgccagcgccatccagagcgaccagctgagcctgagccagcacctgtgtgccctggagcaggccctgtgcaagcagcagaccagcctgcaggccggcgtgctggactatgagacctttgccaagagcctggaggccctggaggcctggatcgtggaggccgaggagatcctgcagggccaggaccccagccacagcagtgacctgagcaccatccaggagaggatggaggagctgaagggccagatgctgaagttcagctccatggccccagacctggaccggctgaatgagctgggctaccgcctgcccctgaatgacaaggagatcaagaggatgcagaacctgaacagacactggagcctcatcagcagccagaccacagagcgcttcagcaagctgcagagcttcctgctgcagcaccagaccttcctggagaagtgtgagacctggatggagttcctggtgcagacagagcagaagctggccgtggagatcagcggcaactaccagcacctgctggagcagcagagggcccacgagctgttccaggccgagatgttcagccggcagcagatcctgcacagcatcatcattgatggccagaggctgctggagcagggccaggtggatgacagagatgagttcaacctgaagctgaccctgctgagcaaccagtggcagggcgtcatcagaagagcccagcagaggcggggcatcatcgacagccagatccggcagtggcagcgctaccgggagatggccgagaagctgaggaagtggctggtggaggtgtcctacctgcccatgagcggcctgggctctgtgcccatccccctgcagcaggcccggaccctgtttgatgaggtgcagttcaaggagaaggtgttcctgcggcagcagggcagctacatcctgactgtggaggccggcaagcagctgctgctgtctgctgacagcggggctgaggccgccctgcaggccgagctggccgagatccaggagaagtggaagagcgcctccatgaggctggaggagcagaagaagaagctggccttcctgctgaaggactgggagaagtgtgagaagggcattgctgacagcctggagaagctgcggaccttcaagaagaagctgagccagagcctgcctgaccaccacgaggagctgcatgctgagcagatgcgctgcaaggagctggagaatgctgtgggctcctggacagatgacctgacccagctgagcctgctgaaggacaccctgagcgcctacatctctgcagatgacatcagcatcctgaatgaaagagtggagctgctgcagaggcagtgggaggagctgtgccaccagctgagcctgcggcggcagcagattggagagcggctgaatgagtgggccgtgttcagcgagaagaacaaggagctgtgtgagtggctgacccagatggagagcaaggtgtcccagaatggagacatcctgattgaggagatgattgagaagctgaagaaggactaccaggaggagatcgccatcgcccaggagaacaagatccagctgcagcagatgggagagcggctggccaaggccagccatgagagcaaggccagcgagattgagtacaagctgggcaaggtgaatgaccgctggcagcacctgctggacctgattgctgcccgggtgaagaagctgaaggagaccctggtggccgtgcagcagctggacaagaacatgagcagcctgcggacctggctggcccacatcgagagcgagctggccaagcccatcgtgtatgacagctgcaacagcgaggagatccagaggaagctgaatgagcagcaggagctgcagagggacatcgagaagcacagcactggagtggcctctgtgctgaacctgtgtgaggtgctgctgcatgactgtgatgcctgtgccacagatgctgaatgtgacagcatccagcaggccaccaggaacctggaccggcgctggaggaacatctgtgccatgtccatggagcggcggctgaagattgaggagacctggaggctgtggcagaagttcctggatgactacagcagatttgaggactggctgaagagcagcgagaggacagctgccttccccagcagcagcggggtcatctacacagtggccaaggaggagctgaagaagtttgaggccttccagaggcaggtgcatgaatgtctgacccagctggagctgatcaacaagcagtaccgccgcctggccagagaaaatagaacagacagcgcctgcagcctgaagcagatggtgcatgagggcaaccagcgctgggacaacctgcagaagagggtgaccagcatcctgcggcggctgaagcacttcatcggccagcgggaggagtttgaaacagcccgggacagcatcctggtgtggctgacagagatggacctgcagctgaccaacatcgagcacttctctgaatgtgatgtgcaggccaagatcaagcagctgaaggccttccagcaggagatcagcctgaaccacaacaagattgagcagatcatcgcccagggcgagcagctgattgagaagtctgagcccctggatgctgccatcatcgaggaggagctggatgagctgcggcgctactgccaggaggtgtttggccgggtggagcgctaccacaagaagctgatccggctgcccctgcctgatgatgaacatgacctgagtgaccgggagctggagctggaggacagcgctgccctgagtgacctgcactggcatgacagatctgctgacagcctgctgagcccccagcccagcagcaacctgagcctgagcctggcccagcccctgcggtctgagaggagcggccgggacaccccagcctctgtggacagcatccccctggagtgggaccatgactatgacctgagccgggacctggagagcgccatgagccgggccctgcccagtgaagatgaggagggccaggatgacaaggacttctacctgcggggagctgtgggcctgagcggggaccacagcgccctggagagccagatccggcagctgggcaaggccctggatgacagccgcttccagatccagcagacagagaacatcatccgcagcaagacccccaccggccctgagctggacaccagctacaagggctacatgaagctgctgggagaatgtagcagcagcattgacagcgtgaagaggctggagcacaagctgaaggaggaggaggagagcctgcccggctttgtgaacctgcacagcacagagacccagacagctggggtcatcgaccgctgggagctgctgcaggcccaggccctgagcaaggagctgaggatgaagcagaacctgcagaagtggcagcagttcaacagcgacctgaacagcatctgggcctggctgggggacacagaggaggagctggagcagctgcagaggctggagctgagcacagacatccagaccatcgagctgcagatcaagaagctgaaggagctgcagaaggctgtggaccacaggaaggccatcatcctgagcatcaacctgtgcagccctgagttcacccaggccgacagcaaggagagccgggacctgcaggaccggctgagccagatgaatggccgctgggacagagtgtgcagcctgctggaggagtggaggggcctgctgcaggatgccctgatgcagtgccagggcttccacgagatgagccacggcctgctgctgatgctggagaacatcgacaggaggaagaatgagatcgtgcccatcgacagcaacctggatgctgagatcctgcaggaccaccacaagcagctgatgcagatcaagcatgagctgctggagagccagctgcgggtggccagcctgcaggacatgagctgccagctgctggtgaatgctgagggcacagactgcctggaggccaaggagaaggtgcacgtgattggcaaccggctgaagctgctgctgaaggaggtgagccgccacatcaaggagctggagaagctgctggatgtgagcagcagccagcaggacctgagctcctggagcagcgcagatgagctggacaccagcggctctgtgagccccaccagcggccgcagcacccccaaccggcagaagaccccccggggcaagtgcagcctgagccagcccggccccagcgtgagcagcccccacagccgcagcaccaagggcggcagtgacagcagcctgtctgagcccggccctggccgcagcggccggggcttcctgttccgggtgctgcgggccgccctgcccctgcagctgctgctgctgctgctgattggcctggcctgcctggtgcccatgtctgaggaggactacagctgtgccctgagcaacaactttgcccgctccttccaccccatgctgcgctacaccaacggccccccacccctgtag

SEQ ID NO: 257462 - DNA, 26394 bp, Artificial Sequence
  derived and/or modified sequence
atggccaccagccggggcgccagccggtgcccccgggacatcgccaatgtaatgcagcgtctccaggacgaacaggaaatagtccaaaaaaggaccttcacgaagtggatcaattcccatctggccaagcggaaaccccccatggtggtcgacgacttattcgaagacatgaaagatggcgtcaagctccttgctttactggaggtcctgtccggccagaaacttccatgtgagcagggacgaagaatgaagagaatccatgccgtggccaacatcggaaccgccctgaaattcctggagggacgaaaaataaaactggtaaatatcaattccacagacattgctgatggcaggcctagcatcgttctaggcctcatgtggacaattattctctacttccaaatagaggagttaacctctaacctgccacagttacaatctctgtcctcatccgcatccagcgtcgatagcatagtgagctcagaaaccccttctccacctagtaaaaggaaggttacaacaaagatacagggcaacgccaaaaaagctctcctcaagtgggtccagtacacagcaggcaaacagaccggtatagaggtaaaggactttggtaagtcatggcggtcgggggtagcctttcactccgtgattcacgccattcgtccagagcttgtagatctggagacagtgaaggggaggtccaacagagagaacctagaagacgccttcacaatcgcggaaaccgaactcgggatccccagactgttggatcctgaggatgttgacgtcgataagcctgatgagaaatctattatgacctatgtcgctcagtttctcaagcactatccagacattcataacgcctcgaccgacggccaggaagacgacgagatattgccgggattccctagctttgctaacagcgtccaaaatttcaaaagagaagatcgggttattttcaaggagatgaaggtgtggattgaacagttcgaacgggatctcacacgcgcacagatggtggagtcaaacttgcaagacaagtaccagtcctttaagcacttccgcgtgcaatatgagatgaagagaaaacagatagagcacctgatccagccacttcatagggacggtaagctgtctttagaccaggcgctcgtgaaacagtcatgggaccgcgtaacctctcggttattcgattggcatattcaacttgataaatcactgcccgcaccattagggaccatcggggcctggctgtacagggcggaggtggctctgcgcgaggagattacggtacagcaagtccacgaggaaaccgctaacaccatccagagaaaattagaacaacacaaggatctgctgcaaaataccgacgcgcacaagcgcgcatttcacgagatttataggacgaggagtgtgaatgggatccctgtgccacctgaccagttagaggatatggccgagcgcttccacttcgttagttccacaagcgaattacatctgatgaagatggagttcctggagctgaagtaccggctgttgagcctcctcgtgctcgccgagagtaaattgaaatcgtggattataaagtatgggcgcagggagagtgtggaacaactgttacaaaactacgtgagcttcatcgaaaattcaaagtttttcgagcagtatgaagtcacataccaaatcctgaagcagactgccgaaatgtatgtgaaagctgacggctctgtcgaagaggctgagaatgtgatgaaattcatgaatgaaactacagcccagtggcgaaatctctcagtggaggtgagatctgtaagaagtatgttggaagaagtgattagcaactgggataggtacgggaataccgtcgctagtctccaggcctggctcgaggatgctgagaagatgctgaatcagtcggaaaatgctaagaaggatttctttagaaacctgccccactggatccagcaacatacagccatgaacgatgcgggcaattttcttatcgagacgtgcgacgagatggtgtcgcgggatctgaaacagcaactgctcctgctaaacggccggtggagggaactgttcatggaggtcaagcaatacgcgcaggctgatgagatggaccggatgaaaaaggagtacacagattgtgtggtgaccctgagcgcatttgcaaccgaggctcacaaaaaactttccgagcctctggaggtgagcttcatgaacgtaaaactgttaattcaggacctcgaagacattgaacagcgcgtgcctgtgatggatgcccaatataagatcatcaccaagacagctcacctgatcactaaggagtcacctcaggaggaaggcaaagaaatgttcgccaccatgtctaagttgaaggagcagcttaccaaggtgaaggagtgctactcccccctgctgtatgaatcccaacagctgctcatccctctcgaggagctggagaaacagatgacttcattctacgactctctggggaagattaatgaaattataaccgtgttagagagagaggcccagagcagtgcgctgttcaagcagaagcatcaggaacttcttgcctgccaggagaattgcaagaagacacttacgctaatagagaagggtagccagagcgtacagaagttcgtgaccttgagtaacgttctcaagcactttgaccaaactcggctgcagagacagatagccgatattcatgtggctttccagtccatggttaagaagacgggggattggaagaagcatgtggagacgaatagtcgtctgatgaagaagttcgaagaatcgcgcgccgagttagagaaagtcctgcggattgcacaagagggactggaggaaaaaggggaccctgaagagctgctgaggcggcataccgagtttttctctcaactcgatcaacgagtgcttaatgcattcctgaaggcctgcgacgaactcactgatatactcccggagcaagaacagcaggggcttcaggaagctgtgcgaaagcttcacaaacagtggaaggacctgcagggggaggcaccataccacctgctgcacttaaaaattgatgtggagaagaaccgtttcctggcatccgtagaagaatgccggacagagctggatcgtgagacaaaacttatgccgcaagaaggcagtgagaaaataattaaggaacaccgcgttttcttttctgacaagggacctcaccacctgtgtgaaaaacggctgcaacttattgaagagttatgtgtgaagctacctgtccgcgatcccgtgcgggacactccaggtacgtgtcatgtaacactcaaagagctgcgcgctgccattgatagcacttatcgtaaacttatggaggaccctgacaagtggaaggattatacctcacgtttttccgagttttctagctggatatcaaccaacgagacccagcttaagggtatcaaaggtgaggccatcgatacggcaaatcatggcgaagtgaagagagccgtagaggaaatccgaaacggagtcacaaagcgcggcgagaccctgtcttggctgaaatctcggttgaaggtgctcacggaagtgtcatccgagaatgaagcccagaagcaaggagacgagctggctaagttgagctcctctttcaaggctctagtgactttgctgtcagaggtggaaaagatgttgagtaactttggggattgcgtacagtacaaggaaatcgtcaaaaattctctggaggaactgatttctggctctaaggaagtccaagagcaagcggaaaaaatcctcgataccgagaatttattcgaagcccagcagctactcttgcatcaccagcaaaaaacaaaaagaattagcgccaagaagcgagacgtgcagcaacagatagcgcaagctcagcaaggggaaggaggcttacccgaccgggggcatgaagagctgcgaaagctggagtccactttggacgggttggaacggtcacgcgagcggcaggaaaggcgcattcaggtgactctgcggaagtgggagagatttgagacgaacaaagaaaccgtggtgcgatatctgtttcaaactggctcctcgcacgagaggttcctgtccttttcatctctggagtctctgtcctcagaactggaacaaactaaagaattcagcaagcgtactgaatctattgctgtgcaggcagagaatctcgtgaaggaagcaagcgagatcccccttggaccccaaaacaagcagctgctccagcagcaagctaaatcaattaaagagcaggttaagaaattggaagacaccctggaggaggatatcaagaccatggagatggtgaagacaaagtgggatcatttcggttccaattttgagacacttagcgtgtggatcacagaaaaagaaaaggaacttaatgcgcttgaaacatcatcgagcgcaatggatatgcaaatttcccaaatcaaggttacaatacaggaaatagagagcaagctgtcttctatagtgggcttagaggaggaagctcagtcgtttgcacaatttgtcactaccggtgaatcagctagaattaaagccaaattgacacaaatcaggagatacggcgaagaactgagagagcacgcgcagtgtcttgaagggacaatcttaggtcacctgagtcagcagcagaagttcgaagaaaacttgagaaagatccaacagtccgtctctgagttcgaagacaaattggccgttccgataaagatttgttcgtccgcaaccgagacctacaaggtgcttcaagagcacatggacctgtgccaagccttggagtcgttgagctccgcgatcactgctttttctgccagtgcccgtaaagtcgtaaatagagacagttgtgttcaggaagctgccgccctccagcaacagtacgaggatattctgcggcgtgcaaaagagagacagacggctcttgagaatctactggcccattggcagagactggagaaggagttgtcgagctttctaacttggctagaacgtggcgaggcaaaggcctcttcccccgagatggatataagcgccgatcgggtgaaagttgagggcgaactccagctgatacaagctctgcaaaatgaagtcgtatcacaggctagcttctacagtaaactcctacagctgaaagaaagcctgtttagcgtggcgtccaaggatgatgtgaagatgatgaagctgcatctggagcagttggacgaacgctggagggaccttccacagatcatcaataaacgtataaacttcctgcaatcagtggttgccgagcatcagcagtttgatgaactgcttctgtctttttctgtgtggattaaactgttcttaagcgaattgcaaacaacatctgagattagcatcatggatcatcaggttgctctgacccgccataaagaccacgccgccgaggtcgagagtaagaaaggggagcttcagagcttgcagggtcacctcgctaaactgggttctctggggcgagccgaagatcttcatttgttacaggggaaggcagaagattgcttccagctgttcgaggaggcctcacaggtcgttgaacgccggcagctggccctatcgcaccttgcggagttccttcagagtcacgctagcttatccggtatcctgcgtcaactgcggcaaacagtggaggccaccaattcaatgaataagaacgagagcgatttaattgaaaaagaccttaacgatgctctgcagaatgctaaggccttggaaagcgcagctgtgtcgttggacggcattctgtctaaagcgcagtaccacctgaagataggttcctcagagcagagaaccagctgtagggccactgccgaccagttatgcggcgaggtggagcgcattcagaatttgctgggtacaaagcaatctgaggccgacgccctagccgtcttaaagaaagccttccaggaccagaaggaggagctcctcaaatcgatcgaggacattgaagaaaggaccgataaggagcgattgaaggaacccactcgacaggccctccaacaaagactgcgggtctttaatcaactagaagatgaactcaactctcacgaacatgaactttgctggcttaaggataaggctaaacagatcgctcagaaagacgtcgcttttgcccctgaggtcgatcgcgagatcaataggcttgaggttacttgggacgacacgaagagactgatccacgaaaatcagggccagtgctgcgggttaatcgatttgatgagagagtatcagaacttgaaatcagcagtgtctaaggtgctagagaacgcttcttcagtgatcgttactcggactacaattaaggaccaagaagacctcaagtgggctttttccaaacatgagaccgctaaaaataaaatgaactacaaacaaaaggacctcgataactttacatctaagggaaaacacctactttccgaactgaagaaaatccacagcagtgatttttcgcttgtgaagactgacatggaatccacagtggacaagtggcttgacgtgtctgaaaagctggaggaaaacatggatcggctacgagtcagtctttcgatctgggacgacgtgcttagtactcgcgacgaaattgaaggctggtctaacaattgcgtgcctcagatggccgagaatatttctaacctggataaccacctcagagctgaggagcttctgaaggaattcgaatcggaggtgaaaaacaaggccctgcgcctggaagagttacacagtaaggtgaacgacttaaaggaactcacaaagaacctggagactccccctgacctacagttcatcgaggccgatcttatgcagaaactggaacatgcaaaggaaatcacagaggtggcaaagggaactctgaaagattttactgcccagtcaacccaggtggaaaaatttatcaatgacattaccacctggttcacgaaggtcgaggaatctctcatgaactgtgctcaaaacgagacctgcgaagcgctgaaaaaagtcaaggacattcaaaaggaactgcagtcccaacagagtaacatttcctctacgcaggaaaatcttaacagcctctgccgtaaatatcacagtgccgagctagaatctctgggcagggccatgaccggcctcattaagaagcacgaggctgtgtctcagctgtgcagcaaaacacaggcatctctgcaggagagtttggagaagcacttctcagaatccatgcaagaatttcaggagtggtttcttggagctaaggccgccgcgaaggagagctccgaccggactggcgatagcaaggtactggaggccaaattgcacgatctgcagaacatcctggattcagtatcagacggacagagtaaattggatgctgtgacccaagaaggtcaaactctctacgcccacttatccaagcaaatcgtaagtagtatacaggaacagataacaaaagccaacgaagaatttcaggccttcttgaagcagtgtctgaaagataaacaagctctgcaggattgtgcctcagaactcggctcattcgaagatcagcataggaagttgaacctatggattcacgaaatggaagagcgcttcaatactgaaaacctgggggaaagcaaacaacacataccggagaaaaagaacgaagtacacaaagttgagatgttcttgggagagctgctggctgcccgggaatctcttgacaagctgagccaacgcggacagcttctttccgaggagggtcacggagccggccaagagggccgactgtgttctcagctgctgacatcccatcagaaccttcttcgcatgactaaggagaagttgcggtcttgtcaggtggcactccaagaacatgaggccttggaagaggcactgcagagcatgtggttctgggtgaaagccatacaggaccgacttgcctgtgccgagagcaccctcggctcaaaagatactttagagaagagactgtcacagatacaagatattcttcttatgaaaggggagggagaagtgaaacttaacatggccatcgggaagggagaacaagcattgaggtcctccaataaggagggacagcgggtgattcagacgcagctggagacacttaaggaagtctgggccgacattatgtctagtagtgtgcacgcccagagcaccctagagtctgtgatcagccagtggaacgactacgtcgagaggaaaaaccaactcgagcagtggatggagtctgtggatcagaagatagaacacccccttcagcctcagcctggcctcaaagaaaagttcgtcctgctcgaccatcttcagagcattctctcagaggccgaagatcacactagagcattgcatagactgattgccaaaagcagggaactgtatgagaaaacagaagatgagtcttttaaagacactgcccaggaggagctgaagacccagtttaatgacatcatgacagtggccaaagaaaaaatgcggaaagtggaggagattgtcaaggaccacctgatgtaccttgacgctgtccacgagtttaccgactggttgcacagcgctaaagaggaattacaccgctggtccgatatgtctggggactcatcagctacgcagaagaagttgagcaagattaaggagctaatagactcacgggaaattggcgcatctaggctgagccgcgtggaatctctggcccccgaagtgaaacagaataccacagcatctggctgtgagttgatgcacacggagatgcaggccttgagagcagactggaaacagtgggaagactctgttttccaaactcaatcttgccttgaaaatctggtttctcagatggcactgtctgagcaggagttttcagggcaggttgcccaactcgagcaggccctggaacagttctcggcactactaaagacttgggcacaacagctcaccctgctcgaaggtaaaaatactgacgaagagatcgtcgaatgctggcacaaaggacaggaaatcttggacgcactgcagaaggctgagccccggacagaagacctcaagtcccagcttaatgaactctgccggtttagcagagatctttccacctactctggaaaggtgagcggcctcattaaggaatacaactgtttgtgtctacaggcatccaagggctgtcaaaacaaagaacagattctgcagcagcggttccgcaaagcctttcgggattttcagcagtggcttgtaaatgccaagataaccacagcaaaatgtttcgatatcccgcagaacatttctgaggttagtacctcccttcaaaaaattcaagagttcctgtctgagtcagagaacggacagcacaaactcaatatgatgctgagtaaaggtgagctcctgagcactctgctcactaaagagaaagccaaaggcatccaggctaaggttaccgctgcgaaggaggactggaagaacttccatagtaacctacaccaaaaagaaagtgccttggagaacctgaagattcagatgaaggatttcgaagtttcagctgagccgatccaggactggctgtcaaagacagagaaaatggtgcacgaaagtagtaatagactgtacgacctgccagccaaacggcgggagcagcagaagctccagtctgtgttggaagagattcattgttacgagccgcaacttaaccgcttaaaggagaaagcccagcaattatgggagggacaagccgcttctaaatcattccggcaccgagtttcacaactatcctctcaatacctcgccctttctaacctgactaaagagaaggtcagcaggctggatcggatcgtggctgaacacaatcaattctcccttggaatcaaggagttacaagattggatgacagatgcaatccacatgctggacagttactgccacccaacttctgataagtctgtactggattctcggacattgaagcttgaggcactgctgtccgtgaaacaggagaaagagatacagatgaagatgattgtcacacggggagaatcagttttacagaacacctctccagaaggcatccccaccattcaacagcaactacagagcgtcaaggacatgtgggcctcgctgctgtcagcaggaatccggtgtaaatcgcagctagaaggggccctgagcaagtggacctcctatcaggatggcgtgagacaattttccgggtggatggacagcatggaagctaacctgaatgagtccgaacgccaacatgcagagttgcgggacaagacaactatgctgggcaaagccaagcttctcaatgaggaagtacttagctacagctctctccttgaaactattgaagtcaaaggagcggggatgaccgaacattatgtcactcagctggagttgcaggatctgcaggagcgttacagggcaatacaggaacgggccaaggaagccgtgactaagagtgagaagctagtgcgcctgcaccaggagtatcaacgagatcttaaggcctttgaagtgtggctgggtcaagagcaggagaaactggatcagtattcggtactggaaggtgatgcacatacccacgagaccacactccgagatctgcaggagctgcaagtgcattgtgcagaaggtcaggccctcctgaactccgtcctccatacccgtgaagatgttatcccttcaggcatcccgcaggcggaggacagggcccttgagagtctccgccaggactggcaggcctatcagcatagattgtctgaaacacggactcagttcaacaacgtggttaataagctgcgcctaatggaacaaaagtttcagcaggtcgacgagtggctgaaaaccgcggaagagaaagttagtccaagaacgcggcgccaaagcaacagggctaccaaggagatccaactgcatcagatgaagaagtggcacgaagaagtgacagcctacagggacgaagtcgaggaagttggagctcgcgctcaggaaattctggacgagtcccacgttaactctcggatggggtgtcaggccactcagctcactagcagatatcaagctttactcttacaggtgctcgagcagataaagttcctggaggaggaaatacagagccttgaggagtctgagagctcgctttcttcgtacagtgattggtacgggagtacccataagaatttcaagaacgtcgccaccaaaattgacaaggtcgataccgtgatgatgggtaagaaactcaaaaccttggaggtgttgctcaaagacatggaaaaggggcacagtttgttaaaatcagctagggaaaagggggagcgggccgtcaagtacctggaggaaggtgaggcagagagactgcggaaggaaatacatgatcacatggagcagctgaaggaacttaccagcacagttcgaaaagaacatatgaccttggaaaaaggactacaccttgccaaggagttctctgataaatgcaaagccttaactcaatggatagctgaataccaggagatacttcatgtccccgaagagcctaagatggagctgtacgagaagaaagcccagctctctaagtacaagagcctgcagcagaccgtgctgagccacgaaccaagtgtgaagtcagtgcgagaaaagggagaggctcttctcgaattggtgcaggacgtgacgctgaaagataagatcgaccaactgcagtcagattaccaggatctctgttccattgggaaagaacatgtgttttcacttgaggctaaagtcaaggatcacgaggactataactcggagttacaggaggttgagaagtggctgcttcagatgtccgggcgcctcgtcgcacccgatttgcttgaaactagcagccttgagaccatcacccagcagcttgcccaccacaaagcgatgatggaagaaatcgcaggctttgaggaccggttaaacaatctgcagatgaagggcgacactctcattggacaatgtgctgaccacctccaggcgaagctcaaacagaatgtgcacgcacacctgcagggaaccaaggattcttattcagcaatctgcagcaccgctcagcggatgtatcagagtttggaacacgagctgcagaaacatgtatcaaggcaggacacactacaacagtgccaggcctggcttagcgccgttcagccggatctggaacctagtcctcagcctcccctgagtcgtgctgaagctatcaaacaagtgaaacattttcgcgcactccaagagcaggcccggacgtacttggacctgctgtgttccatgtgtgacctcagcaacgccagtgtcaagaccactgccaaggatatccagcagacggaacaaacaatcgagcaaaagctcgtgcaggcccaaaaccttactcagggatgggaagagattaagcacctaaagagtgagctctggatttatcttcaggacgctgaccagcagctccagaatatgaagcggcggcactctgaactggaactgaacatcgcgcaaaacatggtgagccaggtcaaggattttgtgaaaaaactccaaagcaagcaggcctcagtcaatacaattattgaaaaggtgaataaattgactaaaaaagaagaatcacctgaacacaaggaaatcaatcatctgaacgatcaatggctcgacctgtgtcgacagagtaataacctatgcttgcagagggaggaagacctccagcggaccagagattaccatgattgtatgaatgtcgtcgaggtcttcctggagaaatttacgacagaatgggacaacctggcaaggagtgacgccgaaagtacagctgtacatctcgaagccctcaagaagttggcgctggccctccaagaaagaaagtatgcgattgaggacctgaaagatcagaaacaaaagatgatcgagcacttaaatttggacgataaggagttggtgaaagagcagaccagccatctggagcaacgctggtttcaattagaagatctaatcaagaggaagatacaggtctctgttactaatctggaagagctcaatgttgtccagagccgatttcaggaattgatggagtgggcggaggagcagcagccaaatatcgcggaagctctcaaacagtcacccccgccggacatggcacaaaatctgttgatggaccatctcgctatttgctccgagctggaggcaaagcagatgctcctgaaatccctcattaaggacgccgacagagtaatggccgatctcgggctgaatgagagacaggtgattcagaaggcgttaagcgatgcgcagagtcatgtcaattgcctgtccgatctggtaggacagaggcgcaaatacctgaataaggccttaagtgaaaaaactcagttcctgatggccgttttccaggcaaccagtcaaatacaacagcatgagcgcaagatcatgtttcgagagcacatctgtctcctgcccgatgatgtttccaaacaagtgaagacatgcaaatcagcccaagcatctctgaaaacataccaaaacgaggtgacgggactatgggctcagggacgagagctgatgaaggaggtgaccgagcaagaaaagtccgaggtcctgggaaagcttcaagagctgcagtcagtgtatgactccgttctgcaaaagtgttcgcataggctgcaggaactggaaaagaacctcgtcagcagaaaacatttcaaggaggatttcgacaaggcgtgccactggcttaagcaggctgacattgtgactttccccgaaattaacctgatgaatgaaagcagtgagttacacacgcagctcgcaaaataccagaacattctggaacagtcacccgaatacgagaacctgcttctgaccctccagagaactggtcagaccatcctgccctcattaaatgaggttgatcacagttatctctctgaaaaactgaacgccctcccgcgccaatttaacgtgatcgtcgcactggccaaggacaaattctataaagtgcaggaagcaatccttgctaggaaggaatacgctagcctcatcgagctgaccacgcagagtttaagcgaactagaagcccagttcctacggatgtccaaggtcccgaccgacctggccgttgaagaagcactgagcctgcaggacggatgtagggccattctggacgaggtagctgggttaggcgaggcagtggacgagcttaaccagaaaaaggagggttttcgatccactggtcagccctggcagccggacaaaatgctgcacctcgtgacgctgtaccatcgtctcaaaaggcagacagagcagagagtaagcctgctcgaagacaccacctccgcgtatcaggaacacgagaaaatgtgtcagcagctggagagacagctgaagtcagtaaaggaggagcaatccaaggtcaacgaggagacacttcccgccgaggagaagttgaagatgtatcacagccttgctggatccttacaagactcaggtatcgtgctgaagcgcgtgacaatccatctggaggatctggcaccgcacctggatcccttagcttacgaaaaagctcgacaccagatacagagttggcagggtgagctgaaattgctcacctctgcaatcggcgaaacggtgacggagtgtgagtcgcggatggtgcagagcattgacttccagacagaaatgtcacgaagcctggactggctgaggcgggttaaggccgaactgtctgggcctgtctacctcgatctcaatttacaggacattcaggaagaaatccgaaaaatccagatccaccaggaagaagtccagagctccctgagaatcatgaatgccctgagccacaaggaaaaagagaaattcaccaaggctaaggaactgatctcagctgacctggagcactctctggctgagctatcagagctagacggcgacattcaggaggccctgcgaacaaggcaggccaccctcacggaaatctactctcaatgtcagaggtattaccaagtatttcaggccgcaaacgactggcttgaggatgcacaggaactcttgcagctggctgggaatggactggatgtggaatcggctgaggaaaacctcaagtcacatatggagttcttcagcactgaagatcagttccacagtaatttggaagagctgcacagcctagtcgctactttggacccgctcatcaagcctactggcaaggaagatctggagcagaaggtcgcgagtcttgaactgcggtctcagcgcatgtcccgcgactctggcgcacaggtagatttgctgcaaagatgcaccgctcagtggcacgactatcaaaaagcccgtgaagaagttatagaattaatgaacgacactgagaagaaattatctgagttctcgctcctgaaaaccagcagctctcatgaggccgaggagaagctctcagagcataaggcactagtgtcagtggtgaactcgtttcatgaaaaaatcgtagcactcgaggagaaagctagccagctggaaaagacaggcaatgacgcttccaaagctaccctgtcccgcagtatgaccacggtgtggcagagatggacacggctcagagctgtggctcaagaccaggaaaaaatactggaggatgccgtggacgaatggacaggctttaataataaagtcaaaaaggccacagaaatgattgaccagctgcaggacaagctaccgggaagctccgcagagaaagcaagcaaggccgaacttctgactcttctggagtatcatgacacatttgtgttggagcttgaacagcagcaaagcgctctaggcatgctccgccagcagacactctccatgttgcaagacggcgccgctcctaccccgggggaagagccaccactgatgcaggaaattaccgcgatgcaggaccggtgtctcaacatgcaggagaaggtgaagacaaacggaaaactagtgaaacaagagttgaaggatagagaaatggtggaaacccaaattaactctgtcaagtgctgggttcaagaaacaaaagagtatttggggaaccctacgattgagatcgacgcgcaattagaggagctgcaaattctgctgacagaggctaccaatcatcgacaaaatattgagaaaatggccgaagagcagaaggaaaagtatcttgggctctatacaatcctgcctagtgaactctctcttcagttggcagaggtggccctagacctgaagatccgggaccagatacaggacaaaataaaggaggttgaacaaagtaaggctacttcacaggagctcagccgccagatacagaagctggccaaggatctgaccacgatactgactaagctaaaggcaaagacagataatgttgttcaggccaaaaccgatcagaaagtgctgggggaggagctggacgggtgcaactcaaaactgatggagctggacgccgctgtccaaaaattcctcgagcagaatggtcagctaggaaaaccgctggctaagaagatcgggaagctaaccgagctacaccagcagactattcgtcaggcagagaatcgcctgtccaaattgaatcaggcagcatcccatctagaggagtataacgagatgttggaactgatcctcaaatggattgaaaaggctaaggtccttgcccacgggactattgcctggaacagcgcatcacagttgagggagcagtatattctgcatcagacactgctggaagagagcaaggagatcgatagcgaacttgaagcgatgaccgagaaactgcagtacctgaccagtgtttactgcaccgaaaagatgtctcagcaggtggcagagctagggagagagaccgaagaactgagacaaatgataaaaatccgactgcagaatcttcaggacgctgcaaaggacatgaagaagttcgaagccgaactcaagaaactgcaggccgcactcgagcaggcccaggctactctcacctcccccgaggtaggacgcctcagtctgaaggagcaactgagccacagacaacacctgttatccgagatggagtctttgaagccaaaagtgcaggccgtgcagctgtgtcaatccgcactaaggatccccgaagacgtcgtggcgtcgttgccattgtgtcatgctgccctgcgtctccaggaggaggcctcaaggttacagcacactgcaatacagcaatgcaacatcatgcaggctgccgtggtccagtacgagcagtatgagcaggagatgaaacacctccaacagctgatcgaaggtgcgcaccgggagatagaagataagccagttgctacaagcaacattcaagagttacaagcccaaattagtcgacatgaagaacttgctcagaagataaaggggtatcaggaacaaatcgccagcctgaacagcaaatgtaaaatgttgactatgaaggccaaacacgctactatgctgcttacagtcactgaagttgaaggcctggccgaagggacagaggacctagacggggagctcttacctactccaagcgcacatccttctgtggtgatgatgactgccgggcgatgtcacacccttctttctcccgtcaccgaggagagcggcgaagaaggtactaactctgaaatctcaagcccacccgcctgtaggtctcccagccccgtggccaacacagatgcgtctgttaaccaggatatcgcatactatcaggcgctctctgccgaacggctccagacggatgcagccaagattcaccccagtacatctgcttcccaggagttctatgaacctggacttgaaccttcagccacagcgaagcttggcgacctgcagcgaagctgggagaccctcaaaaatgtgattagtgagaagcagcgcactttgtacgaggccctggagaggcaacaaaagtatcaagattccctccagagcatcagcaccaaaatggaggccatcgagttgaagttatctgaaagccccgaaccaggacgatcccccgagagccagatggcagaacaccaggccctgatggatgagattttaatgctgcaagatgagattaacgaactccaaagttctctggccgaagagcttgtgtctgagagctgtgaggcggacccagcggagcagcttgccttacagagtactctaactgtgctggccgaacgtatgagtacgattcgaatgaaagcctccggaaagaggcaattgttagaagagaagctcaatgaccaactcgaggagcaacggcaagagcaggcgctgcagaggtacaggtgtgaggccgatgaactggacagttggctactcagtacgaaagctaccttggacacggcactctcccccccaaaggagccgatggatatggaggcccagctgatggattgccagaatatgttggtggagattgagcagaaggtcgtggcactgtcagaactttctgttcacaacgaaaatctactgctagagggtaaggcccataccaaggatgaggccgagcaactggctggcaagttgcggcgtctgaaagggtcgctacttgaacttcagcgcgcattacatgataagcagctcaatatgcagggaaccgcccaggaaaaggaagaatcagatgtcgacctcacagcaactcagagtcctggcgtgcaggaatggctggcccaagcaaggactacgtggacgcaacaacgccaatcctcgttacagcagcaaaaggagctcgagcaagagctggccgaacagaaatcccttctgagaagtgtggccagcagaggtgaggagatcctgattcagcacagcgcggccgagacctctggggacgcaggtgagaaacccgacgtcttatcacaagagttaggaatggaaggtgagaaatcttcagccgaagaccaaatgcgaatgaagtgggagtccttgcaccaggaattcagcaccaaacagaagttactccaaaatgttctggagcaggagcaggagcaagttttgtattcaaggcccaatcgccttttatccggagttccgctctacaaaggcgatgtacccacccaggataaatcagccgtgacttcattgctagatggccttaatcaggctttcgaggaagtctctagccaatctggcggggccaaacgccagtccatccacctcgagcaaaaactatacgacggggtatccgcgacttcaacatggctcgacgacgtagaagagaggcttttcgtcgcaaccgcattgctacctgaagagactgagacctgcctgtttaaccaggaaattctggccaaggatattaaagaaatgagtgaggaaatggataaaaataagaacctcttcagccaggcttttccggaaaacggtgacaacagagacgtgatcgaagacacacttggttgtctgctgggccggctgagcctactggattcagttgtaaatcagcgctgccaccagatgaaagaacggttacagcagatcctgaatttccagaatgacctgaaggtgctttttacctctctcgcagataacaaatacatcattcttcaaaagttagccaatgtattcgagcagcctgttgcggagcaaatagaggcaatccaacaggccgaggatggcctcaaggagtttgatgctggcatcatcgagctgaaacgcagaggcgacaagctgcaagtggagcagccttcaatgcaggagctctccaaactgcaggacatgtacgacgagctgatgatgatcatcggcagtcgcagaagtggactgaaccagaatcttactctgaaatcacaatacgaaagggccctgcaggatctcgccgatctattagaaacagggcaagagaagatggcaggagaccagaagattatcgtcagtagtaaggaggaaattcagcaactgctggataagcataaagaatattttcagggccttgaatcgcacatgattttgactgaaacactgttcagaaagatcatcagctttgcagtgcagaaggagacccagtttcacaccgaacttatggcacaggcttcagctgtgcttaaaagagcacataagagaggtgtggagctggaatacattctggaaacttggagccacctagacgaggatcagcaggaactgagccgtcagctggaggtcgtggaatcatccataccgtccgtgggcctggtggaggaaaacgaagaccggctgatcgatagaattactctatatcagcacctgaagtcatcgttaaacgagtatcagcctaaactgtaccaggtgctcgacgatggtaaacggctgcttatttctatctcttgctcagatctggagtctcagctgaatcagctaggggagtgttggctgtcaaatactaacaagatgtccaaagaactccaccggcttgaaaccattctgaagcattggacacgctaccaatcagagtccgccgacctgatacactggctccaatcagccaaggacagactcgagttttggacccagcagtcggtgactgtgccccaggagctggaaatggtgcgcgatcacttgaatgcttttcttgagttttctaaggaagtggacgcccaatcttctctgaagagcagtgtcctaagtactggaaatcagttgcttcgcctgaagaaggttgatacggccacattgcgaagcgagctctctcgcatagatagtcagtggacagatctcctgactaatattcccgcagtccaggaaaagctccaccagctgcaaatggacaagctcccaagccgacatgccatctctgaagtcatgtcgtggatctccttaatggagaatgtgatacagaaggatgaggataatataaaaaacagtatcgggtacaaggctatccacgaatacctacagaaatataaaggttttaaaatagatataaattgcaaacaacttactgtcgatttcgtgaaccagagtgtcctgcagatctccagccaggatgtcgagtctaaaaggagtgacaaaaccgactttgcagagcagctgggcgcgatgaataagagctggcagattttacaaggcctggtgaccgagaaaattcagttgctggaaggactgttggagagctggagcgaatacgagaacaacgtacagtgtctgaaaacttggttcgaaacacaggagaaacgcttgaaacagcagcaccgaattggggatcaggccagcgtgcagaacgctctcaaagactgccaagatttggaggacctgatcaaagcgaaagagaaagaagtggagaaaattgagcagaacggcctggctctaatccagaacaaaaaggaagacgttagctctattgtcatgagcactctcagagagctgggacagacgtgggcaaacttggaccacatggtcgggcagctaaagatcctgcttaagtctgttttggatcaatggtcatcacacaaggttgcgtttgacaagataaactcttatctcatggaggctcggtattccttaagtcgcttccggttgcttaccggctccctcgaggcggtccaagtacaggtagacaacttacagaacctccaggatgacctggagaagcaggagcgatcactacagaagtttggatctattacaaatcaacttttaaaggaatgccacccacctgtgactgagactttaaccaatacactgaaggaagtcaacatgcgatggaataatctgctggaggagattgctgagcagctgcagagcagcaaagccttgctgcagctgtggcagaggtataaggactacagtaaacagtgtgccagtaccgtgcagcagcaagaggatcgtactaatgaactgctgaaggctgcaaccaataaagacatcgcagatgacgaggtcgcaacgtggattcaagattgcaacgacttgctgaaggggctcggtaccgtcaaggacagtctcttttttctgcacgaactgggggaacagctgaagcaacaggttgatgccagcgccgcctcagccatccagagcgaccagttatccctttctcaacacctgtgcgcactggaacaagcactctgcaagcagcaaacgtctctgcaggccggggtgctcgactatgagactttcgctaaaagtctggaggctcttgaggcatggatcgtggaggccgaggagattctgcaaggccaggacccaagtcactcctcggatctttctacgattcaggagcgcatggaagagctgaaaggccagatgctcaaattcagtagcatggctcccgacctagatcgcctcaacgaacttggctatcggctccctctaaacgacaaggaaattaagaggatgcagaacctgaacagacattggagcctcatcagctctcaaacaacagagagattcagcaagctccagtcctttttgctgcagcaccaaactttcttagaaaaatgcgagacgtggatggagtttctggtccagacagaacaaaaactggctgtcgagatctccggcaattatcagcacttgctggaacagcaacgcgctcatgagttattccaagcagagatgttcagtcggcagcaaatactgcactcaatcatcatagacgggcagaggctcctggaacaggggcaggtggacgatcgcgatgagttcaacctgaaactgactctgctgagtaatcagtggcaaggcgtgatccgcagggcacagcaacgcagggggataatcgatagccagatcagacaatggcagcggtacagagaaatggcggaaaagctgagaaaatggctggtggaagtgagctacctgcccatgtccggcctggggtccgtgcctattccgttgcagcaggcccggaccttatttgacgaggtacaattcaaggaaaaagtctttcttaggcagcaaggcagttatatccttaccgtggaggccggtaaacaacttctgctgagtgccgacagtggggcggaagcagcgttgcaagccgagctagccgagattcaggaaaaatggaagtctgcctccatgcgcttggaggaacaaaaaaaaaagttagcattcttgctgaaggattgggaaaagtgtgaaaaaggtatcgccgacagcctggagaagttgcgtaccttcaaaaaaaagctctcacagtctttgcccgatcatcacgaagagctacacgccgagcagatgagatgtaaagagctggagaatgctgttgggagctggacagatgatttaactcagctctctctgcttaaagataccctttctgcttacatcagcgctgatgacatcagtatcctgaatgaaagggtagaactgcttcagcgtcagtgggaagagctctgccatcaattatctttaagacgtcaacaaatcggagagagactgaacgagtgggcggtgttttcggaaaagaataaagagctgtgtgagtggctgacacagatggagtccaaggtgagccagaatggcgacatcctgatcgaagaaatgatcgagaagttgaaaaaagactaccaagaagagatcgctatcgctcaggaaaacaaaatccaattgcagcagatgggggaacgacttgccaaggcatcccacgaatcaaaggcatccgagattgagtacaaactgggtaaggtgaatgatcgttggcagcatttgcttgatctcattgcggcgagagtgaaaaaacttaaagagactttggtagcagtccaacagctcgacaagaatatgtctagccttagaacttggctagcgcatatcgagtcagaactggccaagcctatcgtttatgattcttgcaattctgaagagattcagcgtaagctgaatgagcagcaggaactacagcgagatattgagaagcactccacaggggtcgcatccgtactaaacctctgcgaagtcctgctgcatgattgcgacgcctgtgcaaccgacgcagagtgcgacagtattcagcaggctacacggaatctcgaccgacgttggcgtaatatctgtgcaatgtcgatggagcgccgtctaaagattgaagagacctggaggctttggcagaagtttctggatgattactcccggtttgaggattggctgaaatcatctgagcgcacagccgcctttccctctagctcaggcgtcatttacacggtggctaaggaagaactgaaaaagtttgaagcctttcagcgccaggttcacgaatgcctgacccagcttgagcttattaataagcaataccggaggctggcccgggagaatcgaactgacagcgcctgcagtctcaagcaaatggtgcacgagggcaaccagagatgggataacctgcagaagagagtcacctccattctcaggcgtctaaagcatttcatcgggcagcgggaggaattcgagacagcacgggacagtattcttgtgtggctgactgaaatggatttgcagttaaccaacatagagcactttagcgagtgcgatgtgcaggcgaagataaagcagctgaaggccttccagcaggagatctcgctgaaccacaataagatcgaacagatcatcgctcagggggagcagctgatcgaaaaaagcgagcctcttgacgctgctataattgaagaggaactcgacgagttgagaagatattgccaggaggtcttcggtcgggtcgagaggtatcacaagaagcttattcggctccccctacccgatgacgagcacgacctctccgatcgggagctcgaattagaggattccgccgcactctccgatctgcattggcacgacaggagcgccgatagcttgctgagccctcagccctcaagcaaccttagtctgagtcttgcccagcccctgcggagcgaaaggtccggacgagacacccctgccagcgtggattcgattccactcgaatgggatcacgattacgacctatccagagacctggaatccgccatgtcccgggctctgccatccgaggatgaagaagggcaggacgacaaggacttctatctgcggggcgccgtcgggctgagcggagaccacagcgccctggagagccagattcgacagctgggtaaggctctcgatgacagtaggtttcagatacagcagaccgagaacattataaggtcaaaaacccctacaggaccagagcttgataccagttacaagggatacatgaaactgctgggggagtgcagctccagtattgacagtgttaagcgactcgagcataagctgaaagaggaagaggaaagcctgcctggcttcgtgaacttacactctactgagacccagacggctggcgtcatcgataggtgggaactcctccaagcacaggcgctctcaaaggaattaaggatgaaacagaacctgcagaagtggcagcagtttaacagcgacctcaactctatctgggcctggctgggcgacactgaggaagagctggagcagcttcaaaggctggaattatcaactgatatccagactattgagttgcagatcaaaaagctcaaagaattgcagaaagccgtggaccaccgaaaggcaataatattaagcatcaacctgtgttccccagagttcacccaagccgactctaaagagagtcgcgatttacaagacagattgagccagatgaatggaagatgggaccgcgtctgctccctactggaagagtggcgaggactcttgcaagacgccctgatgcagtgtcagggattccatgagatgagtcacggtttactcctcatgctagaaaatattgaccgcaggaagaacgaaatcgtgcctattgatagcaatttagatgcggagattttgcaagaccaccataagcagctgatgcagattaaacacgagcttctggagtcacaattgcgcgtcgccagcttgcaggatatgtcctgccagcttctggtgaatgccgaggggaccgactgcctggaggcaaaggaaaaagtacacgtcattgggaaccgactcaagctgctgctgaaagaagtatccagacatatcaaggagcttgagaagttgctggacgtctcctcatctcagcaggatttgagcagttggtcgagtgctgacgaattagatacttccggctccgtgtcccctacttccggtagaagtaccccgaatcgccagaagacgccacgaggcaaatgctccttaagccagcctggtcccagcgtgtcctcccctcactcgcgcagcaccaagggagggtcagattcttctctcagcgagccaggacctggcagatcaggacgaggcttcctttttcgcgtgctgcgcgccgccctccctctacaacttcttctgttgttgctgataggattagcgtgccttgtgccaatgtctgaggaggactacagctgtgcactaagtaacaatttcgcaaggtcatttcacccaatgctcaggtacactaacggccctccacctctctag

SEQ ID NO: 257463 - DNA, 25230 bp, Artificial Sequence
  derived and/or modified sequence
atggccaccagccggggcgccagccggtgcccccgggacatcgccaacgtcatgcaacgcttgcaggacgagcaagaaatagtccagaaacggacattcacaaaatggatcaattcacatctggcgaaaagaaagccgccgatggtcgtcgatgacctttttgaggatatgaaagatggcgtgaagttactcgcccttctcgaggtgctatctggacagaagctgccgtgcgaacagggccgacgaatgaagcgcattcacgcggttgcaaatattggcactgctctgaagtttctggagggaaggaagatcaagctggtgaacatcaactcaacggatattgcagacgggagaccctccatcgtccttggcctgatgtggactatcatcttatactttcagattgaggagctcacctccaatttgccacagttgcagtcactgagttcaagcgcctcctctgtcgatagtatcgtgtcatctgaaactccttcccctccttctaagcgtaaggtcactactaagattcagggcaacgctaagaaagccctgctaaaatgggtccagtacacagcaggaaaacaaactggtatcgaggtgaaggattttggaaagtcatggagaagtggagttgcctttcactccgttatacatgccatccgccctgaacttgtggatctggaaactgtcaagggccgaagcaaccgcgaaaatctcgaggatgctttcactattgcagaaaccgaactgggtatccctagactcttagatcctgaggacgtcgacgtggacaagcccgatgagaagtccattatgacttacgtagctcaatttttaaagcattaccccgatatccacaacgcttcaaccgacggtcaagaagatgatgaaattctccccggcttccccagtttcgccaacagcgttcagaacttcaagagggaagaccgtgtgatctttaaggagatgaaggtctggatcgagcagttcgagagggatctcactagggctcagatggtggaatcaaacttacaggacaaataccagagctttaagcactttcgggtgcaatatgagatgaagcggaagcagatagaacacctaatccaaccgctccaccgggacggcaagctgagtttggaccaggcccttgtgaagcagtcgtgggaccgtgtcaccagccgtttattcgactggcacattcaacttgacaaaagtcttcccgcccctctgggaactataggcgcctggctttatcgtgcagaagtagcactgcgtgaagagatcaccgttcagcaggtgcacgaggagacagctaataccatccagcggaaattagaacagcacaaacggaaattgcggaatgtcatcgatttactccagaacaccgacgcccacaagagagcttttcacgaaatatatagaacccgcagcgtgaatgggatcccagtgccacccgaccagctcgaggacatggctgagagattccactttgtcagtagcacatccgagctccatttgatgaagatggaatttctggagcttaagtacagactgctctcactgctcgtgctcgcggaaagcaaattaaagagctggattatcaagtatggacggagggagtctgttgaacagctcctacagaactatgtgtcctttattgaaaactctaagttcttcgaacaatatgaagtgacctaccagattctgaaacagaccgccgagatgtatgtgaaagccgacggttccgtcgaggaagccgaaaacgttatgaaattcatgaacgagactaccgcccagtggaggaacctgagtgtcgaagtaagaagcgttagatcaatgctcgaggaagtaatatccaattgggacaggtacggaaacacagtggcgtccctgcaggcctggcttgaggacgctgagaaaatgctgaatcagagcgagaacgcaaagaaggacttctttagaaatcttccccattggatacagcagcacactgccatgaacgatgccggaaatttcctcatcgaaacatgcgacgaaatggtctcaagggatttgaaacagcaactgttgctcctcaatggacgttggcgcgaactgtttatggaagttaagcagtatgcacaggctgacgagatggacagaatgaaaaaggaatatactgattgcgtggtaacgctgagcgccttcgccacagaagcgcacaagaagctctccgagcccctggaggtgtcttttatgaatgtgaagctgttaatacaggatctggaagatatcgagcaaagggtcccagtgatggacgcccagtataagataatcacaaaaactgcacatctgatcactaaagagtcgcctcaggaagaagggaaggagatgttcgcgaccatgagcaagctcaaggagcagctaacaaaagtgaaggaatgctactcacccctcctctatgagtctcagcaactgctgattcccttggaggaactcgaaaagcagatgacgtcattttacgattctctgggcaagatcaatgagatcattactgtcctcgaaagagaagcgcagtcttctgcactcttcaagcagaagcaccagctccgtattcttaagtgcaagtggtgtaatagttctcagaagatgactctctgtttagtgctaggatctatgatcagcatgctgagcaccgcaaagatcaccattgcaggatataagtccgaggtagaagtgtcggagctgctcgcttgtcaggaaaactgcaagaaaaccctaacactcatcgaaaaaggctctcaatccgtccagaaatttgtaaccttgagtaacgtgctgaaacactttgaccaaacccggctgcagactgattgcaggtactcttgctgtttttctgttatgcgaaagcagcaccacatcatgattgtttttcacattaagagtatggtgaaaaaaacgggggactggaaaaagcatgtggaaaccaactcccgcctgatgaagaaattcgaggaatccagagcagaattggagaaggtgctgcgtatcgctcaagaagggctagaggaaaagggggatcccgaagagctcctgcggcggcacacagagttcttcagccagcttgaccagagggtgctgaacgcctttttgaaagcgtgcgatgaactgacagacatcctgcccgagcaggaacagcagggcttgcaagaggccgtccgtaaactgcacaagcagtggaaagatctgcagggggaagcaccctatcatctcctccatttgaaaattgacgtcgagaagaacaggtttcttgcctcggtagaagaatgcaggaccgagttggatagggagacaaaactcatgccccaggaggggtctgagaaaatcattaaggagcaccgagtgtttttcagtgacaaggggccacatcatctgtgcgagaagagacttcagctcattgaggagctgtgtgtaaagctgcccgtgcgtgaccctgtacgcgatactccagggacatgtcacgtgactctgaaagagttgcgcgccgcaatcgactcaacctataggaagctgatggaggatcccgacaaatggaaggattacacgtcacggttctccgaattttcctcttggattagcactaacgaaactcagctcaaaggaatcaagggcgaagccattgacaccgccaatcatggtgaggtgaaaagggcagtggaggagatcaggaacggcgtgactaagcgaggtgaaactctgagctggctcaagtcccgcctgaaagtgttgacggaggtgagctctgagaacgaggctcaaaagcagggcgacgagttagcgaagctctcctcaagtttcaaggctcttgtgaccctcctgagcgaggtggaaaagatgttgtctaactttggcgattgtgttcagtacaaggagatagtgaagaactctttggaagagctgatcagcggctctaaagaggtccaggaacaggccgagaaaattctagatactgagaacttgttcgaagctcaacaactgctcctgcatcaccaacaaaagactaagagaattagcgccaaaaagagggatgttcagcaacagatcgcacaggcacagcagggtgagggtgggctccccgaccgcggacatgaagagcttagaaagctcgaaagtaccctagacggattagaaagaagtagggagaggcaggaaagacgtattcaagtgactctgagaaaatgggagaggttcgagacaaataaggaaaccgtcgtcagatacctattccagacagggtctagccacgaaagatttctgtcattctcctccctcgaatcactgagctcggagctcgaacagactaaagaatttagcaaaagaaccgagagcatcgctgtacaggcagagaatctggtcaaagaggcctcagaaataccactcgggccccaaaacaagcagctgctgcagcagcaggccaaatctataaaggaacaggttaagaagctggaagacactttagaggaggagtatgtaatcgataacaaaacaatggaaatggtcaagacaaagtgggatcacttcggttcaaacttcgaaaccctgtctgtctggattaccgagaaagagaaagagctcaacgccctcgaaaccagcagttcggcgatggatatgcaaatcagtcagatcaaggtaaccatccaagagattgaatctaagttgagctctatcgtcggcctggaggaggaggctcagtcctttgctcagttcgtgaccactggcgagagcgcccgcatcaaagccaagctgacacagataaggcgttacggcgaggagcttcgagagcatgcacaatgtctcgagggaaccatactgggacatctgtcacagcagcagaagttcgaggagaatcttcgcaagatacaacagagcgtgagcgagtttgaggacaagcttgccgtccctattaagatctgctcaagcgcaacggagacctataaggtccttcaagagcacatggatctgtgtcaggcccttgagtcactgagttcagcgatcactgcatttagcgcgtccgctagaaaagtcgtcaatagagacagctgtgtgcaagaagccgccgcccttcagcagcagtatgaggatattctccgtagagcaaaggagaggcagacagccttggagaacctcttggcccattggcagcgcctggagaaagaactctcatcctttctaacctggcttgagagaggcgaggccaaagcttccagtccagagatggatatctcagcggacagagtcaaggtagaggcttccaaagatgacgtgaagatgatgaagctgcacctcgaacagcttgacgaacgctggcgggatttaccgcagataatcaataagagaatcaacttcttgcaaagtgtcgtggctgagcaccagcagttcgatgagctgctgctatcctttagtgtgtggatcaagttgtttttatccgaacttcagacaacatccgaaattagtattatggatcatcaggttgcactgacacggcacaaggaccacgctgcagaagtagagagtaaaaagggcgagctccagtccctccagggtcacctcgcaaagttggggtccttgggccgcgcagaggacttgcacttgctgcaggggaaggctgaggactgcttccagctgtttgaggaagccagtcaagtcgtggagaggcggcaactcgctttgtcacacctggcagaattcctccaatctcacgctagcttaagtggcatcctccggcaactgagacagaccgttgaagcgactaattccatgaataagaacgaatctgatctcattgagaaggatctgaatgatgcacttcagaatgctaaggctctggaatctgctgccgtgagcctcgacggcattctatcgaaggcgcaatatcacctgaagattgggtccagcgaacaacgtacttcttgcagggccaccgcagatcagctttgcggcgaggtggagagaatccagaatttgttaggtaccaaacagagtgaggctgatgctttggccgtgctcaaaaaagcatttcaggatcagaaagaggaactactgaagtccattgaggatattgaggaacgcaccgataaggagcgcctgaaggagccaacccggcaagcacttcagcagcgattgcgggtgttcaaccagttagaagacgagctaaatagtcacgaacatgaactgtgttggctcaaagataaggccaaacagatcgcacagaaggacgttgcatttgcgccagaggtcgatcgtgagatcaataggcttgaggttacatgggacgacactaagagattgatacatgagaaccaaggacagtgttgtggactcatagatctaatgcgtgaatatcagaatctaaaatctgccgtatcgaaggtgcttgaaaatgcaagctccgtgattgttactagaaccaccattaaagatcaggaagatctgaagtgggccttctctaagcatgaaactgccaagaataagatgaactacaaacagaaggacctggataacttcaccagcaaggggaaacacttgctttctgaactgaaaaagattcacagcagcgacttttctttggtgaagaccgatatggaatccaccgtagacaaatggttggatgtgtccgagaagcttgaggagaatatggaccgccttcgggtttcgctgtctatctgggacgatgtactctctaccagggacgaaatagagggatggtccaacaactgtgtgcctcaaatggccgaaaacattagcaatctagataaccatctgcgagcggaggagctgctcaaggaatttgaatcagaggtgaagaacaaagctttgagattggaggaattgcattccaaggtaaatgacctgaaggagttgacaaagaaccttgagactccgcctgacctgcagtttatcgaagcagaccttatgcaaaaattagaacacgccaaagagatcaccgaagtagccaaaggcactctgaaggacttcaccgcacaatccacccaggtagagaaatttattaatgatattacaacttggttcacgaaggtcgaagagtcgcttatgaactgtgcccagaacgaaacgtgtgaggctctcaaaaaggtgaaggatattcagaaagaactccagtcccagcagtccaatatttcgtccacacaggagaatctgaacagcctgtgtagaaaataccattcggccgagttggaaagcctcggtcgcgccatgactgggctcatcaaaaaacatgaagccgtgtcacagctctgttcaaaaacgcaggcttcattgcaggaatcactggaaaagcatttctcagaggagtctatgcaggaatttcaagagtggttcctgggcgcaaaagcagccgccaaagaatcatcggaccggaccggcgattcaaaggtattagaagccaaactacatgatttgcagcagaatattctggattccgttagcgatggtcaatcaaaacttgatgctgtcacccaggagggtcagacactgtacgctcacctatcgaaacagatcgtttccagcatccaggaacaaatcacaaaggctaacgaggagtttcaggcgtttctgaaacagtgtttaaaggataagcaggccctccaggattgtgcatccgagctgggaagtttcgaggatcagcataggaagcttaacctgtggattcatgaaatggaggagcgctttaacaccgaaaacctcggggagagcaagcagcatatccccgagaaaaagaatgaagttcataaagtagaaatgtttctcggagagctactagccgccagagagagccttgataagctgtcacaacggggacagttacttagtgaagaaggacacggcgcaggacaggagggccgcttatgctctcaattactcacaagtcaccagaatttgctgagaatgacaaaggaaaagcttcggtcttgtcaggtggccctgcaggaacacgaagcgctcgaggaggctcttcagtcgatgtggttctgggttaaggctatacaggatcgcctagcttgtgccgaaagtaccttgggttcgaaagacacgctggagaaacgcctatcccaaatccaggatatactgctgatgaagggcgagggcgaagtgaaattaaatatggctatcggcaagggcgagcaggcccttcgaagcagtaacaaagaaggacaacgggttatccaaactcaacttgagacactgaaagaggtgtgggcagacattatgagttcctccgtccacgctcagtccaccctggaatctgtgatctcccaatggaacgactacgtggaaaggaaaaatcagctcgagcagtggatggaatctgtcgatcaaaagatcgagcaccctctgcagcctcagcccggcttaaaggagaagttcgttctgctggatcatctgcagtcaatcttgtcagaggcagaagatcacacccgcgctctgcatcggctcatcgcaaaaagcagagagctgtacgagaagacagaagatgagagtttcaaggacacggcgcaggaagaactgaagactcagttcaatgacatcatgactgtcgccaaggagaaaatgaggaaagtcgaggaaatcgtaaaggatcaccttatgtacctcgacgcagtgcacgaattcaccgactggctgcatagcgctaaggaagagctgcaccgttggtctgatatgtctggggactctagcgccacgcagaaaaaactctccaagatcaaggaactgattgattctagagagatcggagcatcgcgcttatctcgcgttgagagcctggcaccagaagttaagcagaataccaccgcgagcggttgcgagctgatgcacaccgagatgcaggcattgcgcgcagactggaagcagtgggaagattccgtgttccagacccagtcatgccttgaaaatctcgtgtctcagatggcgctcagcgagcaagaatttagtggccaggtggcccaattggaacaggcactggaacagttcagcgccctgctaaagacctgggcccagcagctcaccttgctagaaggcaaaaacaccgacgaagagatcgtggaatgctggcacaaagggcaggaaatactcgatgccctgcagaaggctgaaccaagaacagaggacctcaaaagccaacttaacgaattatgccgcttcagtcgcgatttgtctacctattccggcaaggtgtcgggactgataaaagagtataattgcctctgcctgcaggcgtctaagggctgccaaaataaggaacaaatactccagcaacggttcagaaaagcgttcagagactttcagcaatggttggtgaatgccaagattacgacagccaagtgttttgacatcccccagaacatctctgaagtcagcactagcctgcagaagatccaagagtttttatccgaaagtgagaatgggcagcacaaacttaacatgatgctgagtaaaggtgagctactctctaccttgctgacaaaggagaaagcaaaggggatacaggccaaggtgacggctgccaaagaggattggaaaaattttcactccaacctgcaccagaaagaaagtgcccttgaaaatttgaaaatccagatgaaagatttcgaagtgagcgcagaacccatccaggattggttatcaaagacagaaaagatggtgcacgagtctagcaaccggttatatgatttgccagctaaaaggcgggagcagcagaagctccagtccgttcttgaagagatccactgctatgagccacagcttaaccggttaaaggagaaggcccagcaattgtgggaaggacaagctgcctctaaaagttttagacatagagtgagtcaactttcctctcagtatctggccttgtctaatcttacaaaggagaaggtgtcgcgcttggatcggattgtggctgaacataatcagttttccctgggcattaaggaactgcaagactggatgacagacgctatccatatgctggactcctattgtcaccctacttctgataagtccgtcttagattcccggactcttaaactcgaggctcttctgtctgtgaagcaggaaaaggaaattcagatgaaaatgatagtgactcgcggagaaagtgtgctccaaaacacaagtcctgaggggatcccaacgatccagcaacagctccagtcagtgaaggacatgtgggcttcgttgctcagcgcaggtatccgatgcaaacgtgttagactcccatgcgcctatattgcccttaaactgcgggtgcatcagcatgcagaactccgagataaaactacaatgctcggaaaggcaaaagaagcagtgacaaagtctgagaaactcgtgaggcttcaccaggagtatcagagggatctgaaggccttcgaagtctggctggggcaggagcaggagaaactagatcagtattccgtgctggagggcgatgcacacacgcacgagaccacactgcgcgaccttcaggagttacaggtccactgtgccgagggtcaagcacttcttaacagcgtgctccatactagggaagatgtgatacctagcggcatacctcaagcagaagatcgcgcgcttgaaagtctccggcaggattggcaggcctaccaacatcggctttccgagacccggacacagttcaataacgttgtgaacaagctgagactaatggaacagaagttccagcaagttgacgagtggctcaaaactgctgaagagaaggtatcaccacgcacccggcgccaatccaaccgggcgacaaaggagatccagctgcatcaaatgaagaagtggcatgaagaagtgaccgcttatcgcgacgaagtggaggaagttggtgcgcgcgcacaggaaatattagacgagtcacacgttaatagccggatgggttgtcaagctactcagctgacgagtcgataccaggcactgctccttcaggtgctcgagcagattaaattcttggaggaggagattcaatccctagaggaatccgagagcagcctttcgtcatatagtgactggtatggttctacacacaagaacttcaaaaatgttgctaccaagattgacaaggttgataccgtgatgatgggcaagaagctcaagacactggaggtgctgctgaaggatatggaaaagggccatagtctgcttaagtccgctagagagaaaggggagcgggctgtgaaatatctggaagaaggcgaagctgagagacttcggaaggaaatacatgaccatatggaacagttgaaagaactcacctccacggttaggaaggagcatatgaccttggagaaatcactccagcagaccgtgctttcccacgagccctctgtgaagagcgttagggaaaaaggggaggcattgctggaactcgttcaggatgtaaccttgaaagacaagatagatcagcttcagtctgattaccaagacctctgtagtattggaaaagaacatgtgttcagtcttgaggccaaggtgaaagaccacgaagactacaactcagaactccaagaagtggaaaagtggctgctgcaaatgagcggcagattggtcgctccagacttactcgagacatctagcttggagaccataacacagcagttagctcatcacaagatgtaccagagcctcgagcatgagctacaaaaacacgtgtctaggcaagacacactccagcagtgtcaggcatggttgtctgccgtacagccagatctagagccttctccgcaaccccctctctctcgcgccgaagccatcaagcaggttaagcatttccgagctctccaagaacaggcgcggacatatctggacttactctgctctatgtgcgatctgagcaatgcctctgtgaagacgactgccaaagatattcagcagaccgaacaaactatcgaacagaaattggttcaggcgcagaatctcacccagggatgggaggagatcaagcatctgaagagcgagttgtggatttatctgcaggatgcagatcagcaactccagaatatgaaacggcgccactccgagttagaactgaatatcgcgcaaaacatggtcagtcaagtcaaagacttcgtcaaaaagctccagagtaagcaggcaagcgttaacacaattattgagaaagtcaacaaactgacaaaaaaggaggagtctcccgaacataaagaaattaaccatctcaatgatcagtggttagatctctgccggcagtcaaataatctttgcctgcagagggaggaagaccttcagagaactagagactaccacgattgcatgaacgtggtggaggtgtttctggagaagtttacaaccgaatgggacaatctggcccgctcagacgctgaatctaccgcggtgcacttggaagctctcaagaagcttgcacttgcgctgcaggaaaggaaatacgctattgaagatttgaaggatcagaagcagaaaatgatcgaacacctcaatctcgacgacaaggagctcgtgaaggagcagacctcccacctggaacagagatggtttcagctggaagatctgatcaagagaaaaatccaggtgtcagtgaccaaccttgaggagcttaatgtggttcagagccggtttcaagagctcatggagtgggctgaagaacagcagcctaacatcgccgaggcactcaagcagtctccaccgcctgacatggcccagaatctgctcatggaccatctggcaatttgttccgagttggaagcaaagcagatgttgctgaaatctctgattaaggatgcggacagagtaatggccgatctgggcctgaatgagaggcaggtaatccagaaagctctgagcgacgcacagagccatgtcaattgcctgagcgacttggtgggccagagaagaaagaagcattttaaggaggattttgacaaagcttgtcactggctgaaacaggctgatatcgtgacatttccggagatcaacttgatgaacgagagctccgaacttcacacccagctagccaaataccagaacattctagagcagagtccagagtacgaaaacttactgctgacacttcagcggacgggccagacaattctgccaagcctaaatgaagtggaccatagttacctgtccgagaaactgaacgccctgcctagacaattcaatgttattgtggcactggccaaggacaagttttacaaggtccaggaggccatactggcacggaaagagtacgcttcactaatcgaactcaccacccagagcctcagcgagctggaagctcaattcctacgtatgtcaaaagttcccaccgaccttgctgtggaagaagcactgtccttgcaggacggatgccgcgcgatattggatgaggtggccggccttggcgaggctgtcgacgagctcaaccaaaagaaggaaggattcagaagtactggccaaccgtggcagccagataagatgctgcatctggtgacactgtatcatagattgaaaaggcagactgagcagcgcgtctcattattggaagatactacttctgcttatcaggaacacgagaaaatgtgccagcagcttgagcgtcagctcaaatccgtcaaggaggaacaatctaaggtgaacgaggaaaccttacccgcagaagagaaacttaaaatgtaccatagccttgccgggtcattacaggatagcggtattgttttgaaacgcgtaacaattcatctggaggatctcgccccccaccttgaccccttggcttacgaaaaagctcgccatcagatccagtcctggcagggcgaattgaagctgttgaccagcgccattggagagactgtaaccgagtgcgaaagccgcatggtacagtcgatagactttcaaaccgaaatgagccgaagtctggactggctgcgtagagtgaaagccgagctgtccggaccggtgtacctggatctgaacctacaggacattcaggaagagatcagaaagattcagatacatcaggaggaggtccagagctcccttagaattatgaacgctctctctcataaagaaaaagagaagttcaccaaagccaaggagctgattagcgccgacctcgaacatagtctcgcagagctgtctgaactggacggcgatattcaggaggccctacgtactaggcaggctactttaacagaaatctacagccagtgtcagcggtactatcaagtatttcaggcggccaatgattggctggaagacgcacaagaactcttgcagctggccggcaacggactcgatgttgaaagtgccgaggagaacctgaagtcccacatggaattcttcagcaccgaggatcaatttcacagtaatctggaagagctgcattccttggttgcaacccttgatcccctcattaagccgaccgggaaggaagatctggagcagaaagtggctagcctggagctacgctcccagcgcatgagtcgggactccggggctcaggcgttggtgtccgtcgtgaatagtttccacgaaaagatagtagctctggaggaaaaggcatctcaattagagaagactggcaacgatgcgagtaaggctactctgagtaggagtatgactactgtatggcagcgatggactcgactgagggcagttgcccaggatcaggaaaaaattctggaagacgccgtggacgaatggaccggtttcaataacaaagttaagaaggcaactgagatgatcgaccaactgcaggataagctgccgggctcatccgcagaaaaagcaagtaaggccgagctgctaacgctcctggaataccacgatacattcgtccttgagttggagcaacagcagtcggcgctggggatgctccggcaacagacactgagtatgcttcaagacggcgccgccccgacacccggcgaggagcccccactgatgcaggagatcaccgcgatgcaggaccgctgtctgaaaatggtcgaaacccagatcaattctgttaagtgctgggtgcaagagaccaaagagtacttgggtaatcctacaattgaaattgacgcccagttggaagagctgcagatactgctgactgaggccacaaaccatcgccagaatatcgaaaagatggctgaagaacagaaggagaagtacctgggcctgtacacaatactcccgtcagaactgagcctgcagctcgccgaggtggccttggatctcaagatccgggaccagatccaggacaaaatcaaggaggtcgaacaatccaaagcaacatcccaggagctgagtagacagatccagaagctggcgaaagacctgacgactatcctcactaagcttaaggctaaaaccgataacgttgtgcaggctaaaacagaccagaaagccgcctcacacctggaggaatacaacgaaatgcttgagctcatcctgaagtggatcgagaaggcaaaggtgctggcccacgggacaattgcctggaacagcgctagccagctgagagagcaatatattcttcaccaaacactcctagaggaatcaaaagaaattgactccgaactcgaggccatgactgagaaactgcaatacttaacaagtgtgtactgtacagaaaagatgtctcagcaggtagcggagttgggccgcgagaccgaggagctcaggcagatgataaagataaggctccaaaatctacaggacgccgcgaaggatatgaaaaagttcgaggctgagctgaagaaactgcaagccgctctcgagcaggctcaagcaaccctgacctcacctgaggtcgggcgattgagcttaaaagaacagctctcccatcgccaacatctcctctccgagatggaatccttgaaacccaaagtgcaggctgtgcaactctgtcagtccgctttaaggataccggaagacgttgtcgctagccttcccctgtgccacgccgccctgaggttgcaagaggaggcctcacggttgcaacataccgccatccagcagtgtaacatcatgcaagaagccgtggtgcagtatgagcagtatgagcaggaaatgaagcatctgcaacagttgattgagggggcccaccgtgaaattgaggataagcctgttgccacgtccaacatccaggaactccaggcgcagatctcaaggcacgaagagttggcacagaaaattaagggataccaggagcagattgcttccctgaacagcaagtgtaagatgctgacgatgaaggcaaagcatgccacaatgcttctcacagtcaccgaagtcgaaggtctggcagaaggcacggaagatcttgacggggagctcctaccaacccccagtgcccacccgtccgtggttatgatgaccgccggtaggtgtcacactttgctgtctccagtcactgaagagagtggtgaagaagggactaattctgagattagttctcctccagcttgtcgtagtccctcccccgtcgccaacaccgatgcatcagtgaatcaagacatcgcctattaccaagccctcagcgctgaacggctgcagaccgatgccgccaagattcacccgtctacttctgccagtcaggaattctatgaacctggactagagccaagcgccactgctaaactaggcgatttgcagcgcagctgggagaccttgaagaacgtgatctcggagaaacagagaacattgtatgaagccttggagaggcagcaaaagtatcaggatagtctgcagtccatctccactaagatggaggccatcgagctgaagctttccgaatcccctgagccagggcggtcgccagagagtcagatggccgaacaccaggctctgatggatgagatcctgatgctgcaggatgagattaatgaacttcagtcatcgctcgcagaagagctggtctcggagtcttgtgaagcagatcccgctgagcaactcgccctgcagagtaccttaaccgtgctggctgagaggatgagtacaatcagaatgaaggcaagtggtaagcgtcagctgctcgaggagaaattaaacgaccaactggaagaacagaggcaggagcaggccctccaacgataccggtgtgaagcagatgagttggatagttggctgttgtcaacgaaggccactctggatactgcgctaagtcccccaaaagagcccatggacatggaggcacagctgatggattgtcagaacatgttggtggagatagagcaaaaagtggtcgctctatcagagctcagtgtgcacaatgagaatctcctgttggaaggtaaggctcacacaaaggacgaagccgagcagctagcaggaaagcttcgacgactgaaagggtctttactcgagctgcagcgggcgctgcacgataagcagctgaacatgcagggcacagcccaggagaaggaggagagtgatgtcgaccttactgcgacacaatcacccggagtccaggagtggctggcacaggctcggactacttggacccagcagagacagagttcgctgcagcagcagaaggaattggagcaggaattggccgagcagaaatcgctgctgcgctctgtcgcaagccgtggcgaggagatcttaatccaacatagtgctgccgagacctctggcgatgccggcgagaaacctgatgtgctgagccaggagctgggtatggaaggcgagaagtccagcgccgaagaccagatgcgcatgaaatgggagtcattgcatcaggaattcagtaccaaacagaagttgttgcaaaatgtgttagagcaggagcaggaacaggtgttgtactctcgcccaaaccgcctgctcagcggtgtacctctctataaaggcgacgtacccacacaagacaagtcagcagttactagtctccttgatggccttaaccaagccttcgaggaggtgtctagccagagcggcggcgcgaaacgacaatctattcacctcgaacagaaactctatgatggagtcagcgcaaccagcacctggctcgacgatgtagaggaacgccttttcgttgcgaccgccctgcttcccgaagaaacagagacctgtcttttcaatcaggagatcttggcaaaggacattaaggagatgtcggaggagatggataagaataaaaaccttttctcacaggccttcccagagaatggagacaatcgcgacgtgatcgaggacacactgggctgcctgttaggccgcctgtctctgctggactccgtcgttaaccagagatgccatcagatgaaagaaagactccagcagattcttaatttccaaaatgacttaaaagtgctgtttactagtctggcagacaataagtatattatcctccaaaaactcgctaatgtcttcgagcaacccgtggctgaacagatagaagcgattcagcaagcggaggatggcttgaaagaatttgatgctggaataattgagctgaaacgtcgtggggacaagcttcaggtggaacagccttccatgcaagaactgagcaaattacaggatatgtatgacgagctgatgatgatcattgggagcaggcggtcaggtcttaatcagaacctgacccttaagtcgcagtatgaacgcgcactgcaagacttggcagacctattggaaaccggacaggagaaaatggcgggcgatcagaaaattattgtgagttcaaaggaggagattcaacagttgttggataaacacaaggaatactttcaaggactagagagtcatatgatccttaccgagaccctctttcgcaaaattatctcctttgccgttcaaaaggagacacaatttcacacggagctcatggcacaagcctctgctgtgttgaagagagcacataaacgaggggtggagcttgagtacatcctggaaacctggtcacacctcgacgaggatcagcaggagctttcccgccagcttgaggttgtcgaatctagcattccgtcggtgggtttggtggaagaaaatgaggacaggctgattgaccgcattacgctctaccagcacctgaaaagttccttgaacgaataccaacctaaactgtaccaggtactggacgacggaaaaagactccttatttcaatttcctgttccgatctggaaagtcaactgaatcagctcggcgaatgctggctttctaatactaataagatgtctaaagaactgcaccgtttagagacgatcttgaagcactggaccaggtaccaatcggagtctgctgatctgatccattggttacagagcgccaaggatcgcttagagttctggacacagcagtccgtcacggttccgcaagaattggagatggtgcgcgaccatcttaacgcctttttagaatttagcaaagaagttgatgcccagtcatccttaaaaagcagcgtgttaagtacgggaaatcaactattacggcttaaaaaggttgataccgcaactctgagaagcgagttgtctcggattgattcccagtggactgacctcctcactaacatccctgctgtacaggagaaactccaccagctgcagatggataaactgcctagtagacatgctatctccgaggttatgagctggatatctttgatggaaaacgtgattcagaaagatgaagataacatcaaaaacagcattgggtataaggctattcacgagtatctccaaaaatacaagggttttaagatcgatatcaactgtaagcaattaacagtggactttgtgaaccagagcgttctgcagatctctagtcaagacgttgaaagtaagcggtcagacaaaaccgactttgccgaacagctcggtgccatgaataagtcgtggcagattttacaggggctggtgactgaaaagattcagctgctggaaggacttttagagagttggagcgagtatgaaaacaatgtgcagtgcctgaaaacctggtttgagacacaggaaaagagactcaagcagcaacatagaataggcgaccaggcttcggtgcaaaatgccttgaaggattgtcaagacttggaggatctgatcaaagccaaggaaaaggaggtcgagaaaattgagcaaaacgggctggccctcattcagaataagaaggaggacgtgtcatccatagtgatgtcaacactccgagagctcggacagacctgggcaaacctggaccacatggttggccagcttaagatcttactcaagtctgtcttggatcagtggtcttctcacaaggtggcgttcgacaaaattaactcatatcttatggaggctcggtattccctgtcaagattccgactcctgacgggcagcctggaagccgtgcaagtccaggttgataacctccagaacctacaggatgatcttgaaaagcaagagcggagcctccagaaatttggaagcataacaaaccagctcctgaaagaatgccacccaccggttaccgagactctgacaaataccctcaaggaggtgaacatgcgatggaataacctgcttgaggagattgctgagcagctgcagtctagcaaggctctgttgcagctatggcagcgttataaggattattccaaacagtgcgccagcactgtgcagcagcaggaagatagaactaatgaactccttaaggccgctaccaacaaggacattgctgacgatgaggtcgccacatggatccaggattgcaatgacctcctcaaaggcctcggtacagtcaaggatagtctattctttttgcatgaactcggggagcagttgaaacagcaggttgacgcgagcgctgcttctgctatacagtcagaccaactgtccctctcacagcatctgtgtgcacttgagcaagcactgtgcaaacagcagactagcctgcaggccggagtcctggactatgaaacattcgctaagtccctagaggctctggaagcctggatcgtcgaggcggaagagatcctccaggggcaggatcccagccatagcagtgacctcagtaccatccaagaacgcatggaggagctgaaagggcaaatgctgaagttctcatcaatggcccccgatcttgataggttgaatgaactgggatataggctgcctctgaatgacaaggagattaagaggatgcaaaacctgaaccggcattggtctctgatctctagtcaaactacagagcggttcagcaagctacagtctttcctcctgcagcatcagacgtttcttgagaaatgtgagacatggatggagtttttggtacaaactgagcagaaacttgcagtggagataagcggtaattatcagcatttactggagcaacaaagggctcatgagctgttccaagcagagatgttttcccgccagcagatcctccactcaatcattatcgatggacagcgtctgctcgagcagggccaggtggatgaccgtgacgagttcaacctcaaattgactcttctttccaatcaatggcagggggtcattaggcgtgcacagcagcggagaggaatcattgactcacagatccgacaatggcagcgatatcgcgaaatggccgagaaactgagaaaatggctcgtcgaagtgagctatcttcccatgagcggcctcgggagcgtgccaatcccactgcagcaggccagaactctcttcgacgaggtacagttcaaagaaaaggtcttccttcgccagcaagggagctacattctgaccgtggaagccgggaagcaactcctcctgtccgctgactcgggcgcagaggctgctttacaggcggagctggcagaaattcaggaaaaatggaagtcagccagtatgcgccttgaagagcagaagaagaaactcgcttttctgctgaaggattgggagaagtgtgagaagggcattgccgactctctggagaagttgaggacctttaagaagaaactgtcccagtctctgccagatcatcacgaagagctgcatgcggaacaaatgcggtgcaaggagctggagaacgcggtgggctcttggactgacgacctcacgcagttatcactgcttaaagacactctgtctgcctacatttcggcagatgacatctccattctaaatgagcgcgtggagcttctgcagcgtcagtgggaggaactctgccaccagctgagcctcaggcgccagcagattggcgaaagactgaatgagtgggcggtgttctccgagaaaaacaaggagctgtgcgagtggctgacacaaatggaatctaaagtgagtcaaaacggagacattctgatcgaggaaatgatcgaaaagcttaagaaggactaccaggaggagattgccattgcccaggaaaataaaattcagcttcaacagatgggggagcgactggctaaggcctcacacgaaagtaaggcgtcagaaatcgagtataagttaggaaaggttaacgaccggtggcagcacctccttgatttaattgccgcacgggttaaaaagcttaaggagacccttgtcgcggtgcagcagttagacaagaacatgagcagcctgcgaacttggttggcgcatattgaaagcgaattggcgaagccaattgtctatgactcttgcaattctgaggagatccagcgcaaactgaatgaacagcaggagttgcagagggatatcgaaaagcactccacgggcgtggcttccgttctcaacctctgcgaagtgttactccacgattgtgacgcttgtgccaccgatgctgagtgtgatagcattcaacaagccacccgcaacctagacagaaggtggagaaatatatgcgccatgagtatggagcgtcgtcttaaaatcgaggagacctggaggttatggcagaaatttctggatgactattcaagattcgaggactggcttaaatcttccgaacgcacggctgcctttcctagtagcagtggggtgatttataccgtcgcaaaggaggagctgaagaagtttgaggccttccagcgccaggtccatgaatgcctcactcaattggagctgatcaacaaacagtaccgtaggctcgctcgcgaaaacaggactgacagcgcttgcagccttaagcagatggtgcacgagggcaaccagcgttgggataacctccagaagcgcgtgacgtctatattgagacgcctgaagcactttattgggcagcgggaagaattcgaaacagccagagattctattttagtgtggctcacagagatggacctgcagcttacaaacattgagcatttttcagagtgcgacgttcaggctaaaatcaaacaactgaaagcattccaacaggagatcagtctgaatcataacaagatagaacaaatcatcgcccagggcgagcagctgatcgagaagtcagaacctttagatgccgcaatcatcgaggaggaactggacgagttgcggagatattgccaggaggtgttcggccgcgttgagaggtaccacaaaaagctaattaggctccccctgcccgatgatgagcatgacctgtcagatcgggaactggaacttgaggattcagccgctctaagcgatttgcactggcatgacagaagtgcagactcactgctctctcctcagccatcctcgaatctgtcattatcactggcgcagcccttgcggagcgagcgctcaggccgggacaccccagcctctgtcgatagcatccccctggagtgggatcacgattacgacctgtcgcgggatttggaatccgcaatgtcccgagccctgccatctgaggacgaagaagggcaggatgataaggacttctacctgcggggagcagtgggactgtccggcgaccacagtgccctcgaaagtcagatcagacagctgggtaaagccttggatgactcacggtttcagatccagcagactgaaaatattattagatccaaaacaccaacgggtccagaactcgacacgtcttacaagggatacatgaaactccttggtgaatgctcttctagtattgacagcgtgaaacggcttgaacacaagctcaaggaagaggaggagtcgctgccagggtttgtaaatctccattcaaccgagacgcagaccgctggggtgatcgataggtgggaattgctccaggcccaggccttgtctaaggaattgcgcatgaagcagaatctgcaaaagtggcaacagttcaattcagacctgaattctatttgggcttggctcggcgatacagaagaagaactagagcagctacaacgtttggaactgtccacagacatacagactatagaactccagataaagaagctgaaggagctccagaaggctgtggaccaccgtaaggcaattatactgtcgattaacctgtgttctcccgagttcactcaagcagactccaaagagtcccgggacctgcaggaccgtctaagccagatgaacggccgctgggatcgcgtctgctcgctcctggaggagtggaggggattgctgcaggatgctctgatgcagtgtcaagggttccacgagatgtctcacgggctgctgttaatgctagagaatatcgaccgacgcaagaacgaaatcgtgcctattgactccaatctggacgccgaaattctgcaagatcaccataagcaactgatgcagataaaacacgagttgctggaatcccagcttcgggtggcctcactgcaagacatgtcctgccagctgcttgtcaacgcagagggcaccgactgtttggaggccaaggaaaaggttcacgttatcggcaatcgcctgaaattactacttaaggaggtgtcccgccatatcaaagaacttgaaaagttgcttgatgtcagctccagccagcaggacctgtcatcttggagttccgcagatgaattggatacgagcggtagtgtttcaccgacatctggcaggtccaccccgaacaggcagaaaacgcccagggggaaatgtagtctgtctcagccaggacctagtgttagttccccgcactctaggagcacgaagggcgggagcgattcgagtctatcagagccaggcccaggtcgatctgggcgggggttcctgttcagagttctgagggcagctctccccctccaactcctgcttcttcttctcatagggttagcttgcctagtgcctatgtccgaggaggactactcttgtgccttatctaacaattttgccaggagcttccatcctatgctcaggtacaccaacggacctccgccactatag

SEQ ID NO: 257464 - DNA, 26394 bp, Artificial Sequence
  derived and/or modified sequence
atggccaccagccggggcgccagccggtgcccccgggacatcgccaatgtcatgcagagactgcaggatgagcaggaaattgtccagaaaaggacatttacgaaatggatcaactcccacttagccaagcgaaaacctcctatggtagttgacgatttgtttgaggatatgaaggatggagtgaaactacttgccttactagaggtattgagcggccagaaactcccatgtgaacaaggccgccggatgaagaggatccacgcagtggcaaatattggtaccgcactgaaatttctggagggccggaaaattaagctcgtgaacattaattccacagacattgcggacggtcgtccttctatcgtgctgggccttatgtggactatcattttgtacttccagattgaggagctcacctccaacttgccccagctgcagtctctgtcatcttcagcatcctcggtggactctatagtgagctcggagacaccatcccctcctagcaagcgcaaggtgacaaccaaaattcagggaaatgcgaagaaagctttacttaagtgggttcagtacacggccggcaagcagaccggtattgaggttaaggatttcggtaagagctggaggtctggagttgcctttcattctgtcattcacgctatccgccccgaattggtggatctcgagactgtgaagggccgtagcaaccgggagaacctcgaggatgcatttacaatcgctgagacagaacttgggattccccggctgctcgacccagaggatgtcgacgtcgataagccggacgagaaaagcattatgacttatgtggcccagttcctcaagcactatccagatatccacaacgctagcacagatggccaggaagatgatgagatactcccaggctttccttctttcgccaacagtgtgcagaacttcaagcgagaagacagagtgatattcaaagagatgaaggtgtggatcgaacagtttgaacgagacctgacgcgggcccagatggtcgagtccaatctgcaagataagtatcagtctttcaaacactttcgcgttcagtacgaaatgaagaggaagcagatagaacatctgattcaacctctgcatcgggacggaaagctgagtcttgatcaggccctggtgaagcagtcctgggaccgggtgaccagtagattgttcgactggcatattcagctggacaaaagtctgcctgcaccgctgggcacaatcggagcctggctttatagagccgaggtggccctgcgagaagagatcacagttcagcaggtgcatgaggagactgccaatactattcagcgcaaactggagcaacacaaagacctgctgcagaacaccgatgcccacaagagggcattccacgaaatctacagaactagatctgtgaatggcatcccagtacctcctgaccaacttgaagacatggcagaacgatttcactttgtgagttctactagtgaactgcacttaatgaagatggaattcctggaacttaagtatcggcttttatccctactagtgctagccgaaagtaagctaaagtcatggatcattaaatacggccgaagggagagcgtcgaacagctgcttcaaaattatgtgtctttcatagaaaattcaaagtttttcgaacagtacgaagtgacctatcagatcctaaaacagaccgccgagatgtacgtgaaagctgacgggtccgtagaggaggccgaaaacgttatgaagtttatgaatgaaaccacggcccagtggcgtaacctctcagtggaagtgaggagcgtccgtagcatgctggaggaggtaattagcaactgggaccggtacggcaataccgtcgcgtctctgcaggcgtggctggaggatgcagagaagatgctcaatcaaagcgaaaacgcaaaaaaagatttttttcggaacttgcctcattggattcagcagcatacggccatgaatgacgctggcaatttcctgattgaaacatgcgatgagatggtcagcagagacttgaaacagcagctccttctgctgaatggacggtggagagagctgttcatggaggtaaagcagtatgcacaggctgacgaaatggacaggatgaaaaaagagtacacagactgtgtagtgactctgagtgccttcgctacggaagcgcataagaagctgtccgagccactggaggtctccttcatgaatgtgaaacttctgatacaggacttggaggatatcgagcagcgggtgccagtgatggatgcacagtacaagattattactaagactgcccatctgattacaaaagagtcacctcaagaggagggaaaagagatgtttgctaccatgtccaaattaaaagagcagcttactaaggtcaaagagtgctactcacccctgctctatgagtctcagcaactgttgatcccactcgaagaactggagaagcagatgacttctttctacgactctttgggaaagataaatgaaatcattactgtgctggagagggaggcacagtccagtgccctgtttaagcagaaacaccaagaactgctcgcgtgccaggagaactgcaagaaaacattaacactaatcgaaaaggggagccaaagcgtgcaaaaattcgtgaccctttccaacgttcttaaacactttgaccagactcgtctacagcgtcagatagctgacatccacgttgcattccagagtatggtaaaaaagaccggggattggaaaaaacacgtcgaaactaactcccgtctcatgaaaaagttcgaggagagtcgagccgaacttgaaaaggtgcttcggatcgcgcaggaggggttggaggagaagggagatcctgaggagctgcttcgacgccatactgagtttttttcccagctcgatcaacgagtccttaatgcatttctaaaggcttgtgatgagctcacagacatactgccagagcaagagcagcaaggcttacaagaggcagtaaggaaactgcataagcagtggaaggatctgcagggtgaggccccctaccacctcctgcatctaaagattgatgtcgaaaaaaaccgattcctagcttcagtcgaggagtgtcgtactgagctggaccgtgagaccaagctcatgcctcaggaaggcagcgagaaaatcatcaaagagcatcgagttttctttagcgataaaggaccacatcacttatgcgaaaagcgcctacagctgatcgaggagctctgtgtcaaattaccagtgagagatcctgtcagggacacgcccgggacctgtcacgtgaccctgaaagagctcagagccgcaatagattcaacctaccggaagctgatggaggacccagataagtggaaagattacacaagccggttttctgagttttcgtcttggattagtaccaacgaaacacaactgaagggaatcaagggcgaggcgatcgatacagcaaaccacggagaagtcaaacgggccgtggaagaaattaggaatggcgttaccaagaggggcgaaacattatcttggctgaagtccaggttgaaggtactgacagaagtgagctccgaaaatgaagcgcagaagcagggggatgaactggctaagctgtccagttcttttaaggccctcgtgaccttactcagcgaggtcgagaaaatgctctctaacttcggagattgtgtgcaatacaaggaaatagtaaagaatagcctcgaagagctgatctccgggtcaaaggaagttcaggagcaggccgagaagattctggacaccgagaatctgtttgaggcccaacagctgttgctccaccaccagcaaaagactaagcgcattagtgccaaaaagcgtgatgttcagcagcagatagcacaggcccaacaaggagaggggggattgccagacagagggcacgaagagctcagaaaactggaaagtactctcgatggactggagcgctccagggagcggcaagaaaggcggattcaggtaacactcagaaagtgggaaaggtttgaaacgaataaagaaacagtggtgagatatctctttcagaccgggtcctcccacgagcgctttctcagctttagttccctggaatccttgtctagtgaactcgaacagactaaagaattcagtaagagaactgagtcaattgctgtgcaggctgagaacctcgtgaaggaagcaagtgagattccattgggtccacagaataaacagctgctccagcagcaggctaaaagtattaaagagcaggtgaaaaaactggaggatactttggaagaggacattaagactatggaaatggttaaaaccaaatgggatcatttcggttcgaatttcgaaaccctcagtgtttggattacagaaaaggagaaggagctcaatgcactcgagacatctagtagcgctatggatatgcagatctcacagatcaaagtaactattcaggagatcgagtccaagctttctagcatcgtcggactggaggaggaagcccagtctttcgctcaattcgtgactacaggagagtccgctcgcattaaggcaaaactaacccagatccgcagatacggtgaggagctgagagaacatgcacagtgtctggaaggaactatcttggggcatctgtctcaacagcagaaattcgaagaaaatctgagaaagattcaacagtcagtgagtgaattcgaggataagttagctgtaccgattaagatctgcagcagtgctactgaaacgtacaaagtcctccaagaacacatggacctgtgccaggccttggagagcctgtcaagtgcaatcaccgcattctctgctagcgccagaaaggtcgtgaaccgcgactcttgtgtgcaggaggccgcagctctgcagcagcagtacgaggatatccttcgcagggcgaaagaacggcaaaccgctctcgagaatctgctggcccactggcagagactggagaaggagctgtcctcattcctgacctggctggaaaggggagaggctaaagcctcgagcccagaaatggacattagcgccgaccgggtgaaagtagagggtgagctgcagctgatccaagcccttcagaacgaggtggtcagtcaagcaagtttttatagcaaacttctgcagcttaaagagtccttattttcggtagcaagtaaagatgacgtcaaaatgatgaagttgcacctcgaacagctggacgaacggtggagagatctgccccaaattattaataaacggataaactttctccagtctgtcgttgccgagcatcagcagtttgatgagctcttgctttccttttctgtatggattaagttattcctgtccgaattacaaacaacaagcgaaattagtataatggaccatcaggtagcactgacccggcataaagaccacgctgctgaggtggagagtaaaaaaggagaactccaaagtctgcaagggcacttagccaaactgggaagtttggggcgggccgaagacttacacctgctgcaaggcaaggcggaagattgtttccaactgttcgaggaagcttctcaggtggtcgaaagacgacagcttgctctgtctcacctggccgagttcctgcaatcgcacgctagcctatctggaattctgagacagctaaggcagactgtggaagccactaattccatgaataagaacgagagtgacttgatcgaaaaagacttaaatgacgcgctacagaacgccaaggctctggaatcagccgccgttagtctggatggcatcttatccaaggcacagtaccaccttaaaatcgggtccagcgaacaaaggacatcctgtcgagcaaccgctgaccagctgtgtggcgaggttgaacgaattcagaacctgctcggcactaaacagtctgaggcggacgccctcgccgtcctgaaaaaagctttccaggatcagaaggaagagctcctgaagtcgattgaggacatagaggagcgaaccgacaaggaaaggctgaaagaacctacgcggcaggccctccagcagcggcttagagtcttcaatcagctcgaagacgaacttaacagtcacgagcacgagctgtgctggctcaaggacaaggccaaacagatagcccagaaagatgtggcatttgcccccgaggtggaccgcgaaatcaatcgcttagaagttacatgggatgatacaaagaggctcatccacgaaaaccagggtcaatgctgtggcctcatagacctgatgcgcgaataccaaaacctcaaatcggcagtctctaaggttctggagaatgcttcctccgtgattgttaccaggacaacaatcaaggatcaagaggacctgaaatgggcctttagtaaacacgagactgccaagaataaaatgaattacaaacaaaaggacttagacaacttcactagtaaaggcaaacatctgctttctgagctgaaaaagatccattcatcagatttctccctagtgaaaactgacatggaatcgaccgtcgataaatggctcgatgtttctgagaagctcgaagaaaacatggaccggcttcgcgtctctctatctatttgggacgatgtgttgagtacacgtgacgagatcgagggttggagcaacaattgcgtgcctcagatggcggagaacatatccaatctcgataaccacttgcgcgctgaggagctcctcaaggagttcgagtccgaagtgaaaaacaaggcactcagactagaggaactccactcaaaagtcaatgatttaaaagagctcaccaagaatttggagaccccccccgatcttcaatttatcgaagccgacctcatgcaaaagctcgagcacgctaaagagataaccgaggtcgcgaagggcacactaaaagatttcaccgcccaatcgactcaggttgagaagttcattaatgacatcacgacttggttcacgaaagtggaggaatccctcatgaactgcgcacaaaatgaaacttgtgaggcgttgaagaaagtgaaggatatacagaaagagttgcagagtcagcagagcaacatcagttccacccaggagaatctgaactcactgtgccgcaagtaccattcggccgagctggagtccctgggccgtgcaatgacaggactcatcaagaaacacgaggccgttagtcagctctgttccaagacccaagcgtctctccaggaatctctggagaagcacttttctgagtctatgcaagaattccaagagtggtttctcggagctaaggctgcggccaaagaaagctctgataggaccggcgactccaaggtgctcgaagccaagctccatgacctgcagaacattcttgactcagtttcagacggacagagtaagctggatgccgttactcaggagggacagacactgtacgcccacctgagtaaacagatagtgagtagcatccaggagcagatcactaaagccaatgaggaattccaggcatttcttaagcagtgtctgaaagataagcaggccttacaggactgtgccagcgagctgggcagcttcgaggatcagcataggaagctaaacctatggattcacgagatggaggagagatttaacaccgagaacctgggggaatcaaagcagcacatccccgagaagaaaaatgaggtgcacaaagttgagatgtttttgggggaattgttagccgcgcgagaatcattggataaactcagccagaggggtcagttgctatctgaggagggacatggcgccggccaggagggtcgcttatgctctcaactcctgacatctcaccagaatcttctgcgcatgacgaaggagaaactgagatcatgccaggttgcactacaggagcacgaggcattggaggaagccctccagagcatgtggttttgggtgaaagccatccaggatcgcttagcctgtgccgagtcaactctgggatctaaagacaccctggagaagagactttcacagattcaggatatcctgttgatgaaaggagaaggggaggtaaagctgaacatggctattggcaagggtgagcaggccctgcgaagctctaacaaagagggccagcgggtgatccagacacagctggagactctcaaagaggtttgggccgacataatgtcttcttccgtgcacgcccagtctacactggagagcgttatctctcagtggaacgactacgtggagcgaaaaaaccagctggagcagtggatggagagtgtggatcaaaagatagaacaccctttgcagccccaacctgggctaaaagagaagttcgtccttctggaccacttgcagtcgatcctgtcagaagccgaggaccatacccgggctctgcaccgccttatcgccaaatccagggagctttatgaaaagactgaggatgaatcgttcaaggataccgcccaagaggagttaaagacgcaattcaatgatataatgaccgtggccaaagagaaaatgagaaaggtggaggagatcgtcaaggaccacttgatgtatctggatgccgtgcatgagtttaccgactggttgcatagcgccaaagaggagcttcaccggtggtctgacatgagcggggacagttctgccacacagaagaaactgagcaagatcaaggagttaatagactctcgggagattggcgcgtccaggcttagcagagttgaatccctggcacctgaggtgaagcaaaatactaccgcatccggatgcgaactgatgcacacagagatgcaggcccttcgcgctgattggaagcagtgggaggacagtgtcttccaaacccagtcctgccttgaaaatctcgttagccaaatggcccttagcgaacaggaattcagcggacaggttgctcagctggaacaggccctggagcaattctccgcgttgctgaaaacatgggctcagcagctgacactgttggaaggcaaaaacactgacgaggagattgtggagtgctggcacaaaggccaggaaatactggatgctttgcaaaaggctgagccccgtactgaagatctcaagtctcagctaaatgagctgtgcagattctcacgggatctcagcacttatagcggtaaagttagtggactcattaaggagtataattgtctttgcctgcaagctagtaaggggtgccagaacaaggagcagattctacagcagagattcaggaaggcatttagagattttcagcagtggctcgtgaatgcaaagattaccacagctaaatgctttgatatcccacagaacatctctgaggtgagcacaagcctccagaagatccaggagtttctctctgaatctgagaatggtcaacataagcttaacatgatgctgagcaagggtgagctgctgtccactctcttaacgaaagagaaggctaaggggattcaggcaaaagtaactgccgcgaaggaggactggaaaaattttcatagcaaccttcaccagaaggaaagcgccttagagaacctgaaaattcagatgaaggatttcgaggtgagcgctgagcctattcaggattggctgtcaaagacagagaaaatggtgcacgagtcctcaaaccggctgtatgacctgcctgcaaaacgccgcgagcaacagaagctgcagagcgtcctggaagagatccactgttacgagccgcagctcaatagactgaaagagaaagcacagcaactgtgggaaggtcaggccgctagcaagtcatttcggcaccgtgtgagtcagctttcctctcaatatctcgcactgagcaatctgactaaagaaaaagttagccgtcttgatagaatcgtggctgagcataaccagttttcattgggcatcaaagagctgcaagactggatgactgacgcgattcatatgcttgacagctactgccacccgacatctgacaagtccgtgctggacagcaggaccctcaaactggaagcactcctgtcggtgaagcaggaaaaagagatccagatgaagatgattgtgacccggggcgaatctgttcttcaaaatacatcccccgaaggtatccccactatccagcagcagctgcagagcgtcaaagatatgtgggccagcctgttaagcgcggggatacgatgtaaaagccaacttgaaggagctttatcaaaatggacaagttatcaagacggcgtgcgtcaattttctgggtggatggactccatggaggctaatttgaatgagagtgagcgccagcatgctgagctgcgggataagacaaccatgcttgggaaggccaaactgctcaacgaggaggtgttgagctatagttctctgttggagactatcgaagtgaaaggcgccggcatgacggaacactacgtgactcagcttgaactgcaggacctccaggagcgataccgcgctattcaggaacgagctaaagaagctgtgacaaagtcagaaaagctcgttaggctccatcaagaataccaacgagatttgaaggcattcgaagtgtggctgggccaagaacaggaaaagctcgatcagtactctgtcctagaaggggatgcccacacacacgagacaacactgcgagatcttcaagagctacaagttcactgcgcggaaggtcaggctctgctgaactcagtattacacactcgtgaagatgttatacccagcggcattccacaggccgaggatcgtgccctggagagcctcagacaagactggcaggcttaccaacatcggctctccgagacaagaacacagttcaataacgtggtgaataaactgcggttgatggaacaaaagtttcagcaagtggatgagtggcttaagacggcagaggaaaaggtatccccgaggacacggcggcagtcaaatagagctacaaaggaaatccaactgcatcagatgaaaaagtggcatgaagaagtcactgcctatagggatgaagtcgaggaggtcggtgctagagctcaggagatccttgatgaaagccacgttaatagtcgaatgggatgccaggcgacacagctgacctcccgctaccaagccttgcttctccaggtgctagagcaaatcaagttcttggaggaggaaattcagtcactggaggagagcgagtcttccctgtctagttacagcgactggtacggctcaacccacaaaaacttcaagaacgtggcaacgaagatagacaaagtggataccgtgatgatgggaaagaaactgaagactcttgaagtgcttctgaaggacatggagaagggccactctctgctgaaatctgccagggagaagggcgaacgagctgtgaaatacttagaggagggcgaggccgagcggttgaggaaagagattcatgatcacatggaacagctaaaggagctcacatcaactgttcgaaaagaacacatgacattagaaaaggggctgcatcttgccaaggaattttccgataaatgcaaagcactgacccagtggattgctgaatatcaggaaatactgcatgtacccgaggaaccaaaaatggaactttatgagaaaaaagcacagctcagcaaatacaagtcgcttcagcaaacagttctgagccacgagcccagcgtgaaatccgttcgagaaaaaggagaggcattgctggagctcgttcaggatgtgacactgaaagacaaaatagaccagctgcagtccgattaccaggacttgtgcagtattgggaaggagcacgtgttctccctagaagccaaggtcaaagatcatgaagattacaatagtgagttgcaggaggttgagaaatggctattacagatgtcgggacgcctcgttgccccagacctcctggaaaccagtagtctagagacaattacgcagcagcttgcccatcataaggccatgatggaagaaattgccggcttcgaggaccggttaaataatcttcaaatgaagggcgacaccctcatcggacagtgtgccgaccacctgcaggccaagctgaagcagaatgtccatgctcatctccaggggacaaaggacagctacagcgctatttgcagcacggcacaacgaatgtaccaaagtctggaacacgaactgcagaagcacgtctcccggcaagatacactgcagcagtgtcaggcatggttgagcgcagtacaacctgacttggagcctagcccacagccacccctctcccgtgccgaggccatcaagcaagtcaaacactttcgggcgctgcaggagcaggcccgcacctatctggatcttctatgttcaatgtgcgatctgagcaacgcctccgtgaagaccaccgcaaaggacattcaacagacggagcagacaatagagcaaaaactcgtgcaagctcagaatctcactcagggttgggaagaaatcaagcacttgaagtctgaactttggatttatcttcaggacgccgaccaacagctgcagaacatgaagcgaagacactccgaactggagctgaacatcgctcagaacatggtctcacaggtaaaagacttcgtgaaaaagctgcagtctaagcaggcttctgtgaacaccattatcgaaaaggttaacaagctgaccaagaaagaagaatccccagagcacaaggagatcaatcatctgaacgatcaatggctggacttgtgtcgccagagcaacaatctctgcttgcagagggaggaggatctgcagcgcacacgagattaccacgactgtatgaacgtggtggaggtgtttctggagaagttcactaccgaatgggacaacttagcgcgttcagacgcagagagcaccgcagtccatctggaggccctgaaaaagcttgcactcgcattgcaggaaagaaaatacgctatagaggacctgaaggaccagaaacagaaaatgatcgaacacctgaatctggacgataaagagctggtcaaggagcagactagtcatctcgagcaaagatggttccagctagaggacctgattaagcggaagatccaggtgtcagtgacaaacctggaggagctaaacgttgtccagagccgctttcaagagctgatggaatgggccgaagaacagcagcccaatattgccgaagcattgaagcagtccccccctccagacatggcccagaatctcttaatggaccatctggccatttgttcggaacttgaggccaagcagatgctgctgaaatccctcattaaggatgcagatcgtgtgatggcagacctcgggcttaacgagagacaggttatccaaaaagctctctccgacgcgcagagtcacgtgaactgcttgtccgaccttgtcgggcagcggcgtaaatatctgaacaaggccctgtcagagaagacccagttcctgatggccgtctttcaggccactagtcagattcagcagcatgagcgtaaaattatgttcagagaacacatttgcctgttaccagacgatgtcagtaagcaggtgaagacctgtaagagcgctcaagcctctctgaaaacataccagaacgaggtcacagggttatgggcccagggacgagaacttatgaaggaggtgaccgagcaggaaaaatccgaagtactgggaaagctgcaggaactgcagtcagtttacgattccgtcctacagaagtgttcccataggctacaagagctggagaagaacctggtcagtcgaaagcactttaaagaggacttcgataaagcgtgtcattggttaaagcaggccgacattgtgacgtttcctgagattaatctcatgaacgagtcctccgaattgcatacccagttggccaaataccagaatattctggagcagagccctgagtatgagaatctgctgctcactttgcagcgtaccggccagacaatcttgccctctcttaacgaggttgaccatagttatctctcagagaaactgaacgccctgcctcgacagtttaacgtcattgtggccctggcgaaggacaaattttacaaagtccaggaagctattctggcacggaaggagtatgcctctctcatcgaactgacaactcagagcctgagcgagctagaagcccagtttctccggatgagtaaagtcccaacggatttagcggtggaggaagccctgtcactgcaagacggttgccgcgccatactggatgaagtcgccggtctgggggaagcagtcgatgagctgaaccagaaaaaagaagggtttcgttccaccggacagccctggcagcccgacaaaatgcttcacttggtcactctgtaccataggctgaaacgccaaactgagcagcgggtcagtctgctggaagatacaacttcagcctaccaagagcatgaaaagatgtgtcaacaactggagcgccagctaaaatctgtgaaagaagaacaatcaaaggtgaacgaggagacattgccagctgaggaaaagctaaagatgtaccattccctcgctgggagtttacaggacagcggtatagtcctgaagagggtgacaatccacctcgaggatcttgccccgcacttggatcccttagcctatgagaaggctcggcatcagattcagtcctggcagggtgagctgaaacttttgacgagcgctattggggagacagttacagagtgcgagtctcgaatggtgcagtcgattgatttccaaacggaaatgagccggtctctggattggttgagacgcgtcaaagcggagcttagtggtcctgtctacctggacttgaacctccaggacatccaggaggagatcaggaagatacagattcatcaggaagaggtgcagtccagtctgcgaatcatgaacgctcttagccataaagagaaggaaaagtttacgaaggctaaggaactcatctcggccgacctggaacacagccttgccgaactgtctgaactggatggcgatatccaggaagccctgagaactcgtcaggccaccctcaccgaaatttactcccaatgccagcgctactaccaagtattccaggccgctaatgattggctggaggacgctcaagagctgcttcagctagctgggaacggcttggatgtcgagagtgccgaagaaaacctgaaatcacacatggagtttttttcaacggaagatcagtttcattcaaacctggaagaactacattccctggtggccacgctggatcccctgataaaacccacgggaaaagaagacctggagcagaaggtggcgtccctggaactgaggagtcagcggatgtccagagactcgggggcccaggtggatctgctgcagcggtgcacagctcagtggcacgattatcaaaaggcccgggaggaagttatagaattaatgaacgacactgagaaaaagctgagcgagttttcactgctgaagacttcttcttcgcacgaggctgaggaaaaactgtcggagcataaagccctggtaagcgtggtgaactcatttcacgaaaaaattgtggcacttgaagagaaggctagtcagttggagaagaccgggaacgacgccagcaaggccacactgtcccggagtatgacaactgtctggcagcggtggactaggctaagagctgtggcccaagatcaggagaagatcctggaggatgccgtcgatgagtggacgggatttaataataaggtgaagaaggccacagagatgattgaccagctgcaagacaagcttcctggctcatcggccgagaaagccagcaaagccgaactactcaccttgctggagtaccacgacactttcgtcctagagctcgaacagcaacaaagcgcgctggggatgttgcgccagcagactctttctatgttgcaggatggggctgcacccaccccaggggaggagccccctctgatgcaggagataacagccatgcaggatcgctgtctcaacatgcaggaaaaagtgaaaactaacggaaagctcgtgaaacaagaactgaaagatagagagatggttgagacgcagatcaactcagtcaaatgttgggtccaggaaactaaagagtacctgggtaaccccactatcgagattgatgcccagttggaagaactgcagatcctcttgaccgaggctacaaaccatcgacagaatattgaaaagatggcagaagaacaaaaagagaaatacctgggcctgtacactatcttgccctctgaactgtctctgcagctcgccgaggttgcactcgacctcaagatccgggaccaaattcaggacaaaattaaggaggtggagcaatcaaaagcaacttctcaggagttaagcaggcaaattcagaagctagctaaagacctgacaacgatcctaaccaagctcaaagctaagactgataacgtggttcaggccaagaccgatcaaaaagtgctgggagaggaattggatggctgtaacagcaagcttatggagcttgacgcggccgttcagaagttccttgagcagaacggacaattgggcaaacccctggcaaagaaaattggcaagctcactgagctacaccaacagacaatcagacaggctgagaacagactgtccaagttgaatcaggccgcgtcccacttggaagagtacaatgaaatgttggaactaatcctaaagtggatcgaaaaagccaaagtgctggcgcacggcactattgcatggaacagtgcatcccagttgcgggagcaatatatcctgcatcagaccctgctggaggaaagcaaagagatcgacagcgaactcgaggccatgacagagaaactccagtacttgacctcagtgtattgcacggagaagatgtcacagcaagtagccgaactgggcagagagactgaggagctgcggcagatgataaagatccgcctacagaacctccaggacgctgccaaggatatgaaaaagtttgaggccgaactgaaaaagctgcaggccgcgttggagcaggcacaggctaccttgacatcgcctgaggtcggcaggttaagtttgaaagagcagctaagtcaccggcagcacttgctgagtgaaatggagtcattaaaaccgaaggtgcaggctgtccaactctgccaatccgctctgcggataccagaggacgtggtcgcttcactccccttatgtcacgccgccctccggctgcaggaggaggccagcagattgcaacacaccgctattcaacaatgtaatataatgcaggaggccgtggtacagtacgaacagtatgagcaggagatgaagcacttgcaacagctgatcgagggggctcaccgagagatcgaggacaaacccgtggcaacaagtaacatccaagagttgcaggcacagatctctagacatgaggagctggcacagaagatcaaggggtatcaggaacagatcgcttcgctgaatagcaaatgcaagatgctgacaatgaaagccaaacacgcaacaatgctgctcactgtgaccgaggtagagggcctggcagaaggcactgaggacttagatggcgagctgttaccgaccccttccgcccatccttctgttgtgatgatgacagctggacgttgtcatacacttttatcaccggtcacagaggaatctggagaagaggggaccaactctgagatttcttccccaccagcctgcaggtccccatctccagttgccaatacggatgccagtgttaaccaggatatcgcctactatcaggcactgtcagctgagcgactgcagaccgacgccgccaagatccacccatctacgagcgccagccaggagttctacgaacccggattagagccatccgcgacagctaaattgggtgacctccagcggagctgggagaccctcaaaaatgtcattagcgaaaaacagagaactctttatgaagcgctggaaaggcagcagaagtatcaggattccctccagtccatttctaccaaaatggaagccattgagttgaaactatccgaatctcctgagcctggccgatcgccagaaagtcagatggctgaacatcaggcactgatggacgagatactcatgctccaagatgagattaatgaactccagtcatcactcgcggaagaactggtttctgaaagttgcgaggcagaccccgcagagcagctggcgcttcagtcaacattgacggtcctggcagaacgaatgtcaaccatcagaatgaaagcttctgggaagcgccagctgcttgaggagaagctcaacgatcagcttgaggagcagcggcaggaacaggcccttcagagataccgctgcgaagcggacgaactcgacagttggctgctttccacaaaagccacccttgatactgccctgtctccgcccaaagagcccatggacatggaagcgcagttgatggattgccagaacatgcttgttgaaattgagcagaaggtggtggcactgagtgaactctccgtgcacaatgagaatttacttttggaaggaaaggcgcatactaaggatgaggccgaacagttagccggcaagctcagacgacttaagggatccttgctcgagttacagagggcactccacgacaaacagttgaatatgcaaggaaccgcccaggaaaaagaggagtccgacgtggatttgacagccacccagtctcccggtgtacaggaatggctggcccaggccaggaccacgtggacacagcagcggcagtcctcactccagcagcagaaagagctagagcaggaactggcagagcagaaatcacttctgaggtccgtcgcttctcgaggcgaagagatcctcattcagcatagcgctgccgagacctcgggcgacgcgggggagaagccagacgtactcagccaggagctggggatggagggagagaaaagcagcgccgaggaccagatgcggatgaaatgggagtctctgcaccaggagttctcaaccaagcagaaactgttacagaatgtgctggagcaggagcaagaacaggtgctttattcaagaccaaataggttattgtcaggagtcccgctgtataagggggacgtgccgacgcaggataagtccgccgtaacgtcactgttagacgggttgaatcaagcttttgaggaagtatctagtcaatctgggggcgctaagagacagtctatccacctagagcaaaagctatatgacggcgtcagcgccacaagtacctggctggatgatgtcgaggagagactgtttgtggctactgccttattaccggaggaaacagagacatgtctgttcaaccaggaaattctagcaaaggatatcaaagagatgagtgaagagatggacaagaataaaaacctcttcagtcaggcctttcctgagaatggggacaaccgggacgtcattgaagataccctcggatgtctcttgggcagattgtcactgctggatagtgtggtgaaccagaggtgccaccagatgaaagagcggctgcagcagatcctcaacttccagaacgacctgaaagtgctgttcacttccctcgctgacaacaagtatattatactgcagaagctggcgaacgtgtttgagcagccggtggccgaacaaatcgaggccattcaacaggcagaggatggccttaaagagtttgatgctgggattattgagctgaagaggagaggggacaaactgcaagtggaacaacccagtatgcaggagctcagtaagcttcaagatatgtatgatgagctcatgatgataatcggctctaggcgatccgggctgaaccagaacctgaccctgaagtcccagtacgagagggccctccaagacttggctgacctgctggaaacgggacaagagaagatggccggcgaccagaagattatcgtgtcttccaaggaagagatccagcagcttttggataagcataaggaatactttcaaggtctcgagtcccacatgatccttaccgagactctttttcgcaagatcatatccttcgccgtacagaaggagacccaattccataccgaattgatggcacaggcgtcggcagtgttgaagagagcacataagagaggcgtggagctcgagtatatcctcgagacgtggagccatctggatgaagaccaacaggagttgagtcgtcagttagaggttgtggagtctagcatcccatctgtcggcctcgtcgaagagaacgaagatcgacttatagatcggataactctgtaccagcacctgaagtccagtctgaatgaataccagcctaagttgtaccaagtgctcgatgacggtaagaggctgttgatttctatctcttgctcagaccttgagagccagctcaatcagctcggcgagtgctggctgagtaatacaaacaaaatgtctaaggagctacataggctcgagacgatattaaagcactggactcgctaccagagcgagtctgcagatttgatccattggctgcagtccgccaaagatcgcctagaattttggacccagcagtcagtcactgtcccccaggaactggagatggtgcgggaccacctcaatgcttttttggagtttagtaaagaggttgacgcccagagctccttgaaaagtagcgtactgtctacaggcaatcagctcctcagactgaagaaagtcgacacagccacccttcggtccgagctcagccggatcgactcccagtggacggatctcctgacgaatattccagctgtgcaggagaagctgcaccagctgcagatggacaagctgccctcacggcacgccatcagcgaggttatgtcctggataagtctcatggaaaatgtgattcagaaggacgaggacaatatcaaaaacagcatcggatacaaagccattcacgagtacctgcaaaagtacaagggattcaagattgatatcaactgtaagcagctcaccgtggacttcgtcaaccagtccgtgctgcaaatatcctcccaggatgtggagtctaagcggtccgataagaccgatttcgcagagcagttgggggccatgaacaagagttggcaaattctccaaggacttgtcaccgaaaagatccagttattagaaggcctcctcgagtcatggagcgagtacgagaataacgtgcaatgcctgaagacatggtttgagactcaggagaaaagactaaagcaacaacacaggatcggagaccaggctagcgtgcaaaatgcgctaaaggattgccaggacctcgaggatctgataaaagcaaaggagaaagaggttgagaaaatcgaacagaatggccttgctttgatccagaataagaaagaggacgtgtccagcattgtgatgagcacgctgcgcgagctgggtcagacatgggccaatctggaccacatggtggggcagctgaaaatcctgctgaaatctgttcttgaccagtggtccagccacaaagtcgcattcgataagatcaattcttacttgatggaagctaggtacagcctcagcagattccggctgctaacgggcagccttgaagccgtgcaagtccaagtggataacctgcagaatttgcaggacgatctcgagaagcaggagagaagccttcagaaatttggcagtatcaccaaccaactcctcaaagagtgccaccccccggtaaccgaaaccctgaccaatactctcaaggaagtaaatatgcgctggaataatttgctggaagagatcgctgaacagctccagtcctcaaaggccctgctgcagctgtggcaacgctataaagactattcaaagcagtgtgcttccacggtccaacagcaggaagatcgcacaaacgagctcttaaaagcggccacgaataaggatatcgctgatgacgaagtggcgacctggatccaagattgtaacgatctcctgaaaggcttgggaacggtgaaggattcactgttctttctgcacgaactcggggagcagctgaagcaacaggttgacgcatcagcagcgagcgcaatccagtccgatcaactcagcctatcacaacacttatgtgccctcgagcaagcattatgcaaacagcagacgagtctgcaggctggcgtccttgattacgaaaccttcgcaaaatcgctggaggccctagaggcttggatcgtcgaggctgaggaaatcctccagggacaggatccgtcacacagttccgatctaagcacgatacaagagcggatggaggagctcaaaggacagatgctcaagtttagtagcatggccccggatctggacaggttgaacgagctcggctatagactccccctaaacgacaaagagattaagcggatgcagaacctcaacaggcactggtccctgatctcctctcagacaacagagcgattttccaagctgcagtcctttttgctacaacatcaaactttcctcgagaaatgcgaaacctggatggagttcctggtgcagaccgaacaaaaactggccgtagaaatatccggaaactaccaacacctcctcgaacagcagcgagcccatgaactttttcaagcagagatgttctctcggcagcagattcttcactccatcattatcgacggtcagcgcctcttagagcaaggccaagtagacgacagagacgaattcaatctcaaactcactctgttgagcaaccagtggcagggcgtgatcaggcgcgcacaacagagaaggggtatcattgattctcagattaggcaatggcagaggtaccgggagatggccgagaagcttcgcaagtggctggtggaggtgagctacctcccaatgtctggccttgggtcagtacccattcctttacagcaggcgcgaaccttattcgatgaagttcaatttaaggagaaggtgttccttagacagcaagggtcctacatactgaccgtcgaggccgggaagcagctgctgctgtccgctgactccggggcggaggccgccttgcaggcagaactggcagaaatccaggaaaagtggaagagcgcatccatgcgactcgaggagcagaagaagaagctcgccttcctgctgaaggattgggagaagtgcgagaaggggatcgctgactctctcgagaaactgagaacattcaaaaaaaaactgagtcagtccttgccagaccaccatgaagaattgcacgccgaacagatgagatgtaaggaacttgaaaatgccgtggggtcttggacggacgacttaactcaactctctttgctcaaggataccttatctgcctacataagcgccgatgacatatcaattctcaatgaaagggtcgaactccttcagagacaatgggaggagttgtgtcaccagctatctttgcgccggcaacagatcggtgaacgactaaacgagtgggccgtgttcagtgaaaaaaataaagagttgtgtgagtggctgacccaaatggagagcaaagtgtctcagaacggcgacatcctgatcgaggagatgatcgaaaagctaaagaaagactatcaggaggaaatcgccatagctcaagagaataaaatacagctccagcagatgggtgagaggctggccaaagcaagccacgagtccaaggcatcagaaatcgaatataaactcgggaaggtcaacgaccggtggcagcatctattggatcttattgctgcacgggtgaagaagctgaaggagacgttggtagcggttcagcagctagacaagaacatgagctcactgaggacatggctagcgcacatagagtccgaactcgccaagccgattgtctacgacagttgcaatagtgaggaaattcagcgcaagctgaatgaacaacaggagttacagagggacattgagaaacactctactggcgttgcgtcagtgctgaatctgtgcgaagttctgctgcatgattgcgacgcatgcgccaccgacgctgagtgcgattccatccaacaggccacaagaaacttggacaggaggtggcggaatatctgtgctatgtccatggagaggaggctgaagatcgaggagacctggaggctctggcaaaaattcctcgatgactattctagattcgaagactggctaaagagctcagagcgcacggcagcctttccatcatcaagcggagtaatctatacagtggcgaaggaggagctgaagaaatttgaggcatttcagcggcaggttcatgaatgcttaacacaattggagctgatcaacaaacagtataggagactggcgagagagaataggacagattccgcgtgttcactgaaacaaatggtccatgaaggtaaccaacgatgggataatttacagaaaagggtgacaagcattctgcgtcgattgaaacatttcattgggcagcgcgaagaattcgaaactgctcgggactctattttagtgtggctgaccgaaatggacctgcagttaaccaacattgagcacttttcggaatgtgacgtacaagctaaaattaagcaactgaaagcattccagcaagagatatccttgaatcacaacaaaatcgagcagatcatcgcacagggagagcaactgatcgagaagtccgagccattggacgccgccattattgaggaagaactcgacgagctgcgtcgctattgtcaggaagtgtttggccgggtggaaagataccacaagaaattgatccgtctccctttgcctgatgacgagcacgatctgtcagatagggaactggaactggaagattctgctgccctctccgacttacattggcatgacagatcagcggatagcctactgtctccacagccttcatcaaacctgagtttgtcactagcgcagcccctgaggagcgaacgaagcggacgggatacaccagcgtcagtggattctataccactggaatgggaccacgattatgacctatcaagagatttggagtcggcaatgtcccgggccctcccatcagaggacgaagaagggcaggacgacaaggacttttatttgcgtggagcagtggggcttagtggtgaccatagcgctttagagagccagattagacagctcggaaaggcactggacgacagcagattccagatacaacagactgaaaacataattcgctcgaaaacacccactggtcccgaactcgacaccagctacaaaggctatatgaaattacttggggagtgtagcagctccattgactcggtgaagaggctcgaacacaagctgaaagaagaagaagaaagcctccctggtttcgtgaacttgcattctactgaaactcagacggccggagtaatcgaccggtgggagcttctccaggctcaggctctgtccaaggagctgaggatgaagcaaaacctccagaagtggcagcagtttaattccgacctgaattccatttgggcctggttgggggataccgaggaagaactagaacaactgcagaggttagagctcagcactgatatccagaccattgaactgcagatcaagaagttaaaagaattacagaaagcagtggaccacaggaaggctatcattctgtcgatcaacctgtgttcacccgaatttacccaggccgactcgaaggagtcacgggatctgcaggaccgattgtctcagatgaacggcaggtgggaccgcgtctgcagcctgttggaggaatggaggggcctacttcaagatgccttaatgcagtgtcaggggtttcatgagatgtctcacggactgctgctgatgctcgagaatattgaccgccgtaagaacgaaattgttccaatagactccaacctcgatgccgaaatactgcaggatcaccataagcagctgatgcagatcaaacacgagttgcttgaaagccagctgcgggtcgcatctctccaggacatgagctgtcagctcctggtgaacgccgaaggcactgattgtctagaggctaaggaaaaggtgcacgttattggtaatcgattgaagcttttacttaaggaggtctctcgacacataaaggagctcgagaagctgttggatgtcagctcaagccagcaggacctaagctcatggagtagcgcagacgagctcgacacgagcggaagcgtttcaccaacctctggccggtcaacgccaaatcgacagaagacaccccgcggtaaatgctctttatctcagccaggcccctcggtaagttccccccattcgcgtagtactaaagggggctctgacagctcgctgagcgaaccggggccgggccgctccggacgaggctttctgtttcgcgtgctcagggccgctttacctcttcaattgttgttacttttgttgataggattggcctgtctggttcccatgtctgaagaggattactcatgtgccctgagtaacaacttcgccaggtcgtttcaccccatgttgcggtatacaaatggaccccctcccttatag

SEQ ID NO: 257465 - DNA, 26393 bp, Artificial Sequence
  derived and/or modified sequence
atggcgaccagtagaggcgcaagtcgatgtcctcgggacatcgcgaacgttatgcaacggttacaagatgaacaggagattgtgcagaagagaacattcaccaagtggatcaattcccacctggctaaacggaaacctcccatggtggtcgacgatctgtttgaggacatgaaagacggggtgaagctgctggccctcttggaagtgctttcgggccagaagctgccctgcgaacaaggaaggcggatgaaacggatccacgccgtagctaacataggcaccgccctgaaattcctcgaaggcaggaagattaaacttgtcaatattaactctaccgatatcgccgatggcaggccatccatagtgctgggactcatgtggacaattatcctctattttcagatcgaggagttgaccagcaacctccctcagcttcagagcctgtcatcctccgcctcttctgtggattccattgtcagctcagaaactccctcccctccttccaaaaggaaggtaacaactaagatccaaggcaatgcaaagaaagccctgttgaaatgggtgcagtacacggccggtaaacaaaccggaattgaggtgaaagactttggaaagtcctggaggtccggcgttgccttccacagtgtcattcacgcgatcaggccagagctcgtggacctcgagactgtgaaaggcagaagcaaccgagaaaacctagaagatgcattcacaatagctgaaaccgagcttggtattcccagacttctggacccagaggacgtggacgttgacaaacccgatgaaaagagtatcatgacatacgtggcgcagtttctgaagcactatccagatatacacaacgcatccaccgatggccaggaagacgacgaaatcctgcccggatttcccagttttgccaattctgtgcagaactttaagcgggaggaccgtgtgatctttaaagagatgaaggtgtggattgagcagtttgaacgggacctaacccgcgctcaaatggtcgagtccaacttgcaggataaatatcagtccttcaagcattttcgagtccagtacgagatgaaacgaaagcagatcgagcacctgattcagcccctccatagggatgggaagttgtctctggatcaagccctcgtcaaacaatcctgggatagggttacttcgcggttatttgactggcacatacagttggacaagtccctgcccgctcctctcggaaccatcggagcgtggctctaccgggcagaggtcgcgcttcgcgaagaaatcactgtgcagcaggtacatgaggagaccgccaacactattcagcgaaagttagagcaacacaaagacctcttacaaaataccgatgcccataagcgagcgttccatgagatatatcgtactagaagcgtgaatggcattcccgtaccaccagaccagctggaggacatggccgaacgatttcattttgtctctagtaccagtgaattacacctgatgaagatggagttcttggagctgaaatataggctcctgtccctgcttgtgctcgctgaaagtaagctcaagtcatggatcattaaatatggtagaagagagtccgttgaacagctgctgcagaattacgtttccttcatcgagaatagcaaattttttgagcaatatgaggtaacataccagattctgaagcaaaccgctgagatgtacgtgaaggctgatgggagcgtggaggaggctgagaacgtgatgaaatttatgaatgagacgaccgctcagtggagaaatctctccgttgaagtccggtcagttagatctatgctcgaggaggtaataagcaattgggatagatatggtaacactgttgcgtcactgcaagcatggttagaagacgccgagaagatgctgaaccaatccgaaaacgccaagaaggatttcttccgaaatttacctcactggatccagcagcacaccgccatgaacgatgctggcaatttcctaatcgagacgtgcgacgagatggtgagccgggatctaaaacaacaacttctgctgcttaacggaaggtggcgggaattgtttatggaggtgaaacagtatgcccaggctgatgagatggaccgcatgaaaaaggaatacacagactgcgtggtgaccctgtcagctttcgccactgaagctcacaagaagttgtctgagcccttggaagtttcctttatgaatgtaaagctacttatccaggatttggaagacattgagcagagggtaccagtaatggacgcccagtataaaatcatcactaagaccgctcatctaataaccaaggaatcccctcaggaggagggtaaggaaatgttcgccaccatgagtaaactgaaagagcagctcacaaaagttaaggagtgttactctcccctgctgtacgaatcccagcaattgctcatcccactggaggaactagagaaacagatgaccagcttttatgatagccttgggaagatcaacgagatcatcactgtgctggaacgagaagctcagagctctgcactgtttaagcagaaacatcaggagctactggcctgtcaggagaactgcaagaaaaccctgaccctgattgaaaaaggatcacagagtgtccagaagttcgtgacccttagcaacgttctgaaacactttgaccaaacaaggctgcagcgccagatcgctgatatccacgtggcgttccagagcatggtcaaaaagacaggtgactggaaaaaacatgtggagaccaatagcagacttatgaaaaaattcgaggaatccagagcagagctggaaaaagtcctgcgaattgcccaagaaggactcgaggagaaaggagaccctgaagaattactgagacgacatactgagttcttcagtcagctcgaccaaagagtactcaacgcattccttaaagcctgtgatgaactaacggacattctccctgagcaggagcagcaaggtcttcaggaagccgtgaggaagctgcataagcaatggaaagatcttcaaggcgaagccccatatcatctcttacacttgaagattgacgtcgaaaaaaacagattcttggcctccgtggaggagtgtagaactgaactggaccgtgagacaaagctgatgccccaggaggggagcgaaaagattatcaaagaacaccgagtctttttcagtgacaagggtcctcaccacctctgtgaaaaaaggctgcagctgattgaagagctgtgcgtgaagctacctgttcgggatcctgtgagggacacaccaggaacttgtcacgttactcttaaggagctacgggctgcaatagactctacctaccgcaagcttatggaggaccccgacaagtggaaggactataccagccggttctccgagtttagcagctggatatctactaacgagacacagctgaaggggatcaagggggaggccatcgacacagctaaccatggcgaggtaaagagggcggtcgaagagatacgaaatggggtgaccaaacgaggcgaaacgcttagttggttgaaaagccgactcaaagtgctgactgaggttagcagcgagaacgaagctcagaagcagggagatgagctcgccaagctgtcgagtagttttaaggctttggttacgctgctgtcagaagtggagaaaatgctctccaacttcggggactgtgtgcaatacaaggagatcgtcaaaaacagccttgaggagctcatctcgggtagtaaggaggttcaagagcaagctgagaagatcttggacactgagaacctttttgaggcccaacaactcttgctgcaccaccaacagaagacaaagcgcatcagtgccaagaagagggatgtgcagcaacagatcgcccaggcccagcagggggaaggaggcctgcccgaccgcggacacgaagagctgaggaaacttgagagcactctggacgggctcgagagaagcagagagcggcaggaacggaggatccaggtgaccctgagaaagtgggaaaggttcgagaccaacaaagaaaccgttgtcagatacttgttccagaccggcagtagccacgagcggttcctctcctttagttctctcgaatccctgtcatcagaactggagcaaaccaaggagttttcgaagcgaaccgagtctatagctgtgcaggctgagaacctcgtcaaagaagcatcggaaattcctctaggaccccagaataaacagttactccaacaacaagccaagagcatcaaggagcaagtgaagaagttggaagatacactcgaggaagatattaagacgatggagatggtaaagaccaagtgggaccacttcggctcaaacttcgagacactgagcgtgtggatcaccgagaaggagaaggagctcaatgctttggaaaccagctctagcgccatggacatgcagattagccagatcaaggtgaccatacaggagattgaaagcaaactttctagcattgtagggctcgaggaagaggcccaaagtttcgcccagtttgttactacaggcgagtccgcacgaataaaggccaagctcactcaaatccgcaggtacggcgaagagctcagggaacatgctcagtgcctggaaggaaccattttgggacacctgagccagcagcagaagttcgaagagaatctgcgcaagattcagcagtccgtgtccgaattcgaggacaagctcgcagtgcccattaagatatgctctagcgccacagagacatacaaggttctccaagaacatatggatctgtgccaggccttagaaagcctgtccagcgcaattaccgcattcagcgcaagcgcccgaaaagttgtgaatcgagattcctgcgtgcaggaagcagcagcgttacagcagcagtatgaagacattctgagacgggcaaaagagcggcagaccgccctggagaacctccttgctcattggcagcgcctcgagaaggagttgagtagctttttgacctggctggagcggggtgaagccaaggcttcttcacccgagatggacatttccgctgatcgtgttaaggtcgagggagaactccaattaatccaagcactgcagaatgaggtggtttctcaggccagcttctacagcaaactgctccagttaaaagagtcactttttagcgttgcttccaaggatgatgtcaagatgatgaagctgcatcttgagcagctggatgagcggtggcgggacctccctcagatcattaataaaagaattaatttcctgcagtctgtagtggctgagcaccagcaattcgatgagctattgctctctttttctgtgtggatcaaactgtttctctccgaactccagacaacgagcgaaatctcaattatggatcaccaggtggccctgactcgacacaaggatcatgcagccgaggttgagtctaaaaagggtgaacttcagagtctgcagggacacctggcgaaacttgggtccctgggacgggctgaagatctgcatctcttacaggggaaggcagaggattgttttcagctgtttgaagaggcctcccaggtggtggagcggaggcaattagccttgagccacttagctgagttccttcagtcgcatgcttctctgtccggtatcctgcgtcagttgaggcagaccgtagaagctacgaatagcatgaacaaaaatgagtctgacctcattgagaaagacctcaacgacgcgctacaaaatgcgaaagccctggagtcagctgccgtcagcctggacggcatcctttctaaggcgcagtatcatctgaaaataggctccagcgagcaacggacctcttgcagggcgacagccgatcagctgtgcggagaagtcgagcgcatacaaaacctgctcggcaccaagcagtctgaggccgacgcgctggccgtacttaaaaaagcatttcaagaccaaaaggaggagttactaaaaagcattgaggatatcgaagaacggactgataaagagcgcctgaaggaacctacgagacaggctctgcaacagagacttcgggtgttcaaccagctcgaggatgagctcaatagccatgagcacgagctttgttggttgaaagataaggcaaagcagatcgcccagaaggatgtggccttcgctcccgaagtggaccgggaaattaatcggctggaggtgacctgggatgacacaaaaaggttgatccatgagaatcaaggtcagtgctgcgggttaatcgaccttatgcgtgaataccagaatctcaaatctgcagtctcaaaggttctcgagaatgcgagctcggtgatagtgactaggaccactattaaggaccaggaggatctgaagtgggcattttcaaagcatgaaacagctaagaacaaaatgaattacaaacagaaggatctggataactttaccagtaaaggtaaacacctcctgagcgaactaaagaagattcacagtagcgattttagcctggtgaagaccgacatggaaagcactgtcgacaaatggttggacgtatctgagaagctagaggagaacatggacagattgcgcgtgtcactgagtatctgggacgacgttctcagcactagagatgaaatagagggctggagcaacaattgtgtcccacagatggctgaaaacatcagtaatctggacaatcacttgcgagcagaggagctgttaaaggagtttgagtcagaagtgaagaacaaggcgctgcggctggaggagttgcattcgaaggtgaacgacctgaaagagttgactaagaacctggagactcctccagacctccagttcatcgaggccgacctgatgcagaaactggagcatgccaaagagataacagaagtagccaaaggaacactgaaggatttcacagctcagagcactcaagttgagaaattcattaacgacatcaccacatggtttactaaggtggaggaatcgttgatgaattgtgctcagaacgagacgtgcgaagcacttaagaaagttaaggacattcagaaggagttgcaatcccagcagtctaacatctcctcgacccaagagaatcttaactctctctgcagaaagtatcatagcgcagagctggagtctctgggccgtgctatgactggactgataaaaaagcatgaggcagtaagtcagctttgcagcaagactcaggcatccctgcaagagtcactggagaagcacttcagcgagagcatgcaggagtttcaggagtggttcctaggggcaaaagccgctgccaaagaaagctctgaccgcacgggcgattctaaagttctggaggccaagctgcacgatttgcagaatatcctggactctgtgtcggacggacaatcaaaattggacgccgtcacacaagagggccaaacactgtacgcgcacctttctaagcaaatcgtctcctcaatccaagagcagatcaccaaggctaacgaagagttccaggcatttttgaagcagtgtcttaaggacaagcaagcactgcaagattgcgcctccgagctgggatcgtttgaggatcagcaccggaaacttaacctctggattcacgagatggaagagagatttaatacagagaatctaggtgagagtaaacagcacataccagaaaagaaaaatgaggtccataaggtggaaatgtttttaggcgagctgctggcagcacgggaatctcttgataaactatctcagcgcggacagcttctaagcgaggagggacacggggctggacaggagggccgtctgtgcagccagctgcttacctcccaccagaacctcctgaggatgactaaggagaagctgcgcagctgccaggtcgccttacaggaacatgaggccttggaggaagccttgcagagtatgtggttctgggttaaagctatccaagatcgactggcctgtgcggaaagcactcttggctctaaagacacactcgaaaagaggcttagccagatccaggatatattgctcatgaagggtgagggcgaagttaaacttaacatggctatcgggaaaggcgagcaggctctcagatcttccaataaagaggggcagagagtcatccagacccagttagagaccctcaaggaggtttgggccgatatcatgtccagctcggtgcatgcacaaagtacactggagtctgttatctcacagtggaacgattatgttgagcgcaaaaatcagcttgagcagtggatggaatcagtggatcagaagatcgagcaccccttacagccccagcctgggcttaaggaaaagttcgtgctgttggaccacctacagtccatcctcagcgaagctgaggaccacacgcgcgcactgcacaggctgattgcaaaatccagggagctgtatgagaagaccgaggatgaatcttttaaagacacagctcaagaagagctaaagacccagtttaacgatatcatgaccgtggcaaaggaaaaaatgcggaaagtggaagagattgtaaaggatcacctgatgtacctggacgctgtccacgagttcaccgattggctgcactccgcaaaggaagagctgcatcggtggagcgacatgtccggcgactccagtgcaacacaaaagaagctttccaaaatcaaggaattaatcgacagtagagagatcggagcaagtaggctgtctagagtggagtctctcgctccagaggtcaaacaaaatactaccgccagcggctgcgagttgatgcacactgaaatgcaggccctgcgggcagactggaaacaatgggaggacagtgtattccaaacccagagttgcctggagaacctggtgtctcaaatggcgctttcagagcaggaattcagcgggcaggtggcccagctggaacaggcactcgaacagttcagcgctctgctgaagacctgggcacagcagctcaccttactcgagggtaagaatacagatgaagaaatcgtcgagtgctggcataaaggccaagaaatcctcgatgcgctacagaaagctgagccccgtacagaggatctcaagagtcagctaaatgaactctgcagattttcccgtgatctgtctacatactctggtaaagtttctggattgattaaggaatacaactgtctctgtctgcaggcctcaaaagggtgtcagaacaaagaacagatcctgcagcagcggtttaggaaagccttccgagacttccaacagtggctagtgaatgcgaagatcacaacagcaaagtgtttcgacattccgcagaacatctccgaagtttccacctctttgcaaaaaatccaggagttcctttcggaatcggagaatgggcagcataagctcaacatgatgctttctaagggtgaactgctatcaactctgctgactaaagaaaaggcaaaaggtattcaggcaaaggttaccgcagccaaggaggactggaagaattttcatagcaacctgcatcagaaggagtcagcgcttgagaatcttaagatacagatgaaggatttcgaagtgtccgctgagcctattcaagattggctatctaagactgaaaagatggtgcacgagtctagcaatcggttatacgacctgcctgctaagcgcagggaacagcagaaactgcagtctgtactcgaagaaatacattgttatgagcctcagttgaatcggttgaaggagaaggcccaacagctctgggaaggacaggcggcatccaaaagctttcgccaccgggtctcgcagctgtcttcccaatatctggccttatcaaatttgacgaaggagaaggtgtccagactcgacaggatcgtggccgagcacaatcagttctctctggggattaaagagctccaagactggatgactgatgctatccacatgctcgatagttattgtcatccaacttccgataaaagcgtgcttgattcgcggacattgaagctggaggccctcctctcagtgaaacaggagaaggaaatccagatgaaaatgattgtgactagaggggaaagcgtcctgcagaacacctcaccagaaggtatacccactattcagcagcagctgcagtccgtaaaagatatgtgggcttctttgctgagcgctggcatcaggtgtaaatcacagctggaaggtgcactgtcgaagtggacaagctaccaggatggagtgcgccagtttagcggctggatggactcaatggaagctaacctcaacgaaagcgaacggcaacacgccgagttacgggacaaaaccaccatgctcggaaaggcaaaactcctcaatgaggaagtgctcagttattcttcgctgctggaaaccatcgaggtcaaaggcgcaggcatgactgagcactacgtcacacagctcgagttacaggacttacaggaacgctaccgggcaatccaagagagagcaaaggaggctgttactaagtctgagaaattggtcagactgcaccaagagtaccaacgagacctcaaggcattcgaagtttggcttggccaggagcaagagaagctggaccagtattcagtgctggaaggagacgcccatactcacgaaaccacgctccgtgacctgcaggaacttcaggtacactgtgctgaagggcaggccctgctcaacagcgtgcttcacacccgggaagatgtcatcccgtcagggatccctcaggctgaagatagggccctggaaagtctcagacaagactggcaggcgtaccagcacagactctcagaaactagaacacagttcaacaatgtcgtgaataagctgcggttaatggagcagaaatttcaacaagtggacgaatggctgaaaacagctgaggagaaagtttcacctagaacccgccgtcagagcaacagagcgactaaggaaatacagttgcatcaaatgaagaaatggcatgaggaggtcactgcctatcgcgatgaggtagaggaagttggcgcacgcgcacaagaaatcctagatgagtcccacgtaaacagcaggatggggtgtcaagctacacagctgacttctaggtatcaggctctcctcctgcaagtcttggagcaaatcaaattcctggaggaggaaatacagtccctggaggaaagcgagtcctctctttcctcatacagtgattggtacgggtctacacacaaaaactttaaaaatgttgccacaaagatcgacaaggtggacacagtgatgatgggcaagaagctgaaaacactcgaggtgctgttgaaagacatggaaaagggtcattcactgctgaagagtgcacgggaaaagggtgagcgcgctgtcaaatacctggaagagggagaggcggagcgactgcgaaaggagatccatgaccacatggaacagttgaaggaactaacatcaaccgttaggaaggagcatatgacgctcgaaaaagggctgcacctggccaaagagttctcagataagtgtaaagccctcacccagtggatagccgagtaccaagagatcctgcatgtaccagaggagcctaagatggagttgtatgaaaagaaagcgcagcttagcaagtataagtctctacaacagacagtcctgtctcacgagcctagtgtgaagagtgtgagagagaaaggcgaggcattgttggaactggtgcaggacgtcacgctgaaggacaaaatagatcagctgcagtctgattatcaggacctgtgcagtattgggaaggagcacgtcttcagcttggaggccaaggtcaaagatcatgaggactataacagtgagttgcaggaagtggagaaatggttgctgcagatgagcggccgtctggtggctcccgacttactcgagacttcaagccttgagacaattacacaacagctggcccatcataaagctatgatggaggaaatcgccggatttgaggataggttgaacaaccttcagatgaagggtgatacactgattggacagtgtgcagaccatctgcaggccaaattgaaacagaacgtgcacgcccatctgcagggcaccaaagatagctatagcgctatatgttctacagctcagcggatgtaccagagcctcgaacatgaactccagaagcatgtgagcagacaagacacgttgcagcaatgccaggcatggctgagcgccgttcaacccgacctggagcctagccctcagccaccgctatctcgtgccgaagctatcaagcaagtgaagcattttcgggcactgcaggagcaggccaggacatacctcgacctcctgtgcagcatgtgcgatctgtctaatgcctcagtgaaaacaaccgccaaggacattcagcagaccgaacagacaatcgagcagaaactggtgcaggcccaaaatctcacccagggatgggaagagattaaacacttgaaatccgagctctggatatacctccaggatgctgatcaacagctgcagaatatgaagcgtcgtcacagcgagttagagctgaacatagcacagaatatggttagccaggtgaaagactttgtgaaaaagctccagagtaagcaggcctctgtgaatactatcattgaaaaggtcaacaagctcacgaagaaagaggagagtcctgaacataaggagatcaaccaccttaacgatcagtggcttgacctctgcagacagtcaaacaacctatgcttgcagcgagaggaggatctccagcggactagagactatcacgactgtatgaacgtagttgaagttttcttggagaagtttaccacagagtgggataacttggcgcgttccgatgcagaatcaactgccgtacacctcgaggcgctgaagaagctggcccttgcactgcaggaacgcaagtacgctatcgaagatctgaaggaccagaagcagaagatgattgaacacctgaatctggacgacaaggagcttgtaaaggagcagacaagtcacctggaacagcggtggttccagctggaggacctcatcaagcggaagatccaggtatccgttaccaatctggaggagctgaacgttgtgcagagccgatttcaggagctgatggagtgggcagaagaacagcagcccaacatagccgaagctctgaaacaatcgccccctccagatatggcacaaaacctgctgatggatcacctggccatatgctcagagctcgaggctaaacagatgctcctgaagagtctgatcaaggatgcagatcgggtcatggctgacttaggactgaacgaacggcaggtgattcagaaggcactgagcgatgcacagtctcacgttaattgtttgagcgatcttgtgggccagagaagaaagtacttgaacaaggcactgtctgaaaagacccagtttctgatggctgtgttccaggccacttcccagattcaacagcacgagcgcaagattatgttcagggagcacatttgtctgctgccagatgacgtctctaagcaggtcaaaacttgcaagtccgctcaggcttcacttaagacttaccagaacgaggtgactggtctatgggcgcagggacgcgagttgatgaaagaggttaccgaacaggaaaagtccgaggtactgggaaagctgcaggaactccaaagcgtctatgattcagtgctgcagaagtgcagccatcgccttcaggaacttgagaaaaatctcgtgtctcgcaagcactttaaggaggactttgacaaggcatgccattggctgaaacaggctgatattgtaactttcccggaaatcaacctgatgaacgaaagcagtgagctgcatacgcaactggccaaataccagaacattctcgagcagagcccagaatacgagaatttactattaactttgcagaggaccggtcaaactattctgccatccctgaatgaggtggaccattcctatctttcagagaaacttaacgcccttcccagacagttcaatgtcattgtagccctggcgaaagacaagttctacaaagtacaggaggctatacttgctaggaaagagtatgccagtctcatcgagctgacaacccagagtctatctgaattggaggcccagttcctgcgaatgagtaaagtgcctacagacctggctgtggaggaagctctctcattgcaggacggctgtcgggcaattctggatgaagtagccggactgggcgaagcggttgacgaactgaaccagaagaaggagggcttccgcagtacaggtcaaccatggcagcccgacaagatgttgcacctggtgacactatatcataggctgaaaagacagaccgagcagagagtgagcctgttggaagatacaacctcagcatatcaagagcacgagaaaatgtgtcagcaactggagcgacaacttaagagtgtgaaagaggaacagagtaaggtgaacgaagagacattaccggcagaggagaagctaaagatgtaccattctctggcgggatcactgcaagactccgggatcgttctgaagcgggtaacaatccacttggaagatctggctccacatctggacccactggcatatgagaaggccagacatcaaattcaatcctggcagggggaactcaagctgctgacatctgctattggggaaactgtaacagaatgtgagagtaggatggttcaatctatcgatttccagacagagatgtcccgatccctggattggttgcgcagagtgaaggcagaactttcagggcctgtctatctggacttaaatctccaggatatccaggaggaaattcggaaaattcagattcaccaggaagaagtgcagtcatccctgaggataatgaatgccttaagccacaaagagaaagaaaaatttacaaaagctaaagagctgattagcgcagacttggagcattccctagcagagctgagcgagctggacggtgatatacaggaggcactccgaaccaggcaagccacgctgaccgagatatactcgcagtgtcagcgctactatcaggtgtttcaggcagctaacgattggctggaagacgcccaagagctgctgcagctggcgggaaatggattggacgtggaatcagcagaagagaacctgaaatcccacatggagtttttctcaacagaggaccagttccattcgaaccttgaagaacttcatagcctggtggcaaccctcgatccattgatcaagccaacaggcaaagaagatctagagcagaaagttgccagtcttgagctgaggagccagagaatgagccgtgattcaggggctcaggtcgatctactgcagagatgcactgcacagtggcacgactaccagaaggctagggaggaggtcatcgaactgatgaacgacaccgagaagaaactcagtgaattttcgttactcaaaacctcctctagccacgaggctgaagagaagctgtcagagcataaagccctggtaagtgttgtgaacagttttcatgaaaagatcgtggcccttgaagagaaagccagtcaacttgaaaagaccgggaacgacgctagcaaagccaccctgagccgctctatgacaacagtgtggcagcgatggaccagactcagagctgtggcgcaggaccaggaaaagattctggaggacgccgtggatgagtggaccggctttaataacaaagttaagaaggctacggaaatgatcgatcagctgcaggataagctgcctgggtcgtccgctgaaaaagctagcaaagctgagctgcttaccctccttgagtaccacgacaccttcgtcctggagttagagcaacagcaaagcgcgctggggatgcttcgacagcagactctttctatgttgcaggacggggcagcacccacaccgggagaagagccacctttgatgcaggaaataaccgctatgcaagatcggtgcctgaatatgcaggaaaaagttaagacaaatggaaaactggtcaaacaagagcttaaagatcgcgaaatggttgagacccagattaactctgttaagtgttgggtgcaagagacaaaggaatatctcggcaatcctaccatcgaaatcgacgcacagctggaagagctgcagatcctgctgaccgaagctacgaaccatcggcaaaacattgagaaaatggctgaggagcagaaggagaaatacctgggactctataccatcctgcccagcgagttgtcactacagttggccgaggtagccttggacctgaagatcagagatcagatccaggacaagataaaggaggtggagcagtccaaagccacgtcacaagagctaagccgacagattcagaagctcgctaaggatttaacaacaattctaaccaagttgaaagctaagactgataacgttgtacaggcgaaaactgatcagaaggtcttgggcgaagagctggatggatgcaatagcaagctgatggaactagatgccgcagtgcaaaaattcctcgagcagaatggccagctcggaaagccactggcaaaaaaaatcggcaagctgaccgaactccaccaacagacgattcgtcaagcagaaaataggttgagtaagctgaatcaggctgcatcccacctcgaagaatataatgaaatgttggaactcattctgaagtggattgaaaaggcaaaagtgctggcccacggaaccatcgcttggaactccgcctctcagttgcgcgagcagtatatactgcatcagacactgcttgaagagtcgaaagagattgactccgaattggaagccatgacagagaaactacaataccttacatccgtgtactgcaccgaaaagatgtctcagcaggtcgccgagcttggaagagaaaccgaagagctcaggcagatgataaagattcgcctccaaaacctacaggatgcagcaaaagatatgaaaaagttcgaggctgagctgaaaaagctgcaggccgcacttgaacaggcccaggccactctgacctcaccggaggtgggccgactgtccctgaaagagcagcttagccatcgacagcatctgcttagcgagatggagtctctgaaacccaaagtccaggcagttcagctctgtcagtcagctctgaggattcccgaggacgttgtggccagccttcccctgtgtcatgccgcattgcggctccaggaagaggcctcgcgtttgcagcacacagctatccaacagtgcaatattatgcaggcagccgtcgtgcaatatgagcaatacgagcaggagatgaagcacctgcagcagctcatcgaaggcgctcatagagaaatagaggacaaacccgtcgccaccagtaatatccaggaacttcaggcccaaatttccaggcacgaggaactcgcacaaaaaattaagggataccaagaacaaatcgcgtctctgaatagtaagtgcaagatgttgacaatgaaagcgaaacacgcgacaatgctactcacagtcactgaagtagagggtttggccgaaggcactgaggacctcgatggcgagttgctgcctaccccctcagcccacccctccgtggtcatgatgactgctggtcgctgtcacaccttgctgtccccggtgacagaggaatccggggaggaagggaccaatagcgaaatctctagcccaccggcatgtagaagtccgtcccccgtagccaatactgacgctagtgtcaaccaggacattgcctactaccaggctctgagtgctgagcgattgcaaacagatgctgccaaaatccacccaagcacctccgcttcgcaggagttttacgagccgggactggaacctagtgccacagccaagctgggggatcttcagagatcctgggaaacgctgaaaaacgtaatcagcgagaagcaaagaacattatacgaagccctagagcgacagcagaagtatcaggactcccttcaatccataagtacaaagatggaagcaatcgagctgaagctatcagagtcccctgaacccggaagaagtcctgaaagtcaaatggctgagcaccaggccttgatggacgagatactgatgctgcaagatgaaataaacgagctgcagtctagtcttgcagaggaactggtgtccgaatcctgtgaagcagatcccgctgagcaactggccctccagagcactttgacggttcttgccgaacggatgtctaccatcagaatgaaagcttctgggaaaaggcaacttctggaggagaagctgaatgaccagcttgaggaacagcgtcaggaacaggcgttgcaaagatatagatgtgaggcagacgaactcgatagctggcttctgagcacaaaggccacactggataccgccctgtcgccccctaaggagccgatggacatggaagcccagctgatggactgccaaaacatgcttgttgaaatcgagcagaaggttgtggcccttagtgaactgagcgttcataatgagaatcttctccttgaggggaaagctcacactaaagatgaggccgagcagctcgcagggaaattgaggcgacttaaggggtcccttcttgagttacaacgtgcgttacacgataagcagcttaatatgcagggaaccgcccaggaaaaggaggagtccgacgtcgatctaacggctacccaaagtcccggtgttcaagagtggctcgcccaggccaggaccacctggacacagcagagacagtcctccctacaacagcagaaagagttggagcaagaactcgccgagcaaaagtctcttctaaggtccgtggccagtagaggcgaggagatcttaatacagcactcggccgctgagacatcaggagatgccggagagaaacctgatgtactctcacaagagctcggtatggagggtgagaagagtagtgctgaggatcagatgcgcatgaaatgggagagtctgcaccaggaattttctaccaagcagaagctacttcagaatgtgctcgagcaggagcaggaacaggtcctctacagccggcctaatcgcctcctgtccggggtgccactgtacaagggtgacgttcccacccaggacaaatctgctgtaacctcgctgctcgatggtctgaaccaggcctttgaggaggtctctagccagagcgggggtgccaagcggcagtcgattcatctggagcaaaagctctacgacggggtgtctgcaacatcaacctggctggatgatgtggaggagagactcttcgtggcaaccgcactgttgccggaggaaaccgagacatgtctgttcaaccaggagatcttagccaaagatataaaagaaatgagcgaggaaatggataaaaataagaatctgttcagtcaagcatttcccgagaatggtgacaatcgggatgttattgaggacaccttgggctgcctcttggggagactttcccttcttgactccgtcgtgaatcagcggtgtcaccagatgaaagagagactgcagcagatacttaacttccaaaatgatctcaaagtgctcttcaccagtctagccgataataaatacatcatacttcaaaaactcgctaacgtgttcgagcagccagtggccgaacagattgaagccatacagcaggctgaggacggcctcaaggaatttgacgccggaataatcgagctgaaaagaagaggggacaagcttcaggttgagcagccctcaatgcaggaacttagcaaactgcaagacatgtacgacgagctcatgatgatcatcggcagccgcagatccggcctgaaccagaatctcacattgaagagccagtacgagcgcgctctacaggacctcgccgacttattggaaacgggccaggaaaaaatggccggagatcagaagataattgtgtcttctaaggaggaaattcagcagctcttagacaaacacaaagagtactttcaaggactggaaagtcatatgatattgaccgaaacactttttcgcaagatcatttccttcgcagtgcagaaggaaacccagttccacacagaactgatggcccaggcctcagcggtcctaaaaagggcgcacaagagaggtgtcgaactggaatacatactggagacctggagtcatttggatgaggaccagcaggaactgagcaggcagctggaggtggtggagagctctatcccgagcgttggcctggtggaggaaaacgaggatcgcctaatagaccgcatcaccctctaccagcatttgaagtcatccctcaacgagtatcaacccaaactgtaccaggtgctcgacgacggcaagagactactgattagcatctcatgtagcgacctggagtctcagctgaaccagttgggcgagtgttggctgagcaacaccaataaaatgtctaaagaactgcaccgcctcgagactatcctgaagcactggacccgttatcaaagtgagtcggctgacttaatacactggcttcagtccgccaaagatcgactcgagttttggactcagcaaagcgttactgtcccgcaggagctcgagatggtgagagatcacctgaacgcatttcttgaattttcaaaggaggtcgatgcccagtcctccctgaagtcttctgttttgtctaccggaaaccaactcttgaggctgaaaaaagtggataccgcgactctgagaagcgaactgagccgtattgattctcagtggactgacctgctgacgaacattccagcagtccaggaaaaactccatcaattgcagatggataaacttccaagccgtcatgctatctccgaagtgatgagttggatctcactgatggagaatgtgatccagaaggacgaagacaacatcaagaactccatcggctataaggcaatccatgaataccttcagaagtacaagggattcaaaattgatatcaactgcaagcaactgaccgtggatttcgttaatcagtccgtactacagatctcatcgcaggacgttgagagcaagcgctccgacaagaccgacttcgctgaacagctgggagctatgaataaatcttggcagattctccagggattagtaacagagaaaatccagctgctcgaggggctgctcgaaagttggtctgagtacgagaacaatgtccagtgccttaagacatggtttgagacccaggaaaagagactgaagcaacagcatcgtataggagaccaggcttccgtgcaaaatgcactgaaagactgccaagatcttgaggacctgatcaaggcgaaggagaaagaggttgagaagatcgagcagaatgggctcgctctgattcagaacaagaaggaggacgtctcttctatcgtcatgtcaacactgcgagagctcggacagacctgggctaatctggaccacatggtgggacaattaaaaattctgctgaaaagtgttctcgaccagtggagttcacacaaggtcgctttcgacaaaattaactcttatcttatggaggccagatattcactgtccaggtttcggcttttgactggctctctggaagcagttcaagttcaggtggacaatttacaaaatctccaagacgacctggaaaagcaggagcgaagcctgcagaagttcggctccatcacaaaccagttacttaaagagtgtcatcctcctgtgacagagacactcaccaacaccctgaaggaggtgaatatgagatggaacaatctgctggaagagatcgccgaacagcttcagtccagtaaagccctcctgcagctgtggcaaaggtacaaagactactccaagcaatgtgccagcactgtacaacagcaggaagaccgtactaacgagttgctgaaggctgccaccaataaagatatcgctgatgacgaagtggcgacatggatacaggattgtaatgacttgttaaagggcctcggcaccgttaaagactctctgtttttcctgcacgagctgggggaacagctcaagcagcaggtggatgccagcgccgctagtgccattcaatccgaccagctcagcctgagccaacacctctgcgctttagaacaggcactgtgtaagcagcagacgtctttgcaggccggagtcctggactacgaaacctttgcgaaatctttagaggcgctggaagcttggatcgttgaggctgaggagatactccaaggacaggaccccagccattctagtgacctgagtacgattcaagagagaatggaggaattgaagggacagatgctgaaattttcctctatggcgccagacctcgatcgactcaatgagctgggctataggctaccgttgaatgacaaggagatcaaaagaatgcagaatctgaacagacactggtctctgatcagcagccaaaccacggagcgctttagtaagctgcagtctttcctgctgcagcaccagacgttcttggagaaatgcgaaacatggatggagtttctcgtgcaaacggaacagaagctcgccgttgagattagcgggaactatcagcacctactagagcagcagagagcccatgaactgtttcaggcagagatgttctcacgccaacagatcttacactccataataatcgatggtcagcgcttgctcgagcagggacaggtggatgacagagacgaattcaatcttaaattgactttgcttagcaaccaatggcagggcgtgattagaagagcccagcagaggcgcggtattattgacagccagatccgccagtggcagaggtaccgagagatggccgagaagctgcgtaaatggctcgtcgaggtgtcctatttgcctatgagtgggctggggagcgtgccgatccctctgcagcaagctcgcaccctgttcgacgaagttcagtttaaagaaaaggtgttcctaaggcagcagggcagttatatccttacggtggaggcaggaaaacagctgctcctatccgcagacagcggtgcagaagctgcattgcaggccgagttggcagaaatccaagagaagtggaaatccgcgagtatgcgcctggaggagcagaagaagaaattggcctttttgttgaaggattgggagaagtgtgaaaaaggaatcgccgattccttggagaagttgcggacatttaaaaagaagctaagccagtcactacccgaccatcacgaagaactccacgcagaacagatgcgctgcaaggaattagagaatgctgtgggaagctggactgacgatctgactcagctttccctccttaaggatactttgagcgcctacatttccgcagatgacataagtatcctaaacgagcgcgtggagttacttcaacggcagtgggaagagctgtgtcatcagctgagtttgagacggcagcagataggcgaacgtctcaacgagtgggcggtattttccgagaagaacaaggaactgtgcgagtggctgactcaaatggagtcgaaggtttcccagaacggcgacatccttatcgaagagatgatcgaaaaacttaagaaggattaccaggaggaaatagctatagcccaggaaaataaaatccagctgcagcaaatgggggaaagactggccaaggcttcccatgaatcaaaggccagcgaaatcgaatataagttagggaaggtgaacgatcgctggcagcacctgttagatctcatcgccgcaagggtgaaaaagctcaaggaaacattagtggccgttcagcaactcgacaaaaacatgtccagcttaaggacatggctggcacatatcgaatcagaactggcaaagccaattgtgtacgattcttgcaattcagaagaaatacaacgcaaacttaacgagcaacaggagctgcagagagacattgagaaacacagtactggcgtcgcttccgtcctaaacctgtgcgaggtacttctccacgactgcgacgcctgcgccacggacgctgaatgtgattccatacaacaggccacgaggaacctggatcgcagatggagaaatatttgcgcaatgtccatggagcgaaggctcaaaatcgaggaaacatggcggctttggcagaaattcctcgacgactatagcagattcgaggattggctcaagtcaagcgaaagaacagctgcattcccaagctccagcggcgtgatctacactgtggccaaagaagagctaaaaaaattcgaggccttccagagacaggtgcatgaatgtttgacacagctcgagctgatcaacaagcagtacagacgactggccagagaaaataggactgactcggcatgcagcctcaaacagatggtccatgagggcaaccagcggtgggataatctgcagaagcgtgtgacctctatcctgcggcgtcttaagcactttatcgggcagcgcgaagagtttgagaccgctcgggatagcatcctcgtctggctgacagagatggacctccagctgactaatatcgagcattttagcgaatgcgacgtccaagcgaaaatcaaacagcttaaggcatttcagcaggaaatctctctcaatcacaataaaattgagcagatcattgctcaaggagagcagcttattgagaagtccgagcccctagacgctgccataatcgaagaggagttggatgaacttcgccgatactgtcaggaagtctttggccgagtggagagatatcataagaagctgatccgactgcctttgcccgacgacgaacacgacctctccgaccgcgaacttgaactcgaagatagcgcagcgttatctgatctgcactggcatgatcgcagcgccgactctctgctgtcaccacaaccatcttccaacctcagcttatccctcgctcagccgttgcggtctgaaaggtctggtcgcgatacaccggcatcagtggatagcattcccctggagtgggatcacgactacgacctgagtcgggacctggaaagcgctatgagcagggccctgcctagcgaggacgaagaggggcaggatgataaagatttctacctgcgtggcgctgttggcctgagcggagatcactccgctttggagtcacagatccgacagctgggtaaggccctcgatgactctcggttccagatacagcaaactgagaatattatccgcagcaagacgccgaccggcccagagttagacactagctataaaggctacatgaaactactcggcgagtgctccagcagcatagactccgtgaaaaggcttgagcataagcttaaggaagaagaagaatccctgcctggcttcgtcaacctgcactcaactgagacccagaccgcaggagtaatcgaccgctgggaactgctgcaggcacaggcattgtctaaagagttaagaatgaagcagaacctgcagaaatggcagcagtttaactcggacctgaactcgatttgggcttggctgggcgatacagaggaagagctggagcagctgcaacgactggaactgtccaccgacattcaaactatagagttgcagatcaagaagctgaaggaactgcagaaggcagtggaccaccgaaaagccataatccttagtattaacctgtgttcccccgagttcactcaggcggattccaaggagagcagggacctgcaggaccgtctttcacagatgaatggaaggtgggatcgggtatgcagcctgctggaggagtggcgaggtctcctgcaagacgcactaatgcagtgccagggcttccatgagatgtcccacggcttgcttctgatgctggagaatatagatagaaggaagaatgaaattgtgcccatcgactccaatctggacgcagaaattttgcaagaccaccacaaacagctgatgcagatcaagcatgaactgctggagtcccaacttcgggtcgcgtctttgcaggatatgagttgccagcttctcgtgaatgcagaaggcacagactgtttggaggccaaagagaaagtacacgtgataggtaatcgactcaagctcctgcttaaggaagtatctaggcacataaaggagcttgagaagctgctagatgtgtcttcctcacagcaggatctctcatcatggagtagcgctgacgaactagacacatccggttccgtgagcccaaccagtggacgcagcactcctaaccgtcaaaaaactcctaggggtaaatgttctctgagtcagcctggtccttcagttagttcaccccactcccgcagtactaagggagggtctgactccagtctcagtgaaccaggaccaggccgatctggcaggggctttctgttccgtgtgctccgagctgctctccccttacagctcttgctcttgctgctaatcggcctggcttgcctggtgcctatgtccgaagaggactactcatgcgctctgagtaataatttcgctaggtcatttcatccaatgctgaggtataccaacggaccccctccactata

SEQ ID NO: 257466 - DNA, 25230 bp, Artificial Sequence
  derived and/or modified sequence
atggctacctcgcgcggagcctcacgatgccctcgcgatattgctaatgtcatgcaaagactgcaggacgaacaggaaatagtccagaaaagaacttttacaaaatggatcaacagtcacctcgcgaaacgcaagccgcctatggttgtcgacgacctgttcgaggatatgaaggatggcgtgaagctcctcgccctgctcgaggtgctgtcaggacagaaactgccctgtgaacagggtagaaggatgaagcggatccatgcagttgccaacatcggaacagctctgaaatttcttgaagggaggaagatcaagctggtgaatattaactccacagatatagccgacgggagaccctcgattgttctcggccttatgtggacaattatcctttattttcaaattgaggaattaacttctaacctcccacagctccaatcactgagtagttcggcgagttccgtggactcaatagtctccagcgaaacgccatccccccctagcaagcgtaaggtcaccactaagatccagggtaacgcaaagaaagctctcctaaaatgggtgcagtacacagcaggcaagcaaactgggatcgaggtaaaggattttggtaaatcttggagatccggggtcgctttccactccgtgattcacgccatcagaccagagctcgtcgatctcgagaccgtgaaggggcgatctaatcgagagaatctggaggatgcgtttacaattgctgagacggagcttggcattccgaggctgctcgaccctgaggacgtggacgtagacaaaccagatgaaaagtcgatcatgacatacgtcgcccaattcctgaagcattaccctgacattcacaacgcatctacagacggacaagaagacgacgaaattctccctggttttccaagtttcgctaactctgtgcagaacttcaagcgcgaagacagagttatttttaaagagatgaaggtgtggatcgaacaattcgaacgggacctcacgagggcgcagatggttgaatcgaatctgcaggacaagtatcaatctttcaagcacttccgtgtacagtacgagatgaagcggaagcaaatcgagcatctcatccagcctcttcatcgggatggcaagctgtctctagaccaagctctagttaagcagagctgggatagagtcacctctaggctcttcgattggcatatccagctggataagtcacttcccgcaccacttggcaccatcggcgcttggttgtaccgcgctgaagtcgcccttagagaagaaatcacggtgcagcaggtccacgaagagacagcgaataccatccagcggaaactggaacagcacaagcgtaaattgagaaatgtcatcgatctgctccagaacaccgatgctcacaaacgggcttttcacgagatctaccgaactcgctcggttaatggtatacccgtgcccccagaccagctggaggacatggctgagcggtttcactttgtgtcttccacaagtgaactccacttgatgaagatggagttcctcgaattgaaatatcggctgctgagtctactggtcctggccgaaagcaaactgaagagctggatcataaaatacggcaggcgcgaatcagtagagcagcttctgcaaaattatgtgagcttcatcgaaaatagtaagttttttgaacagtatgaagtcacgtatcagattctgaagcagactgctgagatgtatgtcaaggcggatggatctgtggaagaagccgagaacgtgatgaagtttatgaacgagaccacagcccagtggcgaaacctgagtgtggaagtgcgaagcgtccgctccatgctagaagaggtaatatctaactgggaccggtacggcaataccgtggcatctctgcaagcttggctggaagacgccgagaagatgctgaatcagtccgagaatgccaaaaaggacttcttcagaaatctgccacattggattcaacagcatacagccatgaacgatgctggtaattttctcattgagacctgcgacgagatggtgagccgagatttaaagcagcaactgctgctgctcaatggacgctggcgagagctgttcatggaggtgaagcaatatgcccaggcggatgaaatggatagaatgaaaaaagagtatacagactgtgtggtgacccttagcgctttcgcaactgaggcgcacaagaagctgagcgagcccctggaggtctcttttatgaatgtgaaactcttgatccaggacctggaggatatcgagcaacgggtccctgtaatggacgcccagtacaaaatcatcacgaagactgcccacctcattacgaaagagtcaccacaggaggagggcaaggagatgtttgcgacaatgtcaaagcttaaagagcagctgaccaaggtgaaagagtgttattctcccttgctttacgaatcacaacagctccttattcccctggaagaactcgagaagcagatgaccagcttttacgattccctggggaagattaatgaaatcataacggttctggagagggaggcccagtcctcggctctgtttaaacagaagcaccaattgaggatcctcaagtgcaagtggtgcaactcatcccaaaagatgaccctctgcttggttcttggatctatgattagcatgctgagcaccgctaagattaccattgcaggttataagtctgaggtagaggtcagcgagctactggcatgtcaagaaaattgcaagaaaaccctgacacttatcgaaaagggtagtcagagcgttcagaagtttgtgaccctgtctaacgtcctgaagcatttcgatcagaccaggctgcagactgactgtagatacagttgttgcttttcagtgatgcggaagcagcatcacatcatgattgtcttccacatcaagtctatggtgaaaaagaccggtgactggaaaaagcacgtggaaaccaacagcaggctgatgaaaaagttcgaagaatctagagccgagttggaaaaggtccttcgaatagcgcaggaaggtctcgaagaaaaaggggacccagaggagctactgcggagacacaccgaattttttagccagctggatcagagggtgctgaatgctttcctgaaggcatgtgatgaactgaccgatatcttacccgaacaagaacagcaggggctgcaggaggccgtgaggaagctgcataagcagtggaaggacctgcagggagaagctccataccacctgcttcacctcaaaatcgatgtcgaaaagaacagatttctggccagtgtggaggagtgcagaaccgagctggaccgtgagactaagctgatgccccaagagggcagtgagaaaattatcaaagaacatagagtgtttttctcagacaagggaccccatcacttgtgtgagaagagacttcagctaattgaggaactgtgcgttaagctccctgttagggacccggtgagggacacacccggtacatgtcatgtgacactaaaagagctgcgagccgcaatagattcaacctacaggaagcttatggaggacccggataagtggaaggattatacaagccggttttccgaattttccagttggatttctactaacgagacacagctcaagggcatcaagggagaggccatcgataccgctaaccatggtgaggtgaagcgagcagttgaggaaattaggaacggggtaaccaaaaggggagaaactctgagctggctgaaatctcgcctgaaggtactaacagaagtgagcagcgagaatgaggcccagaagcaaggcgacgaactggccaagctaagttcttcttttaaagcattggtgacacttctcagcgaggtggaaaagatgctaagcaactttggcgattgtgtgcaatataaagagatcgtcaagaattctctcgaggagctcatctcaggctccaaggaagtgcaggagcaagcagaaaagatcctcgataccgagaacctcttcgaagcacagcagcttcttctgcatcatcagcagaagactaagagaatcagtgccaaaaaacgagacgtccagcagcagattgctcaagcacaacagggtgagggaggactcccagaccggggtcacgaggagctgcggaagctggagagtactctggatggcttggagcgatcaagagaacgccaggagagaagaatacaggtgactttgaggaaatgggagagatttgagaccaacaaagaaacggtggtgagatacctgttccagacaggatctagtcacgagcgctttctctcattcagtagccttgaatcccttagcagcgaactggaacagaccaaggagtttagcaagagaaccgagagtattgcggtgcaggcggagaacctggtcaaagaggccagcgaaattcccctcggccctcagaacaagcagctactccagcaacaagctaaaagtataaaggagcaagtcaagaagctcgaagacactttagaagaggagtatgtgatagacaataaaacgatggagatggtaaagactaagtgggaccattttgggtcaaacttcgagactttgtcggtgtggattaccgaaaaggagaaagagcttaatgccctagagactagcagcagcgctatggatatgcagatctcccaaatcaaagtgactattcaagagatcgagtccaagctcagcagtatcgtgggactcgaggaggaggcacaaagcttcgcgcagtttgtcacaaccggggaatctgcccgaataaaggcaaaactgacacagatccgcaggtatggcgaggagttgagggaacacgcccagtgcctggaaggcactatcctcggtcacctctcccagcagcagaaatttgaagagaatttgagaaagatccagcagtctgtctcagagttcgaagataaactcgccgtacccatcaagatttgttcctcagcgactgaaacttataaggtgctccaagagcacatggatctttgtcaggccctcgagagtttgagctctgcaatcactgctttctctgcgtccgcccgaaaggtggtcaaccgggactcctgtgtccaagaggccgctgccctgcagcagcagtatgaagatatcttgcgacgggcaaaggagaggcaaacagctctggaaaacctgctggcccattggcagaggctggagaaggagctctcatccttcttgacgtggctggaacggggagaagcaaaggcaagcagccccgagatggatatctccgccgaccgggtgaaggttgaggcctccaaagatgatgtaaagatgatgaagttacatcttgagcagctcgacgaaaggtggagggacctgccccaaataattaacaaaagaattaactttctccagtccgttgtggccgaacatcagcagttcgacgaactcttgttatcgttctctgtctggataaagttgttcttatcagagcttcaaactacaagcgagatctcaatcatggatcatcaagttgctctcacgaggcacaaagaccacgccgctgaggtggaatccaaaaaaggcgaactgcaatctcttcagggtcatcttgccaagctgggcagtctgggcagggcagaggatctccatttactgcaggggaaggccgaagattgtttccaacttttcgaggaggcctcccaagttgtggaacgtcggcagctggccctgtcacacctagctgagttcctacaaagccatgcaagcctgtccggaatattgcggcaactgcggcagacagttgaggctactaactccatgaacaagaacgagtccgacctgattgaaaaggatttgaacgatgcgctgcaaaacgccaaggctctggagtctgcagcagtgtccctcgatggaattctcagtaaggcccagtaccatctcaagattggttccagcgagcagagaacctcctgcagagctactgcagaccagctctgcggtgaagtggagcgcatccagaacctgttagggacgaagcagtctgaggcagatgccttggctgtgcttaagaaggcatttcaggatcagaaggaggagctgttgaagtcaatcgaggacatagaggaacggactgacaaggaaagactgaaggagcccacacggcaggctctccagcagcggctgagagtgtttaatcaactggaggatgaactgaacagccacgaacatgagctatgttggctgaaagacaaagccaagcaaattgctcagaaggatgtagccttcgcaccggaggtggaccgggagattaatcgattggaggtgacatgggatgacacaaagcggctcatccatgaaaaccagggccagtgttgtggactgatcgacctgatgcgcgagtatcagaacctgaaatcagctgtgagcaaagtgcttgagaacgcatcatccgtgatcgtcactagaactaccattaaagaccaggaggatctgaagtgggctttttcaaaacatgaaaccgctaaaaacaaaatgaactataaacagaaggacctcgataatttcacctccaagggaaagcacctgcttagtgaactcaaaaagattcactcttccgactttagcctggtgaagacggacatggaatccacggtggacaagtggcttgatgtaagtgaaaaattggaagaaaacatggaccgcctgagggtcagtctatccatctgggacgatgttttgagcaccagggacgaaattgaggggtggtccaataattgcgtaccccagatggctgaaaacataagtaatctggataaccacctaagggccgaggaactgctgaaagagttcgaaagcgaagtcaagaacaaggcactcaggctagaggaacttcactcaaaggtcaacgacttgaaggagttgacaaaaaacctcgagacacctcctgatctgcagttcatcgaagccgatctgatgcagaaactggaacacgccaaggaaataaccgaggttgccaagggcaccttgaaagattttactgcacagtccacccaggtggaaaaattcatcaacgacatcaccacatggtttacgaaggtggaagaatccctgatgaattgtgctcagaacgagacatgcgaggcgctgaagaaagttaaagatatacagaaggagttacagagtcagcagtctaacatcagctccacccaggaaaacctgaatagtctgtgtcgtaagtaccattcagcggagcttgagtcactaggaagagctatgacaggcttgattaagaaacacgaagcagtcagtcagttatgttcgaagacccaggcctcactccaggaatccctggagaagcacttctccgaagagtctatgcaagagttccaggaatggtttctgggggcaaaagcagccgctaaggagtcttccgataggacaggtgacagtaaggtgctcgaggcaaagctccacgatctgcagcagaatatcctggactccgttagtgatggacaatctaaacttgacgccgtgactcaggaagggcagactctgtacgcacatctgtctaagcaaattgtcagttctatccaggaacaaattaccaaggccaacgaggagttccaggcgttcctcaagcagtgtttgaaggacaagcaggcgctgcaggactgcgcatctgagcttggatccttcgaggatcagcatcggaaactgaacctgtggattcacgagatggaggagcgcttcaatactgaaaacctgggtgagtctaagcaacacatccctgagaagaaaaacgaagtgcataaagttgaaatgttcctgggcgagcttctagcggctagggagagtctcgataaactaagccagcgcggtcagctgctctcagaggagggtcacggcgcaggtcaagaaggcaggctttgttctcaactcctaacctcccaccaaaacctgttgcgaatgacgaaagagaagctccggagttgtcaagttgcccttcaggagcacgaagcgttagaggaggccttacaatccatgtggttctgggtgaaggcaatacaggacagactagcttgtgcagaaagtactctcggcagtaaggacacgctggagaaacgtctgagtcaaatccaagacatcctcctgatgaaaggcgagggcgaagttaaattaaacatggccatcggcaagggtgagcaggctcttcgatcctccaataaggaggggcagagggtgatccagacacagttagaaaccctaaaggaggtatgggccgacattatgagctcctccgtgcacgcgcagtccaccttggagtctgtaattagccagtggaatgattatgtggaacggaagaaccagttggagcaatggatggaatcagtcgatcagaagatcgagcaccccctccagccacaaccaggtctcaaggagaagttcgtactgctagaccatctccagtcgattctgagcgaagcggaggatcatactcgtgcactgcacagactgatcgcaaaatctcgagaactgtacgaaaaaaccgaggatgagagcttcaaggacactgcccaggaagagctgaagactcagtttaacgacataatgaccgtagctaaggaaaaaatgagaaaagttgaggagatcgtgaaggaccatcttatgtatctggacgccgtgcacgagttcactgattggctccattcggctaaagaggaactccaccgctggtctgacatgagcggggatagctcggccactcaaaaaaaactgtccaaaattaaagaactcatcgattcccgcgaaattggtgcttctcgcctatcgagggtggagtctctagcacccgaagttaagcagaatacaactgctagtggatgcgagctcatgcacaccgaaatgcaagccctgcgcgcagactggaaacagtgggaagattcagtgttccagacacaatcatgcctagaaaacttggtatcccagatggctctgagcgagcaagaattttccggccaggtggcgcagctggaacaagctctggaacagttttctgccctcctgaaaacctgggcacagcagctcactctgcttgagggaaagaatacagacgaggagatcgtggagtgttggcacaagggacaggagattcttgacgctctgcagaaagccgaacccagaacagaggatctgaagtctcaactcaacgagctctgccgtttcagcagagatcttagtacatattccgggaaggtctcaggcttgatcaaggaatacaactgcctgtgtcttcaagcctccaaaggctgtcaaaacaaagagcaaatcttgcagcagaggtttcgtaaggcctttagagatttccagcagtggctggtaaacgctaagattaccaccgctaagtgctttgatattccacagaacatctcagaggttagtacgagtttacaaaagatccaggagttcttgagcgagtccgagaacggacagcacaagttgaatatgatgttatcaaaaggagagctactcagcactttgttgacaaaagaaaaggccaagggaatccaggccaaggtcacagctgccaaggaagactggaaaaactttcactctaatctgcaccagaaggaaagtgccctcgagaacctaaaaattcagatgaaggattttgaggtgtccgccgagccaatccaggactggttgagtaaaaccgaaaagatggttcacgaatcttccaatcgcctgtacgatctccccgcaaagcggagagaacagcaaaagctccagtccgtgttagaagagatacattgttatgaaccacagcttaaccgactgaaagagaaggctcagcaactatgggaggggcaggcagcctccaagagtttccgacatcgggtcagtcaattgtcctcacagtacctggctctctccaacttgaccaaagagaaggtgagccgactagacaggatcgttgctgaacataaccagttttcccttggtataaaggaactgcaagactggatgaccgacgccatacatatgctggactcctactgtcatcccacctctgataagagcgtcctcgatagcagaacactgaagctagaggccctgctttcagtgaaacaagaaaaggagatacagatgaagatgatagtcaccagaggcgaatctgtcctgcagaacaccagcccggaggggatccccacaatccagcagcagctgcagtcagtgaaggatatgtgggcgtctttgttgtctgccggtatccgatgcaagagagtgagacttccctgtgcctacatcgcccttaagctgagggtgcatcagcacgcagagctcagagacaaaactactatgttaggtaaagcgaaagaggccgtgactaagagtgagaaactggttaggctgcatcaggagtatcagcgtgatctcaaagcctttgaagtatggttaggccaagagcaggaaaaactggaccagtatagcgtactggagggggatgcacacactcacgaaacgacacttagggacctccaagagctacaggtccactgtgcagaaggacaggcccttctgaacagtgtgttgcacacaagggaagatgtgattcctagcggaataccccaggcagaagacagggccctggagagcctcaggcaggactggcaagcctatcagcaccgattaagcgaaaccaggactcagttcaacaacgtggtgaacaagttgcggctgatggagcaaaaatttcaacaggtggatgagtggttgaagacagccgaagaaaaggtgtccccgaggactcgccgtcagagtaatcgcgctacaaaggaaatccaactccaccagatgaaaaagtggcacgaggaggtgaccgcttatagggatgaagtggaggaggtgggcgctcgcgctcaggagatcctcgacgaatcccacgtgaattccagaatgggatgtcaagcgacacaactgacgtcgagatatcaggccctcttgctccaggtgcttgagcagatcaaattcctggaggaggaaatacagtctctggaggagtctgagtcaagcctcagtagttattctgattggtatggcagcacgcacaaaaacttcaagaatgtcgcgacaaagattgacaaagttgacacggtcatgatgggtaagaagttgaagacactcgaggtactccttaaggacatggagaagggacattccctgctgaaatctgcgagagaaaagggggagcgtgccgtaaagtatctggaagaaggcgaggctgagcgcctgcgaaaggagattcatgatcatatggaacagctgaaagagctgacatctacagtcagaaaggagcatatgactctggagaagtcactgcagcagacagtgcttagccacgagccctccgtgaagagcgtgcgcgagaaaggggaagccctgctggagctggtacaggacgttactctcaaggacaaaatcgatcagctgcagtcagactaccaggacctttgttctatcggcaaagagcacgtgtttagcctggaagcgaaggtcaaggatcatgaggactataattccgagttgcaagaagttgagaagtggttgctgcaaatgagcggccgattagtcgctccagaccttcttgaaacaagctccttagagactattacccagcagctggcccatcacaagatgtatcagtccctggagcatgagttgcagaaacacgttagcaggcaggatacattgcagcaatgccaggcatggctcagcgctgtgcagcccgatctcgaacccagtccgcagccaccccttagccgcgctgaggctataaagcaggtgaagcactttcgggctctgcaggagcaggcgaggacctatctcgacttactctgttcaatgtgtgacctaagcaacgccagcgtgaagaccaccgctaaggacatccaacagacagagcaaacaatagagcagaaactggtacaagcccagaatcttacccagggttgggaggaaattaaacatctcaagtccgagttgtggatatacctgcaggacgctgatcagcagctccagaacatgaaaagaaggcacagtgaactagagttaaatatcgcacagaatatggtatcgcaggtgaaggacttcgtgaaaaaactccagtctaaacaggcctctgtaaatacaataattgaaaaagtgaacaaactgactaaaaaagaggaatcccccgagcacaaagagattaatcatctgaatgaccagtggttggacctgtgcagacaaagtaacaacctttgtcttcagcgtgaggaagacctccagaggactcgggattatcacgactgcatgaacgtggtggaggtgttcctggagaagttcacaacggagtgggataatctggcgaggagcgatgccgagtccacagcagtgcacttggaggccttgaaaaagctcgccctagctctgcaagagaggaagtacgctattgaagatttgaaggatcagaagcagaagatgattgaacaccttaatcttgatgacaaggagcttgtgaaggaacagacatctcacctcgaacaaagatggttccagttagaggaccttatcaagcgtaagatacaggtgtcagttaccaacctggaggaactgaatgtggtgcaaagtagattccaggagctgatggaatgggccgaggagcagcaacctaatatagcagaagccttaaagcagtcccctcctcctgacatggcccaaaaccttctgatggatcatttggctatttgcagtgaacttgaagccaaacagatgctcctcaaatctttgataaaagatgccgatcgagttatggcagacctcggcctaaatgagagacaagttatacagaaagccctttctgatgctcagtcccacgtgaattgcctgtcagacctcgtcggccagaggagaaaaaagcacttcaaagaggacttcgataaagcctgtcattggcttaagcaggccgatatagtgactttccccgaaatcaatttaatgaatgagtcttcagaactgcatacacaactggccaagtaccagaacatcctcgagcagtctcccgagtacgagaacctcctgttaactctccagcgaaccggtcagacgatcctcccttctctcaatgaagttgatcactcctacctatccgagaagctcaatgccctgcctcggcagtttaatgttatcgtggctctggcgaaggacaagttttataaggttcaggaggcaatcctggctcgaaaggagtacgctagcctgatagagttaactactcagtccctgtctgagctggaggctcagttcctccggatgtccaaagtgcccactgatctcgccgttgaagaagccttgtcactgcaagacgggtgccgagcaatcctggacgaggtggcgggactgggcgaagctgtggacgagctgaatcagaaaaaggagggcttcaggagcacaggccaaccctggcagcccgacaagatgctccacctcgtcaccctgtatcacaggctgaagcgccaaaccgagcagcgggtttccctgcttgaagacactactagcgcataccaggaacatgagaagatgtgtcaacagctcgagaggcaactaaagagtgtgaaagaggagcaatcaaaagtgaacgaagaaacactcccagctgaggaaaaactcaagatgtaccactccctggccggaagcctgcaggacagtggaattgttcttaagagggtcaccatacacctcgaggacctggctccacacctggacccactggcctatgagaaggccagacaccagattcagtcctggcagggtgaacttaagttactcaccagtgccattggagagaccgtcacagaatgtgaatcacggatggtccagtcaatcgactttcaaacagaaatgtcacggtctctcgactggttacggagggtcaaggccgagttaagtgggccagtctatttagacctgaatctccaggacattcaggaagagattcgcaaaatccaaatccaccaggaggaggtgcagtcctcccttcggataatgaacgcactgtcacataaagagaaggagaagttcacaaaggctaaggagttgatcagtgccgatctggagcacagcctcgctgaactgtctgaattggatggtgacatacaggaggccttgagaactcgccaggctacgctcactgaaatttactcacagtgtcagcggtactaccaagtgttccaagcagctaatgactggctcgaagacgcacaggagctgctgcaactagccggaaatggtctcgatgtcgagagtgcggaggaaaatctgaagagccacatggagttctttagcaccgaagatcaatttcatagcaatctggaggagctgcattccctcgtggctacgcttgaccccttaataaagcccactgggaaagaagatctagagcaaaaggtggcctccctcgagctgcgatcccagcgcatgtccagagatagtggtgctcaggctctggttagcgttgtgaatagctttcacgaaaagatagtggcactcgaggagaaagcctcccagctggaaaagaccggaaatgacgctagcaaagccacactgagcagatctatgaccaccgtctggcagagatggacccggctgagggccgtggcccaggaccaagagaagatactggaagacgccgttgatgagtggaccggctttaacaacaaagtaaaaaaggctactgagatgattgaccagctgcaggacaaacttcctggttcaagtgcggaaaaagcctccaaggcggagctgctgaccctcctcgagtaccacgatacattcgttctggagctggagcaacagcaatccgcccttggcatgcttcggcagcagactttgagtatgttacaggacggagctgcccctacaccgggagaagaaccgcctcttatgcaagagataacagccatgcaagatcgatgtctcaaaatggtagagactcagattaactcagtcaagtgttgggtccaggagacaaaggagtatctgggcaatcctactatagagattgatgcgcagctggaggagctccagatactgctgactgaggccacgaatcatcgtcaaaatatcgagaagatggccgaagagcaaaaggagaagtacctcgggttgtataccattctccctagtgagctgagtttgcagctcgctgaagttgctctggatctgaaaattagggatcagatccaggacaaaatcaaggaggtcgaacagagcaaggctacatcccaggagctctctcgccagattcagaaactcgctaaggacttaaccaccattttaacaaagctcaaagcaaagacagacaacgtcgtccaggctaagaccgatcaaaaggcagcatcacaccttgaagagtacaacgagatgctggaattgattctcaaatggatcgagaaggccaaggtgctagcgcacgggaccatcgcctggaacagtgcttcccagttacgcgaacagtacattcttcaccagacgttgctggaggagagtaaagagattgactccgaattagaagcgatgaccgagaagctacagtatctgacatccgtgtactgtactgagaagatgtcccagcaggtggccgaacttggcagagaaacagaagaacttcggcagatgatcaaaattcgactacagaacctccaggatgccgcaaaggacatgaaaaagttcgaggcagaactgaaaaaacttcaggctgctctggaacaagcacaggctacgttgacgtccccagaggttggaaggttgagcctgaaagaacagctgtcccatcggcagcatcttctaagtgagatggaatcactgaagcccaaggtccaggcggtgcaactctgccagagcgctttgcgtatccctgaagacgttgtagccagcctccccctctgtcacgcagcgctgcggctccaggaggaggcaagtcggcttcaacacactgcgatccaacagtgtaacatcatgcaggaggccgttgtgcagtacgaacaatatgagcaggagatgaagcacctacagcagctgattgagggtgcacacagggaaatcgaagataagcccgtggccacctctaatatacaagagctccaggctcagataagtcgccacgaggaactggctcagaagattaagggctaccaggagcaaatcgcctccctgaactctaagtgcaagatgctgaccatgaaggcgaaacatgccaccatgttactcaccgtgacggaagtcgaaggcctggccgagggtaccgaagatctggacggtgagttactcccgacaccctccgcccatccctctgtggtcatgatgactgccggtcgctgtcataccctcctctcacccgttacagaggaaagcggcgaggagggcaccaacagcgagatctcttcccctcccgcatgtaggtctccgagtcctgtggcaaacaccgacgcctctgtgaaccaggacattgcttactaccaagccttgtccgccgagagactgcagacggacgctgcaaagatacacccctctacctcagcttctcaggaattctacgagccgggactggagcctagcgctacagcaaagttaggcgatctgcagcgctcgtgggaaactctgaaaaacgttatctctgagaagcagaggacgctatatgaagctctagaaagacagcaaaagtaccaggatagcttacagtcgatcagcacaaagatggaggccatagaactgaagttgtcagagtcccctgagcccggaagatcccccgaatcacagatggctgagcaccaggcactgatggacgagatccttatgttacaggacgaaatcaacgagttgcagagctccctcgctgaagaactcgtgagtgagtcgtgcgaggccgaccccgctgagcagctcgccctgcagagcacgctgacagtactcgccgagagaatgagcacgataagaatgaaagccagcgggaagagacagttactggaagaaaaactcaatgatcaactggaggagcaaagacaggaacaagcactgcagaggtatcggtgtgaggcagacgagctggacagctggctcctgagcacaaaggcaaccctggacacagccttaagtccacctaaggagccgatggacatggaagcccagcttatggattgtcagaatatgctagtggagatcgagcagaaggtggtggccctgagtgaactctccgtccataatgagaacttactcctagaggggaaggctcataccaaagacgaggcggaacaattggcaggtaagctacgccgtctgaagggctctttattggagctccaaagggccttacacgacaagcagcttaatatgcaggggacagcccaggaaaaagaagaatctgacgtggatctgaccgctactcaatcacctggggttcaggagtggctggcccaggccagaacaacctggacccagcagcggcagagttcacttcagcagcagaaggagctggagcaggaactcgcggaacagaaatcactgctgagatcggtggcgagtaggggcgaagaaatcctaatacaacactccgcagcagagacctcaggtgatgcgggagaaaaacctgacgtactgagtcaagaactgggaatggagggcgagaaaagcagcgccgaagaccagatgagaatgaagtgggagagtctgcaccaggagttttccacaaaacagaagctgttacagaatgtcttagaacaggaacaagaacaggtgctttacagccggcctaacaggttgctcagtggtgttccactgtacaagggcgacgttccgacccaggacaaaagtgccgtgacatccctgctagatggtttgaaccaagctttcgaggaggtgagcagccagagcggtggggctaaaagacagtcgatccacctagagcaaaaactttatgatggagtgtccgcaaccagcacctggctcgacgacgtcgaggagagactcttcgtggcaaccgctctcttacctgaggagacggagacttgcctattcaatcaggaaatactggcgaaggacattaaagagatgtctgaggaaatggataaaaacaagaatcttttttctcaggccttcccagaaaacggcgataatagggatgtgatcgaggataccctgggctgccttctggggagactgagcctcctcgattctgtggtgaatcagcgttgccaccaaatgaaggaacgcctgcagcagatcctgaatttccaaaacgaccttaaagtgctttttacctcactggctgacaataaatatattatattgcagaagctcgctaacgtgttcgagcagcctgtcgctgaacagatcgaggccatccagcaagcggaagatggactaaaggagttcgacgccggaatcatcgaattgaagcggcgaggcgataagttgcaggtcgagcagccctctatgcaggaactgtctaagttacaggatatgtatgatgagctcatgatgataatcggcagtagaagaagcggtctgaaccagaatttgacactgaaatctcaatatgaacgcgctctccaggacctggctgatttgctggagactgggcaggaaaagatggcaggagaccaaaagatcattgtcagcagtaaagaagagatacagcagctcctcgataagcacaaggagtactttcagggcctcgaatctcacatgattcttactgaaaccctgttcaggaaaatcatttccttcgctgtccagaaagagacacaattccatacagaattgatggcacaggcttcggctgttttgaagagagctcataagcgcggagtcgaactcgagtatatactagagacttggagccatctcgatgaggaccaacaagaactttcccggcaacttgaagtggtggaatcttcgattccctctgtgggcctggtggaggaaaatgaagataggctcatcgaccggatcaccctgtaccaacacctcaagtcaagccttaacgagtatcaaccgaagctttatcaggtccttgatgacggaaagagactcttaatttccatctcctgcagcgacttagaatcgcagctgaaccagctcggcgaatgttggctgagtaacaccaataaaatgtctaaagaactgcacagattggaaacgatcttgaagcattggaccagatatcagagtgagagtgctgaccttatccattggctgcagtccgcaaaggacagactggaattctggactcagcaatccgtgaccgtgccccaggagcttgaaatggtgagagatcacttgaatgccttcctcgagttctcaaaggaagtggacgctcaatctagcctgaagtctagcgtcctcagcacgggtaatcagctactgaggttaaaaaaggtggacactgccacgctgcgaagcgaactgagtcgaatcgacagccaatggactgacttactaacaaatattcccgcagtgcaggaaaagcttcaccagctgcagatggataaactcccaagcagacacgccattagcgaggtgatgagttggatctcccttatggaaaatgtcattcagaaggacgaggacaacatcaaaaattccatcggttacaaagctattcacgagtaccttcagaagtacaaggggttcaagatcgatataaactgtaaacaactgactgtggacttcgttaaccaatcggtgcttcagatctcctcccaggacgtagagtcaaagagatctgataagaccgacttcgcagaacagttgggggcaatgaacaagtcatggcaaattttgcagggccttgtgaccgagaagattcaattactggaaggtctgctggagtcctggtctgaatacgagaataacgtgcagtgtctgaaaacttggttcgaaacacaggaaaagagattgaagcagcaacacaggataggggatcaagcaagcgtccaaaatgccctcaaagattgccaggatctagaggacttgatcaaagcaaaggagaaagaagtggagaaaatcgaacagaacggtctggcactgatacagaataagaaagaggatgtgtcgagcattgtgatgtcgacgctgcgggagctcggacagacatgggctaacctagaccatatggtcgggcagctcaagattttattaaaatctgttcttgatcagtggagctctcacaaagtagcattcgataagataaacagctacctcatggaagcccgatacagtctctcccgattcaggctcctgactgggtcacttgaagccgtacaggtgcaagtggataatctccagaatctccaggatgacctcgagaaacaggagcgctccctgcaaaaattcgggtccatcactaatcagttgctcaaggagtgccaccctcctgtcacagaaaccttgacaaacaccctgaaggaggttaatatgcgctggaacaacctcctcgaagaaatcgcagagcagctgcaatcttcgaaagctttgctccaactatggcagaggtataaagactattccaaacaatgcgccagtaccgttcaacagcaagaagaccgcactaatgagttgctgaaagccgcaacgaacaaggacattgccgacgatgaggtggcaacctggattcaagactgtaatgaccttctcaaaggattggggacagtcaaagattccctgttcttcctccacgaactgggagagcaactgaaacagcaggttgatgcatctgctgcctctgcaattcagtcagatcaactgtccctctctcagcatctgtgtgctctggagcaggccctgtgtaaacagcaaacatctcttcaggcgggagtcctggattacgagacctttgcaaaatctttagaggctctggaggcatggatcgtggaggcagaggagatcctgcagggacaggaccccagccacagttcagacctaagtactatacaggagcgcatggaggaattaaaaggccagatgttaaagttcagcagcatggctcctgatctggatcggctcaacgagctgggctacagactgccgcttaacgataaagagatcaagcgcatgcagaacttgaaccgccattggtcactaattagtagccaaacaaccgagagattcagcaagcttcagagtttcctgctacaacatcagacctttctcgagaagtgtgagacatggatggaatttttagtgcagaccgaacaaaagctggcagtggaaatcagcggcaactaccagcacttacttgagcaacagagagcacatgaattgttccaggctgagatgttctcgagacagcagattctgcacagcatcatcatcgatggccagagattattggagcaggggcaggtggacgatcgtgacgagtttaatctgaaactcactcttctgagcaaccagtggcagggagtgatacgacgggctcaacaacgcaggggcattattgattctcagattcggcaatggcagcgatatcgcgaaatggccgaaaaattaaggaagtggttagtggaagtatcctatctccctatgtctggcctgggttccgtccccatccctcttcaacaagccagaaccctgtttgatgaagtccagttcaaggaaaaagtttttctgagacaacaggggagctatattctgaccgtggaagctggtaagcagctcttgctgtcggccgatagtggagcggaagccgctttacaggccgaactggcagaaatacaggagaagtggaagtctgcatcaatgcggctggaggaacagaaaaagaagctggccttcctcttgaaagattgggagaaatgtgagaaggggattgcagatagcttggaaaaactgcggaccttcaaaaagaagttgtctcagtccttgcctgatcaccacgaagaattgcacgccgagcagatgaggtgcaaggaattagagaatgctgtgggcagttggactgatgatcttacgcaactttcacttctgaaggacactctgagtgcatatatcagcgcagatgatatctcaattctgaacgagagggtcgaactgctgcaaaggcagtgggaagagctgtgtcaccaattgtctttacgacgtcagcagataggagagagactcaatgagtgggcggtctttagcgagaaaaacaaggagctatgcgaatggcttacacagatggaaagcaaagtctcccaaaatggcgacatcttaatcgaggagatgattgaaaaactgaagaaagattaccaggaagaaatagccatcgcccaggagaataagatccagctgcagcagatgggcgaacggcttgcaaaggccagccatgagtcgaaagctagcgagatcgaatacaaacttggtaaggtcaatgaccgttggcagcacctgttggatctcattgctgccagagtgaagaagctcaaagagacactcgtggctgtccagcagttggacaaaaatatgagcagtttgcgtacttggctggcacacatcgagtcagagcttgcaaaaccgatcgtttacgacagctgtaatagcgaagaaatccaacgaaagctgaatgagcagcaggagctccagagagacatcgagaagcattcgacgggtgtggcctctgtgctcaatctttgtgaggtgctgctgcacgactgcgatgcgtgtgcaaccgacgctgaatgcgacagcatccagcaagccacgcgtaatttggaccggaggtggaggaacatttgcgccatgtctatggagcgcaggctgaagatcgaagagacttggaggttatggcagaagtttctggatgattacagcagatttgaagattggctgaagagctctgaacgcaccgccgcattcccaagctcaagcggggtgatctacacagtggctaaagaagaattgaagaagttcgaagcgtttcagcgccaggtgcatgagtgtctgacccagctagagctcatcaataagcagtacaggaggctggccagagagaatcgcacagactcagcttgttcactgaaacagatggtgcatgagggcaatcaaagatgggacaacctgcaaaagcgcgttactagcattctccgcagactgaagcacttcatcgggcagcgggaggagtttgaaaccgcacgggactcaattcttgtgtggctcactgagatggatttacagctgacaaacatcgagcactttagtgaatgcgacgtgcaggcaaaaataaaacagctgaaggcattccagcaagagatttcacttaaccacaacaagattgaacaaataatcgcccagggagaacagctcatagagaagtctgagccccttgacgccgctatcatcgaagaagagcttgatgagctgaggcgatattgccaagaggtcttcggacgcgttgagagataccacaaaaagctaattcggttaccactacccgatgacgagcacgacctgtccgatcgagagctggagttggaggactccgccgcactctccgaccttcattggcacgatcgatcagctgatagcctactcagcccacagccaagcagcaatctgtctctgtcactggctcagccactcagatccgagcggagtggtcgcgacactcccgcttcagttgattctattcctctggagtgggaccacgactacgacttatcacgggacctggaaagcgctatgagccgggcattgccctccgaggacgaggaaggtcaggatgataaggacttctatcttagaggcgctgtggggctgagcggggaccacagtgctctggaatcccagatccggcagctaggaaaagcactcgatgacagccggtttcagatccagcagaccgagaatatcattagatctaaaacccctactggacctgagctggacacatcatacaaaggatacatgaagctgcttggggagtgttcatcctctatcgattcggtgaagcggctggaacacaagctgaaggaggaggaggagtccctgcccggatttgtgaacctgcactcgactgagactcaaactgcaggggtcatcgataggtgggagcttctgcaggctcaggccctgtcaaaggaactgcgcatgaagcaaaacctccagaaatggcagcagtttaattccgacctgaatagtatctgggcttggcttggagacaccgaggaagagctggaacaactgcagaggctggagctcagtaccgacatccagacaattgagctgcaaattaagaagctcaaagaattgcagaaggccgttgatcatagaaaggcgataatcctatcaattaacctgtgctcacctgagtttacacaggctgattcgaaggaaagtagggatcttcaagacagactgagtcagatgaacggacgctgggatagagtgtgcagcctgctcgaagaatggaggggcctgcttcaggacgcgctgatgcagtgccagggattccacgagatgtctcacgggctgctgttgatgctcgagaatatcgataggcgtaagaacgagattgttcctatagacagtaacctcgacgccgaaattctgcaggatcaccacaaacagctgatgcaaatcaagcatgaactgcttgagtctcagttacgcgtagcatccctgcaagatatgagctgtcaactactggtgaacgctgaggggactgactgcctcgaagcaaaagaaaaggtccacgtgatcggaaacagactgaaacttctgctgaaggaggtgagccggcatatcaaagaactggagaaactcctcgatgtcagttccagtcagcaggatctctcttcctggtcatcagccgacgaactcgatacatccgggagcgtcagccccacatccgggcgaagcacccctaaccggcagaaaacaccacgaggcaagtgtagtttgtcacagcccggtcccagtgtttcttctccacattctcgcagcactaaggggggaagtgactcttctctaagtgaacctggtcccggacggagcggaagggggtttctgttcagagttttgcgagctgcacttcctctccagctgctcctattgttgttaatcggcttggcttgtttggtacccatgtctgaggaagattactcatgtgcattgagcaacaacttcgcgagatcttttcatccgatgctgaggtatacgaacggtcctcctcctctttag

SEQ ID NO: 257467 - DNA, 26393 bp, Artificial Sequence
  derived and/or modified sequence
atggccacgtcacgaggggcaagtagatgccctagagacattgccaatgtgatgcagcggttgcaagatgagcaggaaatagtccagaaacggactttcactaagtggataaattcacaccttgcgaaaagaaaacctcctatggtagtggatgacctgtttgaagacatgaaagacggggtgaagctgctagctctgctcgaggtactctccggacaaaaactgccttgtgagcaagggaggaggatgaagaggatccacgcagtggccaacattggcacagccctaaagttcctggaggggcgtaaaatcaaattggtcaatatcaacagtacagatatcgccgatggcaggcctagcatcgtgttgggactgatgtggacaatcatactttatttccagatcgaggagcttacttctaatttgccacagttgcaaagtttgtctagcagcgcttcctccgttgatagcatagtgtcgtccgagacaccaagccccccaagtaaacggaaggtgaccacgaagatccaggggaacgctaagaaagcgctcctgaaatgggtccagtacaccgcagggaaacagactggtatagaggtcaaagacttcgggaaaagctggcggtctggagtcgcttttcacagtgtgattcatgctatcagaccagaattggtcgatttggaaaccgtgaaagggaggtctaacagggagaatctggaagacgccttcactatcgcggaaactgaattagggatccctcgactgctcgaccctgaagatgtggacgtggacaagcccgacgagaaaagcattatgacatacgttgcccagttcttaaaacattacccagacatccataatgcctctaccgatggccaggaggatgatgagattcttcccggttttccatcctttgccaactctgtccaaaactttaagagagaggacagggtcattttcaaagagatgaaggtgtggattgaacaatttgaacgagacttgaccagagcccagatggtggaaagtaacctgcaggataaataccagagctttaaacacttcagggtgcagtacgaaatgaaaaggaagcagattgaacacctcatccagcctctccacagagacgggaaactgtcccttgaccaggcattggtcaagcagtcctgggatcgggtaaccagccgtctcttcgattggcacattcagctggataaaagtctgcctgccccactgggaacaataggcgcttggctctatagggctgaagtcgccctccgggaggagatcacggtccagcaggtgcatgaggaaaccgcaaacacaatacagcggaaactcgaacagcataaagacctgctccagaatacagacgcacacaagcgcgcatttcatgagatttataggaccagatccgtaaacggcattccggttcctccggatcagctcgaggacatggcagaacggtttcacttcgtttcgtccacgtccgaactgcatcttatgaagatggagtttctggagctgaaatacaggctgctgtcgttgcttgtgctggcagagagtaaactgaaaagttggattatcaagtatggccgacgagagtcagtggagcagctgctgcagaattacgtgtctttcatcgagaatagtaaattcttcgagcagtacgaagtgacttaccaaattctgaagcaaacagccgaaatgtatgtgaaagcggatggtagtgtcgaggaggccgagaacgtgatgaaattcatgaacgagaccactgctcagtggagaaatttgtccgtcgaggtgcgctcggtgcgctctatgctcgaggaggttatcagtaactgggatcgatacgggaacaccgtggcctctctgcaagcttggctggaagacgctgagaaaatgctcaatcagtctgaaaacgctaaaaaggactttttcaggaatctaccccactggatacaacagcacactgccatgaacgatgccggaaactttctgatagagacatgtgatgagatggtttcgcgcgatctaaaacaacagcttctgttactgaatggacggtggcgagagttgttcatggaagtgaagcagtacgcccaggctgatgagatggacagaatgaagaaggagtacacggactgcgtagtcactctcagcgccttcgccacagaagctcacaaaaagctgagtgaaccgctcgaagtaagctttatgaatgtgaagctgctgatccaggatttagaagatatcgaacagagggtgccagtgatggacgcccaatataagatcatcacaaaaacggcacacctcattactaaagagtctcctcaggaggagggtaaggaaatgtttgctactatgtccaaacttaaggagcagttgacaaaggttaaagaatgctactctcccttgttgtacgaatcccagcagctactgatacctctggaggagctggaaaagcagatgacatcattttacgattccctgggcaagatcaatgaaatcatcacagtactagagcgagaggctcagtcatctgcactgttcaagcagaagcaccaggagcttcttgcttgccaggaaaattgcaagaaaacactcactctgatcgagaagggaagccagtccgttcaaaagtttgttactctaagtaacgtgctcaagcatttcgatcaaacgagacttcaaagacagatcgcagacattcatgtcgcctttcagagtatggtgaaaaaaacgggtgactggaagaaacacgtggaaacaaactcaagactgatgaagaagttcgaagagagccgagcagaactggagaaggtgttgcgaatcgctcaagaaggacttgaggaaaagggtgatcccgaggagctgctgagacgccatactgaattcttctcccagctagaccagcgggtgctgaacgcctttcttaaagcttgtgatgagttgacagatatcttgcccgagcaggaacagcagggtctccaggaggcagtgcgaaaactgcacaaacagtggaaggatctgcaaggagaggctccataccatctgctccatctgaagattgacgtggaaaaaaatagattccttgcatctgtggaggagtgccgcaccgaactggatcgggagaccaagctaatgccgcaagaagggtctgagaagatcatcaaggagcatcgggtgtttttctctgacaagggccctcaccacctgtgcgaaaaaagactccagctgattgaggagctctgcgtcaaactcccggtgagggatcccgtccgagataccccaggcacttgtcacgtgacgctcaaggagttaagagctgccattgatagcacttataggaagctgatggaggatcctgacaagtggaaggattataccagtcgcttctctgagttttcttcctggattagtacaaatgagacgcagctgaagggtattaagggagaggctattgacaccgcaaaccatggagaggttaaacgtgctgtagaagagattcggaatggggtgaccaagcggggtgaaacattatcttggctgaagtcgaggctgaaggtacttacagaagtaagctctgagaacgaagcacaaaaacagggagacgaactggcaaagctgagtagctcttttaaggctctggtaacactcctgagtgaggtggagaaaatgttatctaactttggggactgcgtgcaatataaggaaatcgtcaagaactcgctcgaggagttgatatctggaagtaaggaggtgcaagaacaggccgagaagatcctcgatactgagaacctgttcgaagcccagcagctgcttctgcaccatcagcaaaaaaccaagcgaatatcagccaaaaaacgcgatgttcaacagcagatcgcacaggcccaacagggcgaggggggactgccggaccgcggacacgaagaactgagaaaactggaatctacactggacgggttagagcggagccgcgaacggcaggaacgacgtattcaggtaaccctgagaaagtgggaacgatttgagacaaacaaagaaaccgtggtcaggtatttgttccagactggctcgagtcacgagcgatttctgtcatttagctccttagagtcactgagtagtgagctcgagcagaccaaagaattttctaagcggacagagagtatagccgttcaggcagaaaaccttgtgaaggaagcctctgaaattcctttggggccacagaacaaacagctgcttcagcagcaggcaaagtcaatcaaagagcaggtaaagaaactcgaggacaccttagaggaggacattaagactatggaaatggtcaagaccaaatgggaccactttggttcaaatttcgagaccctgagtgtctggattaccgagaaagagaaggaactcaacgcactcgagactagctccagtgctatggacatgcagataagccagataaaggtgactatccaggagattgagagcaaactctcttcaattgtcggacttgaggaggaagctcagtccttcgcccaatttgttacaacgggagagtcagccagaattaaggcgaagctgacccagatcaggcggtacggggaagaattaagggaacacgcccaatgtctcgaagggaccatactcggccacctttcacagcaacaaaaatttgaagaaaacctgagaaagatccagcagagcgtttctgagttcgaagacaagctggccgtacctataaagatctgttctagcgctacagagacatataaggtactacaggagcatatggacttgtgccaggccctggagagtctctcctcagcgattacggcattcagcgcgtccgccaggaaggtggtgaaccgggacagctgcgtacaggaagcagctgcactgcagcaacagtatgaggatattctcagaagggctaaggagaggcagactgctttggaaaaccttctggcacattggcagcgcctcgaaaaggagctgtcaagctttcttacttggcttgagcgtggggaagcgaaggcgtcaagccccgaaatggacatctctgcagatcgcgtgaaggtggaaggtgagctacagctgatccaggccctccaaaacgaagtggtgagccaagccagcttctatagtaagctcctgcagctcaaagagtccctgttcagcgtggcgtccaaggacgacgtaaagatgatgaaactgcatctcgaacagctggacgaacgctggagagatctgccccagattattaacaagaggattaacttcctgcaatcagtggtcgctgaacaccaacaatttgacgagctacttctctccttttcagtgtggatcaagctgtttttgtcagagttgcagactacttccgagatcagcatcatggaccaccaggtcgctctaaccagacacaaggatcatgcagccgaggtcgagtctaagaagggcgagctccaatccctgcagggccacctggccaagctcggatctctcgggcgagcagaggacctgcacctcctgcagggcaaagcagaagactgctttcaattattcgaagaggcctcacaggttgtcgagaggcgccagttggccctgtcccatctggctgagtttcttcagtcccatgcaagcttgagtgggatcctgagacagctaaggcagacagtagaggcaacaaattccatgaacaagaacgagagcgaccttatcgagaaggatctaaacgacgccctgcaaaatgccaaagcccttgagtcggcagccgtgagtctcgacggcatcctctccaaggcgcaatatcaccttaaaatcggttcatccgagcagcgaacctcctgtcgcgcaactgccgaccagctatgcggggaagtcgagcgtatacagaatctcctgggaaccaagcaaagcgaggccgacgcactggccgttctgaagaaagccttccaagaccagaaagaggagctcctgaaatcaatcgaggacatagaagaacggaccgataaggaaaggctgaaggaacccacaaggcaagccttgcagcaaagactgcgagtgttcaatcagctggaagatgaactcaacagccatgagcacgagctatgctggctgaaagataaggctaagcagattgcccagaaagatgtagccttcgccccagaggtagacagggagattaacagactggaggtaacctgggacgatacgaagagactgatccacgaaaaccagggccaatgttgtggactgattgacttgatgagagagtatcaaaacctcaagagcgccgtatcaaaggtcctagaaaacgcttcaagcgtaatcgtcactcgcacgacaatcaaggaccaggaggatctcaagtgggcctttagcaagcacgaaacagcgaagaataagatgaattacaagcagaaagacctcgataactttacctccaaaggcaagcacttactgagcgagctgaagaaaatacacagcagtgatttctcactggtgaagacggatatggagtcaactgtggataagtggctcgacgtgtctgaaaagcttgaagagaatatggatcgtctgcgggtctcactgtctatttgggatgatgtgttatcaacccgggatgaaatcgagggttggtcaaataattgtgttcctcaaatggcagagaatatctcaaacctcgataaccatctgcgggcagaggagttgctcaaggaattcgaatccgaggtgaagaacaaggctctgcggctcgaagagttacacagcaaggtgaacgacctcaaggagttgaccaaaaacctcgagacaccccctgacctgcagttcattgaggctgacttgatgcaaaaacttgaacacgctaaggagatcacggaagtagccaaaggcactttgaaggattttaccgcccagagtacgcaggtggaaaaattcatcaatgatattaccacctggtttacaaaggtggaggagtcactgatgaactgcgctcagaatgagacatgtgaggcactgaagaaagtaaaggacatccaaaaagaattgcaatcacagcagagcaacattagcagcacacaggagaacctaaatagcctgtgcagaaaataccactccgctgagctggaatctctgggaagagccatgaccgggctgattaaaaagcacgaagctgtgtcccagctgtgtagcaagacccaggcatccctacaggaaagtctggagaagcatttctcggaatctatgcaggagtttcaggagtggttccttggggctaaagccgctgccaaagagagtagtgatcgaacaggcgacagtaaggtgttggaggcgaaattgcacgacttacagaatatcttggattccgtgtctgacggtcagtccaaactcgatgcagtcacccaggaggggcagaccctgtacgcccacttgtccaaacagatagtcagtagcattcaggaacagatcacgaaagctaacgaggagtttcaggcattcctgaagcagtgtctcaaggacaagcaggccctccaagactgcgcttccgaattgggctctttcgaggaccagcaccgcaaactcaacttgtggattcacgagatggaggagcgcttcaacacagaaaacctgggcgagtctaaacaacacattccggagaaaaagaatgaagtgcataaggtagaaatgttcctgggagagctcctggccgctcgcgagtccctggacaaactttcccagaggggccagctgttatccgaggagggccacggcgctggacaggaagggcgtctgtgttcacagttactcaccagccaccaaaacctgctgcggatgactaaagaaaagctgcggagctgccaggtggcattgcaagaacatgaagcacttgaggaggccttacagagcatgtggttctgggtgaaagctattcaggatagacttgcctgcgccgagtccaccttggggtctaaggacacattagagaagcgcctttcacagatccaggatatcctcttaatgaagggcgagggtgaagtcaaattgaacatggctattgggaagggggaacaggccctacggtcctcgaataaagaaggacagcgggtgatccagacccagctcgagacactcaaagaagtttgggccgacatcatgtcgagtagcgtgcacgcacagtcaaccctggagagtgtgatctcacagtggaatgattacgtcgagcggaagaaccagttggaacagtggatggagagcgtagaccagaagattgagcacccactgcaaccacaacccggactcaaggagaagttcgtgcttcttgatcacctgcagtctatcctgtctgaagcggaggaccatacacgagccctgcatcgcctgatcgcgaagagccgagagctgtatgagaagacagaggacgaaagcttcaaagataccgcccaagaagaactcaaaacacagtttaacgatattatgacagtggctaaggagaaaatgcggaaggtcgaggagatcgtcaaggatcacctcatgtatctggatgccgttcacgagtttacggactggctgcactctgcaaaggaggaactgcaccgctggagtgacatgagcggggattcctcggccacacaaaaaaaattgtccaagataaaggaactgattgactcccgcgaaattggagcctcaaggttatctagagtcgagagcctggcacccgaagtgaaacagaatacaactgcatctgggtgtgagctgatgcatacagagatgcaggctttacgcgctgactggaaacagtgggaggattccgtattccagacacagtcttgcctcgagaacttagtgtctcagatggccctaagcgaacaggaattctccgggcaggttgcccagctggaacaggctctggagcagttctcagcgctcttgaagacctgggcacagcagttaacacttctagaaggtaagaacacagacgaagaaatagtagaatgctggcacaagggtcaggaaatcctggacgcactgcagaaagccgaaccaaggactgaggatctgaaatctcagctgaatgaactgtgtcgcttctctagagacctcagcacatattcaggaaaagtcagcgggctcatcaaagagtacaattgcctttgcctccaggcttccaaaggatgccagaacaaggagcagatcctccagcagcgattcaggaaggcttttagagattttcagcaatggctggtaaacgcaaagatcacaacagctaaatgcttcgacatcccccagaacatctccgaggtctccacaagcctgcagaaaattcaggaattcttgtccgagagcgagaatggacagcataaactgaatatgatgctttcgaaaggggagctgctgtccacacttttgactaaggagaaggcaaaagggattcaggctaaggtcactgccgcaaaggaagattggaagaattttcactccaatctgcaccagaaggagtcagcattagagaatcttaaaattcagatgaaggatttcgaggtctctgcggaaccgatccaggactggttgagcaagacagaaaagatggtgcatgaaagtagcaaccgactgtatgacttaccagcaaagaggagagaacagcagaaattgcagagcgttctggaggaaatccattgctatgaacctcagttaaatcggttgaaggagaaagcccagcagctatgggaagggcaagccgcttccaaatcatttaggcaccgggtaagtcaattgtctagccaatatttggcattatccaacctcacaaaagaaaaggtgagtaggctcgataggatcgttgcggagcataatcagttcagtctgggaatcaaggagctgcaggattggatgactgatgccatccacatgctggacagctactgccatcctacgagtgacaaatcagtgctcgattccaggactttaaaactggaggccctgctgagtgttaaacaggaaaaagagatccaaatgaagatgatcgtcacacgcggagaatccgtcctgcaaaatacctctccagagggcattccaactattcagcaacagctccaatcagtaaaagatatgtgggccagcttacttagcgccggaattaggtgtaagagccagctcgagggggcactttctaagtggaccagctatcaggacggcgtgcggcaattttcaggctggatggactcaatggaagcgaacctaaacgaaagcgaaaggcagcacgccgagctgcgagataagacaaccatgctcgggaaggctaagcttctcaatgaagaggtgcttagctattcaagtctcttagagactatcgaggtcaagggggctggcatgacagagcattacgtcactcagcttgagctgcaggacctacaggagagataccgcgctatccaggaaagagcaaaggaggccgttacaaaatccgaaaagctggtgaggttgcaccaagagtatcagcgcgacctcaaagcctttgaagtgtggttgggtcaagagcaagagaaactagaccagtacagcgtactcgaaggtgacgcccatacacatgagacgactctgcgagatctccaggaactgcaggtgcactgcgcagagggccaagccctccttaactcagtgttgcatactcgggaagatgtgatcccaagtgggattccacaagccgaggacagggctttggaatcactgcgccaggactggcaggcctatcagcataggctcagcgagacacgcacccagttcaataatgttgtcaacaagcttcgactgatggagcaaaagtttcagcaggtggatgagtggcttaagacagcggaggaaaaagtaagtccacgcacccgacgacagtcaaatagggctacaaaagagatccagctgcaccaaatgaagaagtggcacgaggaagtcacagcctatagagacgaggtggaagaggtgggcgcacgcgctcaggagatccttgatgaatcccacgtgaacagcagaatggggtgccaggccacacaactgacctcccggtatcaggcactacttctgcaggttctggaacagattaagttcctagaggaagagatccaaagtctggaagagtccgaatcctcactctccagctatagcgattggtatggttccacccataagaatttcaagaacgtcgctacaaagatcgataaggtcgacacagtgatgatgggaaagaaactgaagactctagaggtgctgctgaaagacatggaaaaggggcactcactgcttaagtccgcaagggagaaaggggagagggcagtcaaatacctagaggagggggaagccgagcggctgcgaaaagagatccatgatcacatggagcagctgaaggaactgacatccaccgtgagaaaagagcacatgaccctcgaaaagggcctgcacctcgctaaggagttcagcgacaaatgtaaggctttaacgcagtggattgcagagtaccaggagattctacacgtgcccgaggagcctaagatggaactatatgagaaaaaagcccagttatccaagtacaaatcgcttcagcaaaccgtcttgtcacacgaaccatctgtgaaaagcgtgagagaaaaaggggaggccctgctggaactcgtgcaggatgtcactctcaaagacaaaatcgaccaattgcagtccgattaccaggacctgtgctcgatcgggaaagagcatgttttctccctggaggccaaggtaaaagatcatgaggattataacagcgaactccaggaggtagagaagtggctcctgcagatgtccggtaggctagtggctcctgacctgctggagacatccagtctggagaccataacacaacagctggctcatcataaagcgatgatggaggaaattgctggctttgaagaccgacttaataatctgcagatgaaaggcgataccttaattgggcagtgcgcagaccacctgcaggcgaagttaaagcagaatgttcacgcccatctacagggaaccaaagatagctactcagctatctgcagcacagcccagcgcatgtatcagtctttggagcacgagctgcagaaacacgtatctcgccaggacactttgcaacagtgccaggcctggctctcagccgtgcagccagaccttgaacccagcccccagccccctctgagccgcgcagaggccatcaagcaggtcaagcactttagggccctccaagagcaagcccgaacttaccttgacctcctttgcagcatgtgcgaccttagcaatgcgagcgtgaaaactaccgccaaggacattcagcagacggaacagaccatcgaacagaagttggtccaagcgcagaatctgactcagggatgggaagagataaaacatttgaaatcagagctgtggatttaccttcaggacgcagaccaacaactacagaatatgaaacggaggcattccgaactggaacttaacatagctcagaacatggtctcgcaggtgaaggacttcgtcaagaaactccagtctaaacaggcatctgttaataccattatcgaaaaggtgaataaactcacaaagaaagaggagtcaccagaacacaaggagatcaaccaccttaacgaccagtggctggacctctgtcgccagtccaacaatctgtgtttgcagcgcgaagaagatctccagaggactcgcgactaccacgattgcatgaatgtggtggaagttttcctggagaagttcactaccgaatgggacaatttagctcggtccgatgccgaaagtaccgcagtgcacctcgaagctctgaagaagctcgccctggctctccaggagaggaagtatgccattgaggacctgaaggaccagaagcagaaaatgatcgagcacctcaacctagatgataaagagctcgttaaagagcagacatctcacctggagcagcgctggttccagctggaggaccttatcaagaggaaaatccaggtgtccgttactaacttagaggaattgaatgtggttcaatccagattccaagaattgatggaatgggctgaggagcagcagcctaatattgctgaagctttaaagcaaagtccaccaccagacatggcccagaacctgctaatggaccatttggctatttgctcggaattggaagccaagcagatgctgctgaagtcccttataaaggacgcagaccgagttatggctgacctcgggctcaacgaacggcaggtgatacagaaagccttgtccgatgcacagtctcatgtcaattgtttatccgacctggttggccagcgaaggaaatatctcaataaggcactgtctgaaaagacgcagttcctaatggcggtctttcaggccacctcacagatccagcagcacgaacggaaaatcatgttccgggagcatatttgcctgttaccagacgacgtgtctaagcaggtaaaaacgtgtaaatccgcacaggcgagccttaagacctaccagaacgaggtgactggtctatgggcgcagggtcgggagctgatgaaggaagtgaccgagcaagaaaagtcagaggttctgggaaagctgcaggagctgcaaagcgtgtacgacagcgttcttcaaaagtgttcgcaccggttacaagagctcgaaaagaacctcgtctctcgaaaacactttaaggaggatttcgacaaagcgtgccattggcttaagcaagccgatatcgtgacattccccgaaatcaacctgatgaatgagagtagtgagctccacacacagctggccaagtaccagaatattcttgagcagtctccagagtacgaaaatctgctgctcacccttcagagaactggccaaaccatcctcccttctttgaacgaagttgatcactcatatttgagcgagaaactaaacgcactgcccagacagttcaacgtgattgtggcacttgcaaaggacaagttttacaaagttcaagaagcaattttagccagaaaggagtacgcctcacttatcgaacttacaacacagagcctcagcgagctggaggcacagttcctgagaatgagtaaggttccgaccgatttggcagtcgaggaagcactgagcctacaagacggttgtcgggctatactggacgaagtggccggtctgggcgaggcagtggatgagctaaaccagaagaaagaaggctttcggtccactggccagccttggcagcctgataagatgttacatctcgtgactctttaccacaggcttaaaaggcagacagagcagcgcgtgagtttgctggaggatacaacctccgcttatcaagaacatgagaagatgtgtcagcagctggaacgccagctgaagtccgtcaaagaggagcagtccaaagtcaatgaggaaactctgcctgctgaggagaagcttaagatgtatcatagccttgcaggcagtttgcaggacagcggaattgttttgaagcgcgtaactattcatttggaggatcttgcaccacatttggacccgctcgcttatgaaaaagccagacatcaaatacagagctggcagggtgagctgaaactgctgactagcgcgatcggcgagactgttaccgagtgcgagtcacggatggttcagtcaattgacttccagactgagatgagcaggtctctggactggctgcgaagggtgaaagctgaattgtcgggtcctgtctacctggatctcaatctccaggatatccaggaggaaattcgcaagattcagatccatcaggaagaggtgcaatcttccttacgcattatgaatgcactatcgcacaaagaaaaggaaaagtttaccaaagccaaggaactgatatcagcagatctggaacactccttggcggaactgagtgagctggacggagatattcaggaggccctgaggaccagacaagctacactgaccgagatctactcccagtgccaacggtattaccaggttttccaggctgccaatgactggctcgaggatgcccaggaattgctccagctcgcaggaaatggcctggatgtcgaatccgccgaagaaaaccttaagagtcacatggagtttttttccaccgaagatcagtttcatagtaacttggaggagcttcacagtttggttgctaccctggaccctcttataaagccaactggcaaggaggacttagagcagaaagtagccagcctggagctaagatctcagaggatgtcccgcgactctggtgctcaggtggatctgcttcaacggtgtacggctcagtggcacgattaccagaaggcccgagaagaggtgatcgagctaatgaatgacacggaaaaaaaattatccgaattcagtctccttaaaaccagctccagccatgaggcagaggaaaagttatcagaacataaggctctggtttcggtcgtgaatagcttccatgaaaagattgtggcgttggaagagaaagcctcgcagctggagaagaccggaaacgatgcatccaaagccacacttagccggagcatgaccactgtttggcagagatggacccgcctccgagccgtggcacaggaccaggagaaaatccttgaagatgccgtggatgaatggactggcttcaacaacaaagtgaagaaggccactgagatgatcgatcaactgcaggataagctgcctggaagctccgcagagaaggcctctaaagctgagctcttaacgctgttggaatatcatgacacgtttgtgcttgagctggagcagcaacaatcagccctagggatgttaagacagcagacattgtctatgctgcaggatggggctgctcccactcccggtgaagagcctcccctgatgcaagaaatcaccgccatgcaggatagatgtcttaatatgcaggagaaggtgaaaactaacggcaagcttgttaagcaggagctgaaggacagagagatggtggagacccagattaattctgtgaagtgctgggtccaggagacaaaagaatatttaggaaatccgactatcgagatcgacgcacagcttgaggaacttcagattctgctaacagaagctaccaatcacaggcaaaatatcgagaaaatggccgaggaacagaaagaaaagtatctgggtctgtacacaattctgcccagcgagctatccctgcagctggctgaggttgccctggatctgaagattcgggatcaaatccaggacaagataaaagaggtcgaacaatctaaagcaacttcccaggaactgagtaggcagatacaaaagttggcaaaggacctcactacgattttgacgaagctcaaagccaagactgataacgtggtacaggcgaaaaccgatcagaaggtgctgggcgaagagcttgatggctgtaactcaaagttgatggaactcgatgcagccgtgcagaagtttttagagcagaatgggcaactgggtaaaccccttgcgaaaaaaattggaaaactcacagagcttcaccagcagacaattcgtcaagccgaaaatcggttgtctaaacttaatcaggccgctagtcacctcgaggaatataatgagatgcttgagctaattctcaagtggattgagaaagctaaagtgctggcgcacggaaccatcgcttggaactccgctagccagcttcgcgagcagtacattctccaccaaactctgctggaggagtcaaaggagattgactccgaactcgaagctatgacagaaaaattacagtacttgacgtcagtgtactgtactgaaaagatgtcacagcaggtagccgagctaggccgagagaccgaggagctgaggcagatgatcaaaattcgcttgcagaatcttcaagatgcagcgaaggatatgaagaaatttgaggccgaactgaagaagctgcaggccgctctagaacaggcccaggccactctgacatcaccagaagtgggcagactttcgttgaaggagcaactgtcccatcgccagcatctgcttagtgagatggagtctctgaaaccaaaagtccaagcggtgcagctgtgccagagcgcattgagaatcccggaggacgtggtggcttcactcccactctgccatgccgcattgcgattgcaagaggaggctagtcggctgcagcacaccgcaatacagcagtgtaacatcatgcaagaggcagtcgtgcaatatgaacaatatgagcaggaaatgaagcatctccagcagctcatagagggcgcacaccgggaaattgaggataagcctgtagccactagcaacatccaggaactgcaagctcagatttcaaggcacgaggagttagcccagaagattaaggggtaccaggaacaaatagcctccctgaactcaaagtgcaaaatgctgacgatgaaggccaaacacgcaacaatgctgttaaccgttaccgaggttgaaggtctggcagagggaaccgaggacttagatggagagctgctcccgacccccagtgcacacccctcagtcgttatgatgactgccggtcggtgccacaccctcctcagtccagtgactgaggagagtggagaagagggtacaaattccgagataagcagccctccggcttgtaggtcacccagcccggtggcaaatacggatgcctccgtgaatcaggacattgcatattaccaggctctgagcgccgagcgcctccagacggatgctgcaaagattcacccctccacctccgcaagccaagaattctatgagcccggattggagccaagtgcaacagccaaacttggcgacctgcaaagatcctgggaaacactcaagaatgtgatatccgaaaagcaaagaaccctgtatgaggctcttgagcgtcagcagaagtaccaagatagcttgcagagcatctcaactaaaatggaggccatagagctgaagttaagtgagagccccgaacctggaaggtccccggagagtcaaatggcagagcaccaggcactgatggacgagatcctcatgctgcaggacgaaatcaatgagctccagtcctctcttgcagaggagctcgtttctgaaagctgtgaggctgatcccgctgaacagctggctctgcagtctaccctgaccgtactggctgagcgaatgtcaactatcaggatgaaggccagcgggaagcggcagctgctggaggagaagcttaatgatcagctcgaagaacagagacaagagcaggctctacagcggtaccgatgtgaagcagacgagcttgactcctggctgctctcaaccaaagctaccttggacactgccttgagccctcctaaggaacccatggacatggaagcccagctgatggactgccagaatatgctggtggagattgagcaaaaagttgtagctctgagcgagctttctgtacacaatgagaaccttctcctggagggtaaagctcacacaaaagacgaggctgagcagctggctggcaaactgcggagactgaaggggtcattgctggagcttcaacgcgctttgcacgataaacaattgaacatgcaggggactgctcaggagaaggaagagtctgatgtcgatctgacggccactcaatcacccggtgtacaagagtggctggctcaggcccgaacgacttggactcagcagcgacagtcctccctgcagcagcagaaagagctggaacaggagctggctgaacagaagtcgctcctcaggtcagtggcttcacgaggcgaggaaatacttattcagcactcagccgctgagacatcgggggacgccggagaaaagccagacgtgctttcccaggagctcgggatggagggggagaagagcagcgcagaggatcaaatgagaatgaaatgggagtcccttcaccaggagtttagcacaaaacagaaattattacagaatgtgctggagcaagagcaggagcaggtactgtattcaaggcccaataggctcctttctggcgttcccctgtacaagggggatgtcccgactcaggataaaagtgccgtgacttctttgctcgacggcctgaaccaggccttcgaagaagtctcctcacagtcagggggagctaaacggcagtctattcatttagaacaaaagttgtatgacggggtgtcagcaacttctacttggttggatgatgttgaggaacgcttattcgtggccactgctttgttgcccgaggagaccgagacatgtctgttcaatcaggagattttggctaaagacatcaaagagatgtcagaggagatggataaaaacaaaaacctgttctcccaggctttccctgagaatggagataacagggatgtgattgaggacacacttggctgtttattaggtcgcctcagccttctagactctgtcgtgaaccagcgttgccatcagatgaaagagaggcttcagcagatcctgaactttcagaacgatctcaaagtgttgttcacctcactggctgataacaagtacattatcctgcagaagctggcgaatgtctttgaacagcccgtcgccgagcagattgaggccatccaacaggctgaagacggcttgaaggaattcgacgctggtatcatcgagctgaaaaggaggggggataagctgcaagtggagcagccttctatgcaggagctctcaaaactccaagatatgtacgacgagctgatgatgataattggcagtcggagaagtggattgaatcagaacctcactttgaagagccaatatgaaagggctctgcaggatctggccgacctgctagagaccggccaggaaaagatggcaggagaccagaagatcatcgtcagctccaaggaggagattcagcagttgctggataaacacaaggaatacttccaaggactggagagccatatgatactgacagagacgttattccggaaaattataagctttgccgtgcagaaagagacccagttccataccgagctgatggcacaggcctccgccgtgctgaagagggcgcacaagaggggtgtggagctggagtacattctcgaaacttggtctcatctggacgaagaccagcaggagctgtctaggcagctggaggttgtggaaagtagtatcccctctgtgggcctggtcgaagagaatgaggatcggctaatcgatagaattacactgtaccagcatcttaagagcagtcttaacgaataccagcccaaactctatcaggttctggatgatggaaagagactgctcatttcaatttcctgttccgatttggagtcgcagctcaaccagttgggcgagtgttggctgtccaacaccaacaaaatgtccaaagagttgcacagactggaaaccattctcaaacactggaccagatatcagtctgagagtgccgatcttattcactggttgcagtccgcaaaagacagactggagttttggacacagcaaagcgttaccgtccctcaggaacttgaaatggtgcgggaccatttgaacgcctttctcgaatttagtaaggaagtggacgcacagtccagtttaaagagctccgtcctttctacaggtaaccagcttctcaggctgaaaaaggtggacactgctactctgcgctctgagttgagccggatcgattcccagtggaccgatcttctgaccaatattcccgctgttcaggaaaaactacaccagctgcagatggacaagctaccaagccggcatgcaattagcgaggtgatgagttggatttctctgatggagaatgtgatccaaaaggatgaggataacatcaaaaactctataggatacaaagccattcacgaatacctccagaagtacaagggcttcaagatcgatatcaactgcaagcaactaaccgtcgatttcgtaaatcagtcagtgctgcaaatttctagtcaggatgtggagtccaagcgatcagacaagaccgattttgctgagcagctaggagctatgaacaaaagttggcagattcttcagggtctcgttaccgaaaagatccagctgctcgagggactgctggaaagctggagtgagtacgagaacaatgtccagtgtcttaagacatggttcgaaacccaggagaagcggctgaagcagcaacacagaatcggcgaccaagcctccgtgcagaatgctttaaaggactgccaggatctggaagacctgatcaaggccaaggaaaaagaagtggaaaagattgagcaaaatggactggcactgattcagaacaagaaagaggacgtatcctccattgtcatgagtacactgagggagttgggccaaacttgggcgaatcttgatcacatggtgggccagttaaagattttgttgaaatcagtccttgatcaatggtcctctcataaagtcgcatttgacaaaattaactcatacctgatggaggcaagatattcacttagtagatttaggcttttgacaggatccttggaagcagtgcaggttcaggtggataatctccagaacctgcaggacgaccttgagaaacaagaaaggagccttcagaaattcggttcaatcacaaaccagctcctgaaagaatgccaccctcccgttactgagaccttaaccaatacactgaaagaggtgaacatgcgttggaacaatctcctggaggaaattgccgagcagctacaatcatccaaggctcttctccagctatggcagcggtacaaggactactctaaacaatgtgcatccacagtccagcagcaggaggatcgcacgaacgaactattgaaggcagctactaacaaggatatcgccgacgacgaagtggccacatggattcaggactgcaatgatttactcaagggcttagggaccgtgaaggactcgctgttctttctgcacgagctaggcgagcaactcaaacagcaggtcgatgcatctgctgcgtctgcaattcaatccgaccagctttccttatcacaacacttgtgtgctctggagcaagctctatgtaagcaacagacctcccttcaagccggagtgctggactatgagactttcgctaagtctctcgaagctctggaggcatggatcgttgaggcagaagagattttacagggccaggacccaagccactctagcgatttgtccaccattcaggaacggatggaggaattaaagggacagatgctcaaattctcttctatggcccctgacctagacagattgaatgagttaggctaccgtctccctttgaatgataaagaaattaaacggatgcagaacctgaaccgacactggtccctgatctctagccagactaccgaaagattcagtaaattgcagtcatttctcctccagcatcagacattccttgagaagtgcgaaacttggatggaattccttgtgcagaccgagcaaaagctggccgtcgaaattagtggtaactatcagcatttactggaacaacagagagctcacgaactgtttcaggcagaaatgttctcccgtcagcagattctccactcaattattattgacggacaaagactactcgaacagggccaagtggatgatagggacgagttcaacctgaaactgaccctactgagcaatcaatggcagggcgttattagacgggctcagcagcgcagaggcattattgattcacagatcagacagtggcagcggtaccgggaaatggctgaaaaattgcgcaagtggctggtggaggtcagttatctgcctatgagcgggctgggttctgttcctatcccactgcagcaggctagaactctgtttgatgaagttcaatttaaggagaaagtgtttctgcgacagcaggggagttacattctgacggtcgaggccggtaaacaactcttacttagcgcggatagtggagcggaggccgcactccaggcggaactagcggaaatccaggagaaatggaaatctgcatcaatgcgccttgaggaacagaagaagaagctcgctttcctgctgaaagattgggaaaagtgcgagaaagggattgcggatagccttgaaaaactacggacctttaagaaaaaattgtcacagtctttgcctgatcaccacgaggagctgcacgccgagcaaatgcggtgcaaagagctggagaacgctgtcggctcttggaccgacgacctcacacaactgtcgctgctgaaggacacactttccgcctacattagcgctgatgacatctccattctcaacgaacgcgtggaactgttgcagcgccagtgggaggaactgtgccatcaactctccctgcggcgacagcagataggagagcggttgaacgaatgggcggttttttcagaaaagaacaaagaattgtgtgaatggcttactcagatggagagcaaggttagccagaacggggatatcttgatcgaggagatgattgagaaattaaagaaggattatcaggaggaaatcgccattgcacaggagaacaaaattcagctgcaacagatgggcgagagactcgcaaaggcatctcacgaaagcaaggcctctgaaattgaatataagcttggcaaggtcaatgatcgctggcagcatctcctggaccttatagcagcacgggtgaaaaagctgaaggagacactggtggctgttcaacaactggacaagaatatgtcaagtttgcggacatggctcgcccacatcgagtccgaactggcgaaacccatcgtctacgacagctgtaatagtgaggagatacagcggaagttaaatgagcagcaggagctgcagagagatatcgagaagcatagcactggggtagcctctgttctgaacctgtgtgaagttttacttcacgactgcgatgcatgtgctactgatgcagaatgtgattcaattcagcaggctactagaaatctggacagaaggtggcgaaatatttgtgcgatgagtatggaacgcagacttaaaatcgaggaaacttggcgcttgtggcagaaatttttggatgattattccaggttcgaggactggttgaagtcaagcgagcggaccgccgctttccccagcagctcgggagttatatatacagtggccaaggaagaattgaagaaatttgaagccttccagcgtcaggtccatgaatgtttgacacagttggagctgattaacaaacagtacagacgtctcgctagggaaaaccgcactgatagcgcttgttccctcaaacagatggtgcacgagggcaaccagcgctgggacaacctccagaagagagtaacgtccattcttcggagactcaaacacttcattggtcaacgcgaggagttcgagacagccagggactctattttggtctggctcactgaaatggatctgcagctgactaatattgagcatttctctgagtgtgatgttcaggcaaaaatcaagcagctgaaggcattccaacaggagatctccctgaaccacaacaagatcgagcagatcatcgcccagggtgagcagctgatcgagaaatcggagccattggatgctgcaatcatcgaggaagagctggatgagctccggcgatactgccaagaggtcttcgggagggtggaacgatatcataaaaaattgataaggctccctctccccgatgatgaacacgacttgtccgacagagagcttgagttagaggatagcgccgcactgtccgatctgcattggcacgacaggagtgcagactcccttttgagtccccaacctagtagcaacttgtctcttagcctggcccagccgctgcggtctgaacgatcggggagagacactccagcctccgttgactcaatcccacttgaatgggaccacgactacgatttatctagggatttagaatctgcaatgtccagagcactgcctagcgaagatgaagagggccaggacgataaggatttttatctgcggggagccgtaggcctgagtggtgaccactccgcactggaatcccagattcgccagctcgggaaggctttggacgattctcgctttcagatccagcagactgagaacatcatacgatcgaaaaccccgactggacctgagttggacaccagctataaaggctacatgaagttactgggcgagtgtagctcttcaatagacagcgtgaagcggttggagcacaaactgaaagaagaggaagaatctcttccgggtttcgtgaacttacattccaccgagacacagaccgcaggagttatcgataggtgggaactgcttcaggctcaggcactctccaaagagcttcggatgaagcaaaacctgcaaaaatggcaacaattcaacagcgacttgaactccatctgggcatggctcggcgataccgaagaagagttagaacagctgcagcgtctcgagttgtccactgacatacaaaccattgagttgcagatcaagaaactgaaagagctgcagaaagccgtcgaccaccgcaaggcaataatccttagtatcaacctatgttctcctgaattcacccaagcggatagtaaagagtctagggacctccaggaccgtttaagtcagatgaacgggaggtgggacagagtgtgtagcctgctggaggaatggcggggtctgctgcaggatgccctcatgcagtgtcagggtttccacgagatgtcccatgggctgctcctgatgctggaaaatatcgacagacggaaaaacgaaatcgtgcccattgacagcaatttggacgccgagattctgcaagaccaccataagcagctcatgcagatcaagcacgagctgctggagagccagctccgagtcgcgtctctgcaagatatgtcgtgccaactacttgtgaatgccgagggtaccgattgtttggaggctaaggaaaaggtccacgttattgggaacaggctcaagttactgcttaaggaagtgtcacgacatatcaaggagttggaaaaactgcttgacgtctcttcttctcagcaggatctgtcctcctggagctcagcagacgagctggacacgtctgggtccgtgagccccacctccgggaggtccactccgaatcggcaaaaaacccctcggggtaagtgttccctgtcccaacctgggcctagtgtatcttctccacacagccgtagtacaaaagggggatccgatagcagcttgtctgaacccggaccaggtaggagcggaaggggattcctctttcgcgtgctcagggcagccctccctctgcaattattattgcttttgctgatcggcctcgcctgtttggtaccaatgtcggaggaggattatagctgcgctctgtcgaataacttcgccaggtcgtttcatcccatgctgcgctatactaacggtcctcccccactcta

SEQ ID NO: 257468 - DNA, 27745 bp, Artificial Sequence
  derived and/or modified sequence
cccgggcagtggaaaccgtgggcaaaagttagctggcaggacagcgcagctcctccaggcagcggaggcagcgcgtcccggctctcagggacatttccttcccacctcgacccccgggaggtggtcccggtataaaggctcgctgagcgggtgggtcacagcacagctttgcagctgcggagaaacgcccaaggccgtgcatctccaggagggcggctgggctcccgcagtcctgcagaccgcgcccgatcccggcgacagggcgggcggacagccgcgcatccccggggtcccgccgagcctgggcgcagagagccgggaggaagcgttcgctcgcttcgccttgctgctgggaaactgaacgaggccgagagagaaggttcttgagttcatgtaagaggacagtcttaaaacggaagaagaaaaagaagcagttcagtctttgggagagctgcctccttgttgagtgctgcaaaggcctggaattcatttatgacagaatagatctagaaaagtccaagcatgttttctagagtggtgtagccctgtgctgcctccagtgaagagtctcttggtgttggcttcgtgcttccggagggaccatggcaacctccagaggggcctcccggtgtcctcgggatatcgccaatgtgatgcagaggctgcaagatgagcaagagatagtacaaaaacgaactttcacaaaatggatcaactctcatctggccaagcggaaacctccaatggtggtggacgatctttttgaagacatgaaagatggtgttaaactgcttgcccttctggaggtcctgtctgggcagaaactgccttgtgaacaaggacgccggatgaagcgaatccatgctgtggctaacattggcacggcactcaagttcctcgaaggaagaaagattaaattagtcaacattaactccaccgatatagctgatggccgaccctcaatagttcttggattgatgtggaccattattctatatttccagattgaagagttgaccagcaacctgccccagctccagtctttgtccagcagcgcatcctccgtggacagcatagttagctctgagactcccagcccaccaagtaaacggaaggtgaccaccaagatccaaggaaatgctaagaaggctttattaaagtgggttcagtacacagctggcaagcagactggaatagaagtaaaagattttgggaagagttggagaagcggggttgcctttcattcagttattcatgccattcgaccggaattggtggacttggagacagtgaaaggcagatccaaccgagaaaatttggaggatgctttcactatcgccgaaacagaactggggatcccaagactgctagatcctgaagacgttgatgtggataaaccagatgagaaatctattatgacctatgtagcccagtttctgaaacattatcctgacatccacaatgcaagcactgatgggcaagaggatgatgaaatacttccaggtttcccatcttttgcaaattctgtacaaaattttaagagagaagacagagtaatttttaaggaaatgaaagtttggatagaacaatttgagagagatttgacaagagcacagatggtggaatcaaatttacaggataaatatcagtcatttaagcacttcagagttcaatatgaaatgaagaggaaacagattgaacatttaatacaaccattacacagagacggtaaattgtcacttgaccaagcattggtaaaacaatcttgggatagagtgacctccaggctctttgactggcatatacagcttgataaatctcttcctgcacctctgggcaccataggtgcctggctgtacagagcggaggtggccctgagagaggaaataaccgttcaacaggtccacgaggaaacagcaaacacgatacaacggaaacttgagcaacataaggatctgcttcaaaacacggatgcccacaaaagagcattccatgaaatctaccggaccaggtctgttaacgggattccagtgccacctgatcaattagaggacatggccgagaggtttcattttgtttcctccacatcagagctacacctaatgaaaatggaatttttagaattaaagtaccgtctgctctcactgctggttcttgcagagtcaaagctgaagtcttggatcattaagtacgggaggagagagtcagtggagcagcttctacaaaactacgtgtcttttatagaaaatagcaagttctttgaacaatatgaggtgacataccagatcttgaaacagacagctgagatgtatgtcaaagcagatggttcagtggaagaagctgagaatgtgatgaaattcatgaatgaaaccaccgctcagtggaggaatctctcagtagaagtgaggagtgtgaggagcatgctggaagaagtgatctctaactgggatcgctatggcaatacagtggctagtctgcaagcctggctagaggatgctgaaaaaatgctcaatcaatcagaaaatgccaaaaaggatttttttcgaaatttacctcattggattcagcagcatactgccatgaacgatgctggcaattttctaattgaaacctgtgatgagatggtttcccgtgacctgaagcagcaattactgttgctaaatgggcggtggagggagttgtttatggaagtcaagcaatatgctcaagctgatgagatggacagaatgaagaaggaatacacagactgtgttgttaccctgtctgcttttgcaacggaagcccataagaaactttctgaacccttagaagtctcttttatgaatgtcaagctattaattcaagacttggaggatattgagcagagggtgcctgtgatggatgcccaatacaagataattacaaagacagcacacctcattaccaaagaaagcccccaagaagaaggaaaagaaatgtttgcgaccatgtcaaagctcaaagagcagctaaccaaggtcaaagaatgttactccccactcctttatgagtctcagcagctgttgattccgttggaggaattagaaaagcagatgacgtccttttatgactcacttgggaaaatcaatgaaattatcacagttcttgagcgtgaggcacaatcgagtgccctttttaaacaaaaacatcaggaactgttagcttgtcaagaaaactgtaagaaaaccttgacacttattgagaaaggcagtcaaagtgttcaaaagtttgtgaccttgagcaacgtgttaaagcattttgatcagacgaggctacaaagacagattgcagatattcatgttgcttttcagagtatggtaaagaaaactggagattggaagaagcatgtggaaaccaacagtcgcttgatgaagaagtttgaggagtctcgagcagagttggagaaggtactgcggattgctcaggagggcctggaggaaaagggggatccagaggagctcctgcggagacacactgagtttttcagtcagctggatcagagggtgctcaatgctttcctgaaagcttgtgatgaactcaccgacatccttccagagcaggagcagcaggggctgcaggaagctgttcgaaagctccacaaacaatggaaggatcttcaaggagaagccccttatcatttgcttcatctgaagattgatgtggagaagaataggttcttagcctctgtagaagaatgcagaactgagctggatcgagagaccaagctgatgccccaggaaggcagtgaaaagataattaaagagcacagggttttcttcagtgacaaaggtcctcatcatctctgtgagaaaaggttacagctcatcgaggaactctgtgtgaaactcccagtgcgggacccagtaagggacacacctggaacctgtcacgtgactctcaaagagctcagagctgccattgacagcacctacaggaagctcatggaagacccagacaagtggaaggactacactagcagattctctgagttctcatcttggatatctacaaatgagacacaattaaaggggatcaagggtgaggccatcgatactgccaaccacggagaggttaaacgtgccgttgaagagatcagaaatggtgttaccaaaaggggtgagaccctcagctggctgaaatccaggctgaaagttttgacagaagtttcttctgagaatgaagcccaaaagcagggagatgagctggcaaaattatccagctctttcaaggctcttgtgacgctgctgtcagaggttgaaaagatgctaagcaattttggggactgtgtccagtacaaagaaatagtcaaaaattctctcgaagaattaatttctggctctaaagaagtccaggaacaagctgagaagatcttggatactgaaaatctgtttgaagcacagcagttacttcttcatcaccagcaaaagacaaagcggatctcagcaaagaagagagatgtgcagcagcagatcgcgcaggcgcagcagggagaaggggggctgcctgaccgaggccacgaggagctgcggaagctggagagcacactggatggcctggagcgcagccgggagaggcaggaacgccgcatccaggtcacattaagaaaatgggagcgatttgaaacaaacaaagaaacagtagtaagatacctttttcaaacaggttccagtcatgaacgcttcttgagttttagcagtttggaaagtttatcttcagaactggaacaaacaaaggagttttctaaacggacagaaagtattgcagtccaggctgagaaccttgtaaaggaagcttcagagataccgcttgggccccaaaataagcagctgcttcaacagcaggccaagtcaatcaaagaacaagtcaaaaaattagaagacacgcttgaagaagatattaaaaccatggaaatggtgaaaaccaagtgggatcattttggcagtaattttgagactctgtccgtctggataactgagaaagaaaaagaactcaatgccttggaaacttcgtcatctgccatggacatgcaaatcagccaaattaaggtcacaattcaggaaatagaaagtaagctcagcagcattgtaggattagaagaagaagcccagtcttttgctcagtttgttaccactggagaatctgctcgaattaaagccaagttgacacaaataagaagatacggggaagagcttcgagagcatgcacagtgtctggaaggaacaatcctgggacatttatctcagcagcaaaagtttgaagagaaccttagaaagatccagcaatctgtgtctgaatttgaagataaacttgctgttccaattaaaatatgttcttcagctacagaaacatacaaagttcttcaagaacatatggatctctgccaggccctggagtcactgagcagcgcgatcactgccttctcagccagtgccaggaaggttgtgaacagagattcctgtgttcaggaggctgcggctctacagcagcaatacgaggacatcctaaggagggcgaaggagagacagacggcgctggagaatctgctggcccactggcagaggctagagaaagaactatcatcctttttgacctggttagagcggggtgaagctaaagccagttccccagaaatggacatttctgcagacagagtcaaagtggaaggtgaacttcagttaatacaggcactgcaaaatgaagttgtatcccaggcctcattctatagcaaacttttgcaattgaaggaatcattgttctcagtagcctccaaagatgatgtgaaaatgatgaaactacatttggagcagttggatgagagatggagagatttaccacagatcattaacaaaaggattaattttcttcagtctgtggttgctgaacaccagcaatttgatgagctgctgctttccttttctgtctggattaaactgtttctcagtgaattacaaactacctctgagattagcataatggaccatcaagtagcccttactcggcataaggaccacgcagcagaagtagagagcaaaaagggcgaattgcagagtctgcagggtcacttagcaaagttgggttctctgggccgtgctgaggacctccacctcctgcagggaaaggctgaggactgcttccagctgtttgaggaggccagccaggttgtggagaggcggcagcttgccctgtcccatttggcagaattcctccagagccatgcctctctgtccggcattctccgccagctgaggcaaacagtggaagcaaccaacagtatgaataagaacgagtctgatttgatagaaaaggacctcaatgatgctcttcaaaatgctaaagcattagaatctgctgccgtcagtctggatggcattctttccaaagcccaataccatctgaaaatcgggagctctgagcaaaggacttcctgcagagccacggctgatcagctctgtggagaggtagagaggatccagaaccttctgggaaccaagcagagtgaggcagatgctctggcagtgttgaaaaaagcattccaagaccagaaagaggagcttctgaaaagcattgaggacattgaagaaaggactgacaaagagcgattgaaagaacctacccgccaagctcttcagcagaggttaagagtgtttaatcagctagaagatgaattgaattctcacgagcatgaactatgttggttgaaagacaaagccaagcaaattgcccagaaagatgtagcttttgcacctgaagttgacagggagataaaccgcttagaggtcacctgggatgataccaaaagactaattcatgaaaatcagggtcagtgctgtggacttattgacttaatgagagaatatcagaacctgaaatcagctgtatctaaagtcttagaaaatgccagcagtgtgattgtaaccagaactaccataaaagatcaggaggatcttaaatgggctttttccaagcatgaaactgccaagaacaaaatgaattacaaacagaaagacttggataactttaccagcaaaggaaaacacttgttatctgagctgaagaaaattcacagtagtgatttcagcttggtgaaaacagacatggagagcaccgtggacaaatggctggatgtatcagagaaacttgaagaaaacatggataggctgagagtaagcctgtccatttgggatgatgtactgtcaactagagatgagattgagggatggtcaaacaactgcgttccacagatggcagaaaacatcagcaacctggataaccacctcagagctgaagaactgcttaaagaatttgagtctgaagttaaaaacaaagcattgagattggaagaactgcattccaaagttaatgatctgaaagaattaactaaaaatctagaaacaccgccagaccttcagtttatagaagcagacttaatgcagaaactggagcatgccaaagaaataactgaagtagcaaaaggaaccctgaaggatttcacggctcaaagtacacaagtggagaagtttattaatgacataacaacatggttcacaaaagtggaagaatcgttgatgaactgtgcccaaaatgagacttgtgaagcattgaaaaaagtcaaggatatacaaaaagaacttcaaagtcaacaaagcaacatcagctctacccaagaaaatctcaatagcttgtgccgcaagtaccactcagctgagttggagagcctgggccgtgcaatgactggtctgataaagaaacatgaagccgtgagccagttgtgctccaaaacccaggccagcctgcaggaatctctggaaaaacacttcagtgagtctatgcaggaattccaagaatggtttttgggagcaaaggcagcagcaaaagaatcatcagatcgcaccggtgacagcaaagttctagaagcaaagctccatgatcttcagaacattttggactcagtcagtgatgggcagagcaaacttgatgcagtgactcaagaaggacaaactttgtatgcacatttgtctaaacaaattgtcagtagcattcaagaacaaatcacaaaggccaatgaagagtttcaagcatttctgaaacaatgccttaaagataagcaggctcttcaagactgtgcttcagaacttggaagctttgaagatcagcacagaaaactgaacttatggatccatgaaatggaagaaaggttcaatacggaaaacttgggagagagtaaacagcacattcctgagaagaaaaatgaagttcataaagttgaaatgtttttgggagaactgctggctgcaagagagtctcttgataagctttcccagagagggcagcttctgagtgaagaaggccacggtgctgggcaggagggccgcctgtgttcccagctcctcacaagccaccagaacctacttagaatgaccaaagagaaactccggagctgccaggtggcccttcaggagcacgaagccctggaggaagcactgcaaagcatgtggttctgggtgaaggccattcaggacagactggcctgtgcagagagcactcttgggagcaaagacaccctggagaaacggctgtcacaaatacaggatattctcctgatgaaaggtgaaggggaagttaagttgaatatggccattggcaagggggaacaggccttgagaagtagcaacaaagaaggtcagagggtgattcagactcagttagagacccttaaagaagtgtgggctgacatcatgagctcctccgtccacgctcaaagcactttagagtctgtgattagccaatggaatgactatgtagagaggaaaaaccagttggagcagtggatggaatcagtggatcaaaaaatagaacatcccttacaaccacagccaggtctgaaagagaagttcgtcctgcttgaccacctccagtccatcctgtctgaggcagaagatcacacgagagcccttcaccgtctaattgcgaagtccagggagctctacgaaaagacagaggatgagtctttcaaggacacagctcaagaggagctgaaaacacagtttaatgatataatgactgttgccaaggaaaaaatgaggaaagtggaagagattgtgaaagatcatctaatgtatttagatgcggtccacgagttcacagattggctccattcagcaaaggaagaacttcaccggtggtcagatatgtctggagattcatcagccacccagaaaaagttatcaaaaattaaggagctgatagattccagagagattggtgcaagccgtctcagcagagtggagtcgctggctcccgaagtgaaacagaacacaactgccagtgggtgtgagctcatgcacacggagatgcaggccctgcgtgccgactggaagcagtgggaagacagtgtattccaaacgcagagctgtttggagaacctggtcagccagatggccctttcggagcaggaattctcaggccaagtggctcaactggagcaggccctggaacagttcagtgcccttctgaaaacctgggctcagcagttaaccctcctggaaggcaagaacacggatgaggagatagtggaatgctggcacaaaggacaagagatactggatgctttgcaaaaagcagagcctagaacagaggatctcaagtctcagctgaatgaactttgtcgattttccagagacctgagtacctacagtggaaaagtttctggcttgattaaagagtataattgtctttgtttgcaagcatccaagggctgccagaataaagaacagattttacagcaaagatttcgaaaggccttcagggatttccagcagtggttggttaatgcaaaaatcactaccgccaagtgttttgatatacctcaaaatataagtgaagtttcaactagtcttcagaaaatacaggagtttttgtcagaaagtgaaaatggacagcacaagctaaacatgatgctgtctaaaggggaacttctgagtaccctgctgaccaaagagaaagcgaaagggatccaggccaaagttacagctgcaaaagaagattggaaaaattttcattcaaatctccaccaaaaagaatctgctctagagaatctaaagatccaaatgaaggactttgaagtaagtgctgagcctatccaggactggctgagtaaaactgagaagatggtccatgaaagcagcaatcgcctctatgatctgccagcaaagaggagggagcagcagaagctccagtctgtccttgaggaaatacactgctacgagcctcagctcaacaggctgaaagagaaagctcagcagctgtgggaaggacaagctgccagcaagagctttaggcacagagtgtcgcagctgtcttctcagtatctagcgctaagcaatttaacaaaggagaaagtgtcaagactggatagaatcgttgcagaacacaatcagttctctcttgggattaaagaattacaagactggatgacggatgcgattcacatgctggattcatactgccacccgacatccgacaaaagtgtgctggacagcaggacgctcaagctcgaggctctattatcagtcaaacaggaaaaagagattcagatgaaaatgatagtgaccaggggagaatctgtccttcagaatacttctccagaaggcattcccactattcagcagcagctgcagagtgtgaaggatatgtgggcatcccttttgtctgcagggattcgttgtaaaagccaactcgaaggagctctctccaagtggacaagttatcaggatggcgttcgacagttctccggttggatggatagtatggaagccaacctgaatgaatcagaaaggcagcatgcggagctgcgggataaaacaacgatgctcggaaaagccaagttattaaatgaagaagtgctgagttacagcagcttgctggagaccatcgaagtcaaaggggctggcatgacagaacactatgtcacccagctagaactccaggatctacaggaacgatacagagccatccaagagagggccaaggaagccgtaaccaagtctgaaaaacttgtccgcctgcaccaagagtatcagagagacctaaaggcatttgaagtttggttggggcaagaacaagaaaagctcgaccagtattcagttcttgaaggtgatgcccacactcatgagacaacattgcgtgatcttcaggagctacaggtacactgtgcagaggggcaggccctgttgaactcagtgctgcacaccagagaggatgtgatcccatcaggtatcccacaggcagaggaccgggctttagagtctctccggcaagactggcaggcttaccagcacaggctgtccgagactcgaactcagttcaataacgtggtgaacaaattgaggctaatggagcaaaagtttcagcaagtagatgaatggctcaaaacagcagaggagaaagttagtcccaggaccagacgtcagtctaacagggcaaccaaggagatacaattacatcagatgaagaagtggcacgaagaagtgactgcatacagagatgaagttgaggaagtgggagctagagctcaggagatactggacgagagccacgtgaacagcagaatgggttgccaggccacccagctgacttccagataccaggccctgcttctccaagtgctggaacaaataaaattcctggaggaggagattcagagtttggaggaatcagaatcatccctcagttcctattctgattggtatggctctactcataaaaacttcaagaatgtggctaccaagattgacaaagtagatacagtaatgatggggaagaaattgaagacgttggaggttttgctcaaagacatggagaaaggtcacagtttgctgaaatcagcccgggagaaaggagagagggctgttaaatacttggaggaaggcgaggcagagaggttaagaaaggagattcatgatcacatggagcagttgaaggaactgaccagcactgtccggaaagaacacatgacgctggaaaaaggtcttcatttagcaaaggaattctcagataaatgcaaagcactgacacagtggatagcagaataccaggaaattctacatgttcctgaagaacccaaaatggaattatatgagaaaaaagctcagttatctaaatacaagtcacttcaacaaacggtgctgtcccatgaaccatcagtaaagtcagtgagagagaagggtgaagctcttttggaactggtgcaggacgtcactttaaaggacaaaatagatcaacttcaaagtgattaccaggacctgtgcagcataggaaaggagcatgtcttcagtctggaggcgaaagtcaaagaccatgaagactacaacagtgagctccaagaggtcgaaaagtggctgctgcagatgtctggcagactggtggcacctgacctcctggagacaagcagcctggagacaatcacccagcaattggcccaccacaaggcaatgatggaagaaattgctggttttgaagaccgtttgaacaatcttcaaatgaaaggtgatactttgattggccaatgtgcagaccacctgcaagcgaaacttaaacaaaacgtgcatgctcatctgcagggcacaaaggacagctactcagcgatctgcagcacagctcagaggatgtaccagagtttggaacacgaacttcagaagcacgtcagccgacaagacaccctgcagcagtgccaggcctggctttctgcagtccagccggatttagagccaagtcctcaaccacctcttagtagggcagaagccattaagcaggtcaaacacttcagagctttgcaagagcaggcaaggacctacctagatctcctttgctccatgtgtgacctgtcaaatgcttcggtgaaaaccacagcaaaagacattcaacaaacagagcaaacgattgaacaaaagcttgtccaggcccagaacttaactcagggctgggaagagatcaagcacctgaagtctgagctctggatttacctgcaagatgctgatcagcaactgcagaacatgaagaggaggcactctgagctggagctgaacattgcacagaacatggtttcacaagttaaggattttgttaagaaactacagagcaaacaggcatccgtgaacaccataatagaaaaggtgaataagttaacaaagaaggaggaatcgcctgaacacaaggaaataaatcatttaaatgatcagtggctcgatttgtgccgtcagtctaacaacctgtgcttgcaaagggaagaggatcttcagagaacaagagattaccatgactgtatgaatgttgttgaagtgttcctagaaaaatttactacagaatgggataacttggccagatctgatgcagagagtacagctgtccacctggaagctttgaaaaagttagcattggcattgcaggagagaaagtatgctattgaagatctgaaagatcaaaagcagaaaatgatagagcatctgaatttagatgacaaggagttagtcaaagaacagacgagtcatttagagcaacgttggtttcagcttgaggacctcattaaaaggaaaatccaagtgtcagtcaccaacttggaggagttaaatgtggtgcagtccagatttcaggagctaatggagtgggcagaagagcaacaacccaacatcgccgaggcccttaagcagagccctcctccagatatggctcagaaccttctcatggatcacctggccatctgcagtgaactggaggccaagcagatgctcctgaaatcgcttataaaggacgcagacagggtcatggcagatcttggtctcaatgagcgacaggtcatccagaaggctctctctgatgcacaaagccacgtgaattgtctcagtgacttagtgggccagcgaagaaagtacttaaacaaagccttgtccgagaaaacccagtttctcatggcagtgttccaggccaccagccaaattcagcaacatgagcgaaagataatgttccgtgaacacatctgtctgttaccagatgatgtgagcaaacaagtcaaaacatgtaagagtgcacaagccagcctcaagacttaccaaaatgaagtcactggactttgggcccagggtcgcgaactaatgaaggaagtcacagagcaggaaaagagtgaagtgctggggaagcttcaggaattgcagagtgtctatgacagtgttttacaaaagtgcagtcaccggttacaagaactagagaagaatttggtttctaggaagcattttaaggaagattttgataaagcttgccactggctaaaacaagcagatattgttacatttcctgaaatcaacctaatgaatgagagttctgagcttcatacacaactggctaaataccaaaacattcttgaacaatctccagaatatgaaaatcttctacttacgctgcagagaactgggcagaccatattaccatcgctgaatgaagtcgatcattcctacctcagtgaaaagctaaatgctttgcctcgacaatttaatgtaattgttgccttggctaaagacaagttctataaagtccaggaagcaattcttgctcggaaggaatatgcttccttgattgagttgacaacccagtctctgagtgaacttgaagcccaattcttgaggatgagcaaagttcccaccgacctggccgttgaggaggctctttctctgcaagatggttgcagagccattctggacgaggtggcgggccttggggaggcggtggatgaactgaaccagaaaaaagaaggttttcgcagcacaggtcagccttggcagccagacaagatgctgcaccttgtcaccttatatcacaggctgaagcgacaaacagaacagagggttagcttattagaagacaccaccagtgcttaccaagaacacgagaagatgtgccaacagctggagagacaactgaagtctgtaaaagaggagcagtccaaagtgaatgaggaaacgctgcctgcagaggagaagctcaaaatgtatcactccctggcaggaagtctccaggactcagggattgtactgaaacgagtaaccatacatcttgaagatcttgccccacaccttgaccccttggcttatgagaaagccaggcatcagatccagtcctggcaaggggagttaaaactgttgacttctgccattggtgagacggtgacagaatgtgagagccgaatggtgcagagtatagacttccagactgagatgagtcgctccctggactggctgaggagagtgaaggcagagctcagtgggccggtgtacctagacctcaacctgcaggacatccaagaggaaatcagaaaaatccaaattcatcaggaagaggtccagtccagcttgagaatcatgaatgcgctgagtcacaaggaaaaggagaagttcacaaaggccaaggagctgatttctgcggatttagaacacagcctcgctgagctctcagagctggatggagacatccaggaagccttacgcaccagacaggctaccttgactgaaatatatagccagtgtcaaaggtattatcaggtatttcaagcagccaatgactggcttgaggatgcccaagaattgttacagctggcaggcaatggcctagacgtggagagcgcagaggaaaatctcaaaagccacatggaatttttcagtacagaggatcagttccatagtaacctggaggagctccacagcctggtagccaccctggacccactcatcaagccaaccggcaaagaagacctagaacagaaagtggcttctctggaactcaggagccagaggatgagccgggactctggtgcccaagtggatctcttgcagagatgcacagctcaatggcacgattaccagaaagcaagggaagaggttattgaattgatgaatgatacagaaaagaaattgtctgagttttctttgttgaagacttcgtctagtcatgaagcggaagaaaaattgtcagaacacaaggctttagtgtcagtggttaactctttccatgagaaaattgtggcccttgaggaaaaagcttcacaactggagaaaaccggaaatgatgccagcaaagccaccctgagcaggtcaatgaccaccgtctggcagcgctggacacgccttcgagctgtggcccaggaccaggagaagatcctggaagatgcagtggatgagtggacgggctttaacaacaaggttaaaaaggccactgaaatgattgatcagctgcaagataagttacctggaagttcagcagagaaagcatcgaaagcagagctcttaactcttcttgaataccacgacacgttcgttctggagctggagcagcagcagtcggccttgggcatgctgcggcagcaaaccctgagcatgctccaggatggagccgccccaacccctggggaagagcctccgctcatgcaggaaatcaccgccatgcaagatcggtgcctgaacatgcaggagaaagtgaagactaatggaaagttggtgaagcaagagctgaaggaccgagaaatggtggagactcagatcaattctgtgaaatgttgggttcaggaaacgaaagaatatttagggaatccaacaatagaaatagatgctcaacttgaagaacttcagattctcctaacagaagccacaaatcaccgacagaacattgaaaaaatggcagaagaacagaaggagaagtacttaggtctttataccatattaccttctgaactctcccttcagttggctgaagtggcgttagatctaaagatccgagatcagatccaagacaaaataaaagaagttgagcagagcaaggccacgagccaggaactcagccggcaaattcagaagttagctaaagacctcacaactattctaactaagctgaaagcgaagacagataatgtagttcaagctaaaactgaccaaaaggtgctgggagaggaattagatggctgtaattcaaagttaatggaattagatgcagcagtacagaaattcttggaacagaatggccaactgggtaagccactggccaagaagataggaaaactgactgaacttcaccagcagaccattagacaagctgagaatcggctctccaagctcaatcaggcagcatcacatttagaagaatacaatgaaatgcttgaattaattttgaagtggattgaaaaagctaaagtcttggctcatggaactattgcatggaattctgcaagccagcttcgggaacaatatattttgcatcagaccctgctagaagaatccaaagaaattgacagtgagctggaagcaatgactgagaaattacagtacctcactagcgtgtactgtacagaaaaaatgtctcagcaagtggcagaactgggacgggagactgaggagttgcgacagatgatcaaaattcgtttgcagaacctccaagatgcagctaaggatatgaaaaaatttgaagcagagttgaaaaagttacaagctgccttggagcaagcccaggcaacactgacttctccagaagttggacgtctcagtctcaaggagcagctctctcatcggcagcatttgttgtctgagatggagtcactgaagccgaaggtgcaagcagtgcagctctgccagagtgccctccggatccccgaggatgtggttgccagcttacctctctgtcatgctgctctgcggctgcaggaagaggccagccggctgcagcacaccgccatccagcagtgtaacatcatgcaggcagctgtggtacaatatgaacaatatgagcaagaaatgaaacatctccagcaactgatagaaggagctcacagagagattgaggataaacctgttgccaccagtaacatacaggagctgcaggctcagatttctcggcatgaggagctggcgcagaaaattaagggctaccaggagcagatcgcttctttgaattccaagtgcaagatgctgacgatgaaagccaagcacgccaccatgctgctgacggtgaccgaggtcgaggggctggcggaagggacagaggacctggatggggagctcctccccacgccttcggcccacccctctgtggtcatgatgactgcaggtcgctgtcacactttgctgtcaccggtcactgaggagtctggggaggagggaaccaacagtgagatttcctctccacctgcctgtcgctccccttcacctgtggctaatacagatgcttctgttaaccaggacattgcatattaccaagccttgtctgctgagaggttgcagacagatgctgcaaaaattcaccccagcacatccgcatcccaggagttctatgaaccgggattggagccatccgctactgccaaactgggtgatttgcagcgttcttgggaaaccttaaagaatgtgatcagtgagaagcagcgcacactctatgaagctttggaacgccagcagaagtaccaggactccctccagtccatctctacgaagatggaggccattgagctgaaactcagtgagagcccagagcctggcaggagtccagaaagccagatggctgaacatcaggcattgatggatgagattctcatgctccaggatgaaatcaatgagctccagtcctctctcgcagaggagctggtatccgagtcttgtgaggccgaccctgcggagcagctggccttgcagtccacgctcactgtcttagccgagcgaatgtccaccatcaggatgaaagcctcggggaaacggcagcttttggaggagaagttgaatgatcagctggaggaacaaaggcaggaacaggccctgcagaggtatcgctgtgaagccgatgagctggacagctggctcttgagtaccaaggccactctggacactgcgctgagtccacccaaggagcccatggacatggaggcccagcttatggactgccagaatatgctggtggaaatagagcagaaggtggtggctttatcagaactgtcagtccacaatgagaacctgctgctggagggcaaagctcacaccaaggacgaggccgagcagctggctggaaagctgagaaggctcaaggggagcctgctggagctgcagagagccctgcatgataagcagctcaacatgcagggaacagcacaggagaaggaggagagcgatgttgacctaacagccacgcagagccccggcgtccaggaatggctggcccaagctcgcaccacatggacccagcagcggcagagcagtctccagcaacaaaaagagttagaacaggaattagccgagcagaagagtctccttcgctcagtagccagtcgtggagaggagattctaattcaacattcggcggcagagacctctggtgatgctggcgaaaaacctgatgtgttatcccaggagttggggatggaaggggagaaatcatccgctgaagaccagatgagaatgaaatgggaaagcctacatcaagaatttagtaccaagcagaaactactacagaatgttctggaacaggaacaagagcaagtgctttatagcaggccaaatcgactcttgtctggtgtgccactgtacaaaggggacgtgccaacccaagataaatctgcagttacatctttgctggatggactgaaccaagccttcgaggaggtttcatcccagagtggaggggcaaagaggcagagtatacacttggagcagaagttgtatgatggagtctcagccacctctacttggttggatgacgttgaagaacgtttatttgttgccacagcacttttaccagaagaaacagagacttgtctcttcaaccaagagattcttgccaaagacattaaggaaatgtctgaagaaatggataagaacaaaaacttgttttcccaagcttttccagagaatggtgataatcgagatgttattgaagatactttgggttgtcttttgggcaggttatccttgctagactcagtagtgaatcaacgatgtcatcagatgaaagaaagacttcagcaaatactaaatttccagaatgatctgaaagtgctgtttacatcactggctgacaacaaatacatcattctgcaaaaactggcaaatgtgtttgaacagcccgtagcagaacaaatagaggcaatacaacaggctgaagatggactcaaagaatttgatgcaggaatcattgaattaaagaggcgtggtgacaagctacaggtcgagcagccgtccatgcaagaactctccaagctccaggacatgtatgatgagctgatgatgatcattggctcccggaggagtggtctgaatcagaaccttacactcaagagtcagtatgagagggccctacaagatctggctgacctgctagaaactggtcaggagaagatggcaggagaccagaaaatcatcgtgtcttccaaagaggaaatccagcaactacttgacaaacataaggaatactttcagggcctggaatctcatatgatcttgactgaaacactcttcagaaagataatcagctttgcagtccaaaaggaaacccagttccatacagagctgatggctcaggcttctgctgtactgaaacgggctcacaagaggggtgtggagctggagtacattctagagacgtggtcccatctggatgaggaccagcaggagctcagcagacagctggaggtggtggaaagcagcatcccaagcgtgggtctggtggaggagaacgaggacaggcttattgaccgcataacactctaccagcatttaaaatctagccttaatgaataccagcccaaattatatcaagtattagatgatgggaaacgacttctgatatccatcagctgctcagatctagaaagccaactaaatcaacttggagagtgctggctaagtaacaccaataaaatgtctaaggaacttcacagactggaaacaatattgaaacactggaccagatatcaaagtgaatctgcagatctaattcactggttacaatctgcaaaagaccggctagaattttggactcagcaatctgtgacagtcccacaagagctggaaatggtccgtgatcatctaaatgctttcctggagttttctaaagaagtggatgcccaatcttccctgaaatcatctgttctgagtactggaaatcagctccttcgactaaaaaaggtggacacagccacgctgcgctctgagctgtcgcgcattgatagccagtggactgacctgctaaccaatatcccagccgtccaggagaagctccaccagctccagatggataaactgccttcccgccatgccatttctgaagtcatgagttggatttctctaatggaaaatgttattcagaaggatgaagataatattaaaaattccataggttacaaggcaattcatgaataccttcagaaatataagggttttaagatagacattaactgtaaacagctgacagtggattttgtgaaccagtccgtgctacaaatcagcagtcaggatgtggaaagtaagcgtagtgataagactgattttgctgagcaacttggagcaatgaataaaagttggcaaattctgcaaggtctagtaactgagaagatccagctgttggaaggcttattggaatcttggtcagaatatgaaaataatgtacaatgtctgaaaacatggtttgaaacccaggaaaagagactaaaacaacagcatcgaattggagatcaggcttctgttcaaaatgcactgaaagactgtcaggatctggaagatttgattaaagcaaaagaaaaagaagtagagaaaattgagcagaatggacttgctttgattcagaacaagaaagaagacgtctctagcattgtcatgagcacactgcgagagctcggccaaacctgggcaaatttagatcacatggttggacaattaaagatactgctgaaatcagtgcttgaccaatggagtagtcacaaagtggcctttgacaagataaacagttacctcatggaggccagatactctctttcccgattccgtctgctgactggctccttagaagctgtgcaagttcaggtggacaatcttcagaatctccaagatgatctggaaaaacaggaaaggagcttacagaaatttggctctatcaccaaccaattattaaaagagtgtcacccacccgtgacagaaactcttaccaatacactgaaagaagtcaacatgagatggaataacttgctggaagagattgctgagcagctacagtccagcaaggccctacttcagctttggcaaagatacaaggactactccaaacagtgtgcttcgacagttcagcagcaggaggatcgaaccaatgagctgttgaaggcagccacaaacaaggacattgccgatgatgaggttgccacatggattcaagattgcaacgacctcctcaaaggactgggcacagttaaagattccctcttttttctccatgagctgggagagcaactgaagcaacaagtggatgcttccgcagcatcagctattcaatcggatcaactctctttgagtcaacacttgtgtgccctggagcaagctctctgcaaacagcagacttcattacaggctggagttcttgattatgaaacctttgccaagagtttagaagctttggaggcctggatagtggaagctgaagaaatactacaagggcaggaccctagccactcatctgacctctccacaatccaggaaaggatggaagaacttaagggacagatgttaaaattcagcagcatggctccagatttagaccgtctaaatgagcttggatataggttacccttgaatgataaggaaatcaaaagaatgcagaatctgaaccgccattggtctctgatctcctctcagactacagaaagattcagcaagttgcagtcatttttgctacaacatcagactttcttggaaaaatgtgaaacatggatggaattcctagttcagacagaacaaaagttagcagtagagatttcaggaaattatcagcaccttttggaacagcagagagcacacgagttgtttcaagccgagatgttcagtcgtcagcagattttgcactcaatcattattgatgggcaacgtcttctagaacaaggtcaagttgatgacagggatgaattcaacctgaaattgacactcctcagtaatcaatggcagggagtgattcgcagggcccagcagaggcgggggatcattgacagccagattcgccagtggcagcgctatagggagatggcagaaaagcttcgtaaatggttggttgaagtgtcctacctccccatgagtggtctcggaagtgttcctataccactgcaacaagcaaggaccctctttgatgaagtgcagttcaaagaaaaagtgtttctgcggcaacaaggcagctacatcctgactgtggaggctggcaagcaactccttctctcggcggacagtggcgctgaggccgccttgcaggccgaactcgctgaaatccaagagaaatggaaatcagccagcatgcggctggaagaacagaagaaaaaactagccttcttgttgaaagactgggaaaaatgtgagaaaggaatagcagattccctggagaaactacgaactttcaaaaagaagctttcgcagtctctcccggatcaccatgaagagctccatgcagaacaaatgcgttgcaaggaattagaaaatgcagttgggagctggacagatgacttgacccagttgagcctgctgaaggacaccctctctgcctatatcagtgctgatgatatctccattcttaatgaacgcgtagagcttctgcaaaggcagtgggaagaactatgccaccagctctccttaaggcggcagcaaataggtgaaagattgaatgaatgggcagtcttcagtgaaaagaacaaggaactctgtgagtggttgactcaaatggaaagcaaagtttctcagaatggagacattctcattgaagaaatgatagagaagctcaagaaggattatcaagaggaaattgctattgctcaagagaacaaaatacagctccaacaaatgggagaacgacttgctaaagccagccatgaaagcaaagcatctgagattgaatacaagctgggaaaggtcaacgaccggtggcagcatctcctggacctcattgcagccagggtgaagaagctgaaggagaccctggtagccgtgcagcagcttgataagaacatgagcagcctgaggacctggctcgctcacatcgagtcagagctggccaagccaatagtctacgattcctgtaactcggaagaaatacagagaaagcttaatgagcagcaggagcttcagagagacatagagaagcacagtacaggtgttgcatctgtcctcaacctgtgtgaagtcctgctgcacgactgtgacgcctgtgccactgatgccgagtgtgactctatacagcaggctacgagaaacctggaccggcggtggagaaacatttgtgctatgtccatggaaaggaggctgaaaatcgaagagacgtggcgattgtggcagaaatttctggatgactattcacgttttgaagattggctgaagtcttcagaaaggacagctgcttttcccagctcttctggggtgatctatacagttgccaaggaagaactaaagaaatttgaggctttccagcgacaggtccacgagtgcctgacgcagctggaactgatcaacaagcagtaccgccgcctggccagggagaaccgcactgattcagcatgtagcctcaaacagatggttcacgaaggcaaccagagatgggacaacctgcaaaagcgtgtcacctccatcttgcgcagactcaagcattttattggccagcgtgaggagtttgagactgcgcgggacagcattctggtctggctcacagagatggatctgcagctcactaatattgaacatttttctgagtgtgatgttcaagctaaaataaagcaactcaaggccttccagcaggaaatttcactgaaccacaataagattgagcagataattgcccaaggagaacagctgatagaaaagagtgagcccttggatgcagcgatcatcgaggaggaactagatgagctccgacggtactgccaggaggtcttcgggcgtgtggaaagataccataagaaactgatccgcctgcctctcccagacgatgagcacgacctctcagacagggagctggagctggaagactctgcagctctgtcggacctgcactggcacgaccgctctgcagacagcctgctttctccacagccttcctccaatctctccctctcgctcgctcagcccctccggagcgagcggtcaggacgagacaccccggctagtgtggactccatccccctggagtgggatcacgactatgacctcagtcgggacctggagtctgcaatgtccagagctctgccctctgaggatgaagaaggtcaggatgacaaagatttctacctccggggagctgttggcttatcaggggaccacagtgccctagagtcacagatccgacaactgggcaaagccctggatgatagccgttttcagatacagcaaaccgaaaatatcattcgcagcaaaactcccacggggccggagctagacaccagctacaaaggctacatgaaactgctgggcgaatgcagtagcagtatagactccgtgaagagactggagcacaaactgaaggaggaagaggagagccttcctggctttgttaacctgcatagtaccgaaacccaaacggctggtgtgattgaccgatgggagcttctccaggcccaggcattgagcaaggagttgaggatgaagcagaacctccagaagtggcagcagtttaactcagacttgaacagcatctgggcctggctgggggacacggaggaggagttggaacagctccagcgtctggaactcagcactgacatccagaccatcgagctccagatcaaaaagctcaaggagctccagaaagctgtggaccaccgcaaagccatcatcctctccatcaatctctgcagccctgagttcacccaggctgacagcaaggagagccgggacctgcaggatcgcttgtcgcagatgaatgggcgctgggaccgagtgtgctctctgctggaggagtggcggggcctgctgcaggatgccctgatgcagtgccagggtttccatgaaatgagccatggtttgcttcttatgctggagaacattgacagaaggaaaaatgaaattgtccctattgattctaaccttgatgcagagatacttcaggaccatcacaaacagcttatgcaaataaagcatgagctgttggaatcccaactcagagtagcctctttgcaagacatgtcttgccaactactggtgaatgctgaaggaacagactgtttagaagccaaagaaaaagtccatgttattggaaatcggctcaaacttctcttgaaggaggtcagtcgtcatatcaaggaactggagaagttattagacgtgtcaagtagtcagcaggatttgtcttcctggtcttctgctgatgaactggacacctcagggtctgtgagtcccacatcaggaaggagcaccccaaacagacagaaaacgccacgaggcaagtgtagtctctcacagcctggaccctctgtcagcagtccacatagcaggtccacaaaaggtggctccgattcctccctttctgagccagggccaggtcggtccggccgcggcttcctgttcagagtcctccgagcagctcttccccttcagcttctcctgctcctcctcatcgggcttgcctgccttgtaccaatgtcagaggaagactacagctgtgccctctccaacaactttgcccggtcattccaccccatgctcagatacacgaatggccctcctccactctgaactaagcagatgccatctgcagaagtgctggtagcataaggaggatcgggtcataagcaatcccaaactaccaacaagaggaccttgatcttggcgaaagccctcggtgtggcagctttagccctcctccagatcacatgtgtgcaaattatggcttcagaggtggaagataaacagtgacgggggaacaaacagacaacaagaaggtttggaagaaatctggtttgagactctgaaccttagcactaaggagattgagtaaggacctccaaagttccccggactcatgaattctgggcccttggcccattctgtgcacagccaaggacttcagtagaccatctgggcagctttcccatggtgctgctccaaccatcagataaatgaccctcccaagcaccatgtcagtgtcgtacaatctaccaaccaaccagtgctgaagagattttagaaccttgtaacatacaatttttaagagcttatatggcagcttcctttttaccttgttttcctttggggcatgatgttttaacctttgctttagaagcacaagctgtaaatctaaaaggcacttttttttagaggtataaagaaaaactagatgtaataaataagatcatggaaggctttatgtgaaaaaagttgaatgttatagtaaaaaaaaaaagatatttatgtatgtacagtttgctaaagccaagttttgtttgtattgatttctttgcatttattatagatattataaaata

SEQ ID NO: 257469 - DNA, 26581 bp, Artificial Sequence
  derived and/or modified sequence
cccgggcagtggaaaccgtgggcaaaagttagctggcaggacagcgcagctcctccaggcagcggaggcagcgcgtcccggctctcagggacatttccttcccacctcgacccccgggaggtggtcccggtataaaggctcgctgagcgggtgggtcacagcacagctttgcagctgcggagaaacgcccaaggccgtgcatctccaggagggcggctgggctcccgcagtcctgcagaccgcgcccgatcccggcgacagggcgggcggacagccgcgcatccccggggtcccgccgagcctgggcgcagagagccgggaggaagcgttcgctcgcttcgccttgctgctgggaaactgaacgaggccgagagagaaggttcttgagttcatgtaagaggacagtcttaaaacggaagaagaaaaagaagcagttcagtctttgggagagctgcctccttgttgagtgctgcaaaggcctggaattcatttatgacagaatagatctagaaaagtccaagcatgttttctagagtggtgtagccctgtgctgcctccagtgaagagtctcttggtgttggcttcgtgcttccggagggaccatggcaacctccagaggggcctcccggtgtcctcgggatatcgccaatgtgatgcagaggctgcaagatgagcaagagatagtacaaaaacgaactttcacaaaatggatcaactctcatctggccaagcggaaacctccaatggtggtggacgatctttttgaagacatgaaagatggtgttaaactgcttgcccttctggaggtcctgtctgggcagaaactgccttgtgaacaaggacgccggatgaagcgaatccatgctgtggctaacattggcacggcactcaagttcctcgaaggaagaaagattaaattagtcaacattaactccaccgatatagctgatggccgaccctcaatagttcttggattgatgtggaccattattctatatttccagattgaagagttgaccagcaacctgccccagctccagtctttgtccagcagcgcatcctccgtggacagcatagttagctctgagactcccagcccaccaagtaaacggaaggtgaccaccaagatccaaggaaatgctaagaaggctttattaaagtgggttcagtacacagctggcaagcagactggaatagaagtaaaagattttgggaagagttggagaagcggggttgcctttcattcagttattcatgccattcgaccggaattggtggacttggagacagtgaaaggcagatccaaccgagaaaatttggaggatgctttcactatcgccgaaacagaactggggatcccaagactgctagatcctgaagacgttgatgtggataaaccagatgagaaatctattatgacctatgtagcccagtttctgaaacattatcctgacatccacaatgcaagcactgatgggcaagaggatgatgaaatacttccaggtttcccatcttttgcaaattctgtacaaaattttaagagagaagacagagtaatttttaaggaaatgaaagtttggatagaacaatttgagagagatttgacaagagcacagatggtggaatcaaatttacaggataaatatcagtcatttaagcacttcagagttcaatatgaaatgaagaggaaacagattgaacatttaatacaaccattacacagagacggtaaattgtcacttgaccaagcattggtaaaacaatcttgggatagagtgacctccaggctctttgactggcatatacagcttgataaatctcttcctgcacctctgggcaccataggtgcctggctgtacagagcggaggtggccctgagagaggaaataaccgttcaacaggtccacgaggaaacagcaaacacgatacaacggaaacttgagcaacataagagaaaactaaggaatgtaatagatctgcttcaaaacacggatgcccacaaaagagcattccatgaaatctaccggaccaggtctgttaacgggattccagtgccacctgatcaattagaggacatggccgagaggtttcattttgtttcctccacatcagagctacacctaatgaaaatggaatttttagaattaaagtaccgtctgctctcactgctggttcttgcagagtcaaagctgaagtcttggatcattaagtacgggaggagagagtcagtggagcagcttctacaaaactacgtgtcttttatagaaaatagcaagttctttgaacaatatgaggtgacataccagatcttgaaacagacagctgagatgtatgtcaaagcagatggttcagtggaagaagctgagaatgtgatgaaattcatgaatgaaaccaccgctcagtggaggaatctctcagtagaagtgaggagtgtgaggagcatgctggaagaagtgatctctaactgggatcgctatggcaatacagtggctagtctgcaagcctggctagaggatgctgaaaaaatgctcaatcaatcagaaaatgccaaaaaggatttttttcgaaatttacctcattggattcagcagcatactgccatgaacgatgctggcaattttctaattgaaacctgtgatgagatggtttcccgtgacctgaagcagcaattactgttgctaaatgggcggtggagggagttgtttatggaagtcaagcaatatgctcaagctgatgagatggacagaatgaagaaggaatacacagactgtgttgttaccctgtctgcttttgcaacggaagcccataagaaactttctgaacccttagaagtctcttttatgaatgtcaagctattaattcaagacttggaggatattgagcagagggtgcctgtgatggatgcccaatacaagataattacaaagacagcacacctcattaccaaagaaagcccccaagaagaaggaaaagaaatgtttgcgaccatgtcaaagctcaaagagcagctaaccaaggtcaaagaatgttactccccactcctttatgagtctcagcagctgttgattccgttggaggaattagaaaagcagatgacgtccttttatgactcacttgggaaaatcaatgaaattatcacagttcttgagcgtgaggcacaatcgagtgccctttttaaacaaaaacatcagttgaggatactgaaatgcaaatggtgtaattcaagccaaaaaatgaccctctgccttgtgctgggctcaatgatttccatgctgtctactgccaaaatcacaattgcaggctacaagtcagaggtggaggtgtctgaactgttagcttgtcaagaaaactgtaagaaaaccttgacacttattgagaaaggcagtcaaagtgttcaaaagtttgtgaccttgagcaacgtgttaaagcattttgatcagacgaggctacaaacagattgcagatattcatgttgcttttcagtaatgagaaagcagcatcacattatgattgtttttcacatcaagagtatggtaaagaaaactggagattggaagaagcatgtggaaaccaacagtcgcttgatgaagaagtttgaggagtctcgagcagagttggagaaggtactgcggattgctcaggagggcctggaggaaaagggggatccagaggagctcctgcggagacacactgagtttttcagtcagctggatcagagggtgctcaatgctttcctgaaagcttgtgatgaactcaccgacatccttccagagcaggagcagcaggggctgcaggaagctgttcgaaagctccacaaacaatggaaggatcttcaaggagaagccccttatcatttgcttcatctgaagattgatgtggagaagaataggttcttagcctctgtagaagaatgcagaactgagctggatcgagagaccaagctgatgccccaggaaggcagtgaaaagataattaaagagcacagggttttcttcagtgacaaaggtcctcatcatctctgtgagaaaaggttacagctcatcgaggaactctgtgtgaaactcccagtgcgggacccagtaagggacacacctggaacctgtcacgtgactctcaaagagctcagagctgccattgacagcacctacaggaagctcatggaagacccagacaagtggaaggactacactagcagattctctgagttctcatcttggatatctacaaatgagacacaattaaaggggatcaagggtgaggccatcgatactgccaaccacggagaggttaaacgtgccgttgaagagatcagaaatggtgttaccaaaaggggtgagaccctcagctggctgaaatccaggctgaaagttttgacagaagtttcttctgagaatgaagcccaaaagcagggagatgagctggcaaaattatccagctctttcaaggctcttgtgacgctgctgtcagaggttgaaaagatgctaagcaattttggggactgtgtccagtacaaagaaatagtcaaaaattctctcgaagaattaatttctggctctaaagaagtccaggaacaagctgagaagatcttggatactgaaaatctgtttgaagcacagcagttacttcttcatcaccagcaaaagacaaagcggatctcagcaaagaagagagatgtgcagcagcagatcgcgcaggcgcagcagggagaaggggggctgcctgaccgaggccacgaggagctgcggaagctggagagcacactggatggcctggagcgcagccgggagaggcaggaacgccgcatccaggtcacattaagaaaatgggagcgatttgaaacaaacaaagaaacagtagtaagatacctttttcaaacaggttccagtcatgaacgcttcttgagttttagcagtttggaaagtttatcttcagaactggaacaaacaaaggagttttctaaacggacagaaagtattgcagtccaggctgagaaccttgtaaaggaagcttcagagataccgcttgggccccaaaataagcagctgcttcaacagcaggccaagtcaatcaaagaacaagtcaaaaaattagaagacacgcttgaagaagagtatgtgattgacaataaaaccatggaaatggtgaaaaccaagtgggatcattttggcagtaattttgagactctgtccgtctggataactgagaaagaaaaagaactcaatgccttggaaacttcgtcatctgccatggacatgcaaatcagccaaattaaggtcacaattcaggaaatagaaagtaagctcagcagcattgtaggattagaagaagaagcccagtcttttgctcagtttgttaccactggagaatctgctcgaattaaagccaagttgacacaaataagaagatacggggaagagcttcgagagcatgcacagtgtctggaaggaacaatcctgggacatttatctcagcagcaaaagtttgaagagaaccttagaaagatccagcaatctgtgtctgaatttgaagataaacttgctgttccaattaaaatatgttcttcagctacagaaacatacaaagttcttcaagaacatatggatctctgccaggccctggagtcactgagcagcgcgatcactgccttctcagccagtgccaggaaggttgtgaacagagattcctgtgttcaggaggctgcggctctacagcagcaatacgaggacatcctaaggagggcgaaggagagacagacggcgctggagaatctgctggcccactggcagaggctagagaaagaactatcatcctttttgacctggttagagcggggtgaagctaaagccagttccccagaaatggacatttctgcagacagagtcaaagtggaagcctccaaagatgatgtgaaaatgatgaaactacatttggagcagttggatgagagatggagagatttaccacagatcattaacaaaaggattaattttcttcagtctgtggttgctgaacaccagcaatttgatgagctgctgctttccttttctgtctggattaaactgtttctcagtgaattacaaactacctctgagattagcataatggaccatcaagtagcccttactcggcataaggaccacgcagcagaagtagagagcaaaaagggcgaattgcagagtctgcagggtcacttagcaaagttgggttctctgggccgtgctgaggacctccacctcctgcagggaaaggctgaggactgcttccagctgtttgaggaggccagccaggttgtggagaggcggcagcttgccctgtcccatttggcagaattcctccagagccatgcctctctgtccggcattctccgccagctgaggcaaacagtggaagcaaccaacagtatgaataagaacgagtctgatttgatagaaaaggacctcaatgatgctcttcaaaatgctaaagcattagaatctgctgccgtcagtctggatggcattctttccaaagcccaataccatctgaaaatcgggagctctgagcaaaggacttcctgcagagccacggctgatcagctctgtggagaggtagagaggatccagaaccttctgggaaccaagcagagtgaggcagatgctctggcagtgttgaaaaaagcattccaagaccagaaagaggagcttctgaaaagcattgaggacattgaagaaaggactgacaaagagcgattgaaagaacctacccgccaagctcttcagcagaggttaagagtgtttaatcagctagaagatgaattgaattctcacgagcatgaactatgttggttgaaagacaaagccaagcaaattgcccagaaagatgtagcttttgcacctgaagttgacagggagataaaccgcttagaggtcacctgggatgataccaaaagactaattcatgaaaatcagggtcagtgctgtggacttattgacttaatgagagaatatcagaacctgaaatcagctgtatctaaagtcttagaaaatgccagcagtgtgattgtaaccagaactaccataaaagatcaggaggatcttaaatgggctttttccaagcatgaaactgccaagaacaaaatgaattacaaacagaaagacttggataactttaccagcaaaggaaaacacttgttatctgagctgaagaaaattcacagtagtgatttcagcttggtgaaaacagacatggagagcaccgtggacaaatggctggatgtatcagagaaacttgaagaaaacatggataggctgagagtaagcctgtccatttgggatgatgtactgtcaactagagatgagattgagggatggtcaaacaactgcgttccacagatggcagaaaacatcagcaacctggataaccacctcagagctgaagaactgcttaaagaatttgagtctgaagttaaaaacaaagcattgagattggaagaactgcattccaaagttaatgatctgaaagaattaactaaaaatctagaaacaccgccagaccttcagtttatagaagcagacttaatgcagaaactggagcatgccaaagaaataactgaagtagcaaaaggaaccctgaaggatttcacggctcaaagtacacaagtggagaagtttattaatgacataacaacatggttcacaaaagtggaagaatcgttgatgaactgtgcccaaaatgagacttgtgaagcattgaaaaaagtcaaggatatacaaaaagaacttcaaagtcaacaaagcaacatcagctctacccaagaaaatctcaatagcttgtgccgcaagtaccactcagctgagttggagagcctgggccgtgcaatgactggtctgataaagaaacatgaagccgtgagccagttgtgctccaaaacccaggccagcctgcaggaatctctggaaaaacacttcagtgaagagtctatgcaggaattccaagaatggtttttgggagcaaaggcagcagcaaaagaatcatcagatcgcaccggtgacagcaaagttctagaagcaaagctccatgatcttcagcagaacattttggactcagtcagtgatgggcagagcaaacttgatgcagtgactcaagaaggacaaactttgtatgcacatttgtctaaacaaattgtcagtagcattcaagaacaaatcacaaaggccaatgaagagtttcaagcatttctgaaacaatgccttaaagataagcaggctcttcaagactgtgcttcagaacttggaagctttgaagatcagcacagaaaactgaacttatggatccatgaaatggaagaaaggttcaatacggaaaacttgggagagagtaaacagcacattcctgagaagaaaaatgaagttcataaagttgaaatgtttttgggagaactgctggctgcaagagagtctcttgataagctttcccagagagggcagcttctgagtgaagaaggccacggtgctgggcaggagggccgcctgtgttcccagctcctcacaagccaccagaacctacttagaatgaccaaagagaaactccggagctgccaggtggcccttcaggagcacgaagccctggaggaagcactgcaaagcatgtggttctgggtgaaggccattcaggacagactggcctgtgcagagagcactcttgggagcaaagacaccctggagaaacggctgtcacaaatacaggatattctcctgatgaaaggtgaaggggaagttaagttgaatatggccattggcaagggggaacaggccttgagaagtagcaacaaagaaggtcagagggtgattcagactcagttagagacccttaaagaagtgtgggctgacatcatgagctcctccgtccacgctcaaagcactttagagtctgtgattagccaatggaatgactatgtagagaggaaaaaccagttggagcagtggatggaatcagtggatcaaaaaatagaacatcccttacaaccacagccaggtctgaaagagaagttcgtcctgcttgaccacctccagtccatcctgtctgaggcagaagatcacacgagagcccttcaccgtctaattgcgaagtccagggagctctacgaaaagacagaggatgagtctttcaaggacacagctcaagaggagctgaaaacacagtttaatgatataatgactgttgccaaggaaaaaatgaggaaagtggaagagattgtgaaagatcatctaatgtatttagatgcggtccacgagttcacagattggctccattcagcaaaggaagaacttcaccggtggtcagatatgtctggagattcatcagccacccagaaaaagttatcaaaaattaaggagctgatagattccagagagattggtgcaagccgtctcagcagagtggagtcgctggctcccgaagtgaaacagaacacaactgccagtgggtgtgagctcatgcacacggagatgcaggccctgcgtgccgactggaagcagtgggaagacagtgtattccaaacgcagagctgtttggagaacctggtcagccagatggccctttcggagcaggaattctcaggccaagtggctcaactggagcaggccctggaacagttcagtgcccttctgaaaacctgggctcagcagttaaccctcctggaaggcaagaacacggatgaggagatagtggaatgctggcacaaaggacaagagatactggatgctttgcaaaaagcagagcctagaacagaggatctcaagtctcagctgaatgaactttgtcgattttccagagacctgagtacctacagtggaaaagtttctggcttgattaaagagtataattgtctttgtttgcaagcatccaagggctgccagaataaagaacagattttacagcaaagatttcgaaaggccttcagggatttccagcagtggttggttaatgcaaaaatcactaccgccaagtgttttgatatacctcaaaatataagtgaagtttcaactagtcttcagaaaatacaggagtttttgtcagaaagtgaaaatggacagcacaagctaaacatgatgctgtctaaaggggaacttctgagtaccctgctgaccaaagagaaagcgaaagggatccaggccaaagttacagctgcaaaagaagattggaaaaattttcattcaaatctccaccaaaaagaatctgctctagagaatctaaagatccaaatgaaggactttgaagtaagtgctgagcctatccaggactggctgagtaaaactgagaagatggtccatgaaagcagcaatcgcctctatgatctgccagcaaagaggagggagcagcagaagctccagtctgtccttgaggaaatacactgctacgagcctcagctcaacaggctgaaagagaaagctcagcagctgtgggaaggacaagctgccagcaagagctttaggcacagagtgtcgcagctgtcttctcagtatctagcgctaagcaatttaacaaaggagaaagtgtcaagactggatagaatcgttgcagaacacaatcagttctctcttgggattaaagaattacaagactggatgacggatgcgattcacatgctggattcatactgccacccgacatccgacaaaagtgtgctggacagcaggacgctcaagctcgaggctctattatcagtcaaacaggaaaaagagattcagatgaaaatgatagtgaccaggggagaatctgtccttcagaatacttctccagaaggcattcccactattcagcagcagctgcagagtgtgaaggatatgtgggcatcccttttgtctgcagggattcgttgtaaaagggtgaggctcccctgtgcctatattgccctcaaactgagagtacatcagcatgcggagctgcgggataaaacaacgatgctcggaaaagccaaggaagccgtaaccaagtctgaaaaacttgtccgcctgcaccaagagtatcagagagacctaaaggcatttgaagtttggttggggcaagaacaagaaaagctcgaccagtattcagttcttgaaggtgatgcccacactcatgagacaacattgcgtgatcttcaggagctacaggtacactgtgcagaggggcaggccctgttgaactcagtgctgcacaccagagaggatgtgatcccatcaggtatcccacaggcagaggaccgggctttagagtctctccggcaagactggcaggcttaccagcacaggctgtccgagactcgaactcagttcaataacgtggtgaacaaattgaggctaatggagcaaaagtttcagcaagtagatgaatggctcaaaacagcagaggagaaagttagtcccaggaccagacgtcagtctaacagggcaaccaaggagatacaattacatcagatgaagaagtggcacgaagaagtgactgcatacagagatgaagttgaggaagtgggagctagagctcaggagatactggacgagagccacgtgaacagcagaatgggttgccaggccacccagctgacttccagataccaggccctgcttctccaagtgctggaacaaataaaattcctggaggaggagattcagagtttggaggaatcagaatcatccctcagttcctattctgattggtatggctctactcataaaaacttcaagaatgtggctaccaagattgacaaagtagatacagtaatgatggggaagaaattgaagacgttggaggttttgctcaaagacatggagaaaggtcacagtttgctgaaatcagcccgggagaaaggagagagggctgttaaatacttggaggaaggcgaggcagagaggttaagaaaggagattcatgatcacatggagcagttgaaggaactgaccagcactgtccggaaagaacacatgacgctggaaaaatcacttcaacaaacggtgctgtcccatgaaccatcagtaaagtcagtgagagagaagggtgaagctcttttggaactggtgcaggacgtcactttaaaggacaaaatagatcaacttcaaagtgattaccaggacctgtgcagcataggaaaggagcatgtcttcagtctggaggcgaaagtcaaagaccatgaagactacaacagtgagctccaagaggtcgaaaagtggctgctgcagatgtctggcagactggtggcacctgacctcctggagacaagcagcctggagacaatcacccagcaattggcccaccacaagatgtaccagagtttggaacacgaacttcagaagcacgtcagccgacaagacaccctgcagcagtgccaggcctggctttctgcagtccagccggatttagagccaagtcctcaaccacctcttagtagggcagaagccattaagcaggtcaaacacttcagagctttgcaagagcaggcaaggacctacctagatctcctttgctccatgtgtgacctgtcaaatgcttcggtgaaaaccacagcaaaagacattcaacaaacagagcaaacgattgaacaaaagcttgtccaggcccagaacttaactcagggctgggaagagatcaagcacctgaagtctgagctctggatttacctgcaagatgctgatcagcaactgcagaacatgaagaggaggcactctgagctggagctgaacattgcacagaacatggtttcacaagttaaggattttgttaagaaactacagagcaaacaggcatccgtgaacaccataatagaaaaggtgaataagttaacaaagaaggaggaatcgcctgaacacaaggaaataaatcatttaaatgatcagtggctcgatttgtgccgtcagtctaacaacctgtgcttgcaaagggaagaggatcttcagagaacaagagattaccatgactgtatgaatgttgttgaagtgttcctagaaaaatttactacagaatgggataacttggccagatctgatgcagagagtacagctgtccacctggaagctttgaaaaagttagcattggcattgcaggagagaaagtatgctattgaagatctgaaagatcaaaagcagaaaatgatagagcatctgaatttagatgacaaggagttagtcaaagaacagacgagtcatttagagcaacgttggtttcagcttgaggacctcattaaaaggaaaatccaagtgtcagtcaccaacttggaggagttaaatgtggtgcagtccagatttcaggagctaatggagtgggcagaagagcaacaacccaacatcgccgaggcccttaagcagagccctcctccagatatggctcagaaccttctcatggatcacctggccatctgcagtgaactggaggccaagcagatgctcctgaaatcgcttataaaggacgcagacagggtcatggcagatcttggtctcaatgagcgacaggtcatccagaaggctctctctgatgcacaaagccacgtgaattgtctcagtgacttagtgggccagcgaagaaagaagcattttaaggaagattttgataaagcttgccactggctaaaacaagcagatattgttacatttcctgaaatcaacctaatgaatgagagttctgagcttcatacacaactggctaaataccaaaacattcttgaacaatctccagaatatgaaaatcttctacttacgctgcagagaactgggcagaccatattaccatcgctgaatgaagtcgatcattcctacctcagtgaaaagctaaatgctttgcctcgacaatttaatgtaattgttgccttggctaaagacaagttctataaagtccaggaagcaattcttgctcggaaggaatatgcttccttgattgagttgacaacccagtctctgagtgaacttgaagcccaattcttgaggatgagcaaagttcccaccgacctggccgttgaggaggctctttctctgcaagatggttgcagagccattctggacgaggtggcgggccttggggaggcggtggatgaactgaaccagaaaaaagaaggttttcgcagcacaggtcagccttggcagccagacaagatgctgcaccttgtcaccttatatcacaggctgaagcgacaaacagaacagagggttagcttattagaagacaccaccagtgcttaccaagaacacgagaagatgtgccaacagctggagagacaactgaagtctgtaaaagaggagcagtccaaagtgaatgaggaaacgctgcctgcagaggagaagctcaaaatgtatcactccctggcaggaagtctccaggactcagggattgtactgaaacgagtaaccatacatcttgaagatcttgccccacaccttgaccccttggcttatgagaaagccaggcatcagatccagtcctggcaaggggagttaaaactgttgacttctgccattggtgagacggtgacagaatgtgagagccgaatggtgcagagtatagacttccagactgagatgagtcgctccctggactggctgaggagagtgaaggcagagctcagtgggccggtgtacctagacctcaacctgcaggacatccaagaggaaatcagaaaaatccaaattcatcaggaagaggtccagtccagcttgagaatcatgaatgcgctgagtcacaaggaaaaggagaagttcacaaaggccaaggagctgatttctgcggatttagaacacagcctcgctgagctctcagagctggatggagacatccaggaagccttacgcaccagacaggctaccttgactgaaatatatagccagtgtcaaaggtattatcaggtatttcaagcagccaatgactggcttgaggatgcccaagaattgttacagctggcaggcaatggcctagacgtggagagcgcagaggaaaatctcaaaagccacatggaatttttcagtacagaggatcagttccatagtaacctggaggagctccacagcctggtagccaccctggacccactcatcaagccaaccggcaaagaagacctagaacagaaagtggcttctctggaactcaggagccagaggatgagccgggactctggtgcccaagctttagtgtcagtggttaactctttccatgagaaaattgtggcccttgaggaaaaagcttcacaactggagaaaaccggaaatgatgccagcaaagccaccctgagcaggtcaatgaccaccgtctggcagcgctggacacgccttcgagctgtggcccaggaccaggagaagatcctggaagatgcagtggatgagtggacgggctttaacaacaaggttaaaaaggccactgaaatgattgatcagctgcaagataagttacctggaagttcagcagagaaagcatcgaaagcagagctcttaactcttcttgaataccacgacacgttcgttctggagctggagcagcagcagtcggccttgggcatgctgcggcagcaaaccctgagcatgctccaggatggagccgccccaacccctggggaagagcctccgctcatgcaggaaatcaccgccatgcaagatcggtgcctgaaaatggtggagactcagatcaattctgtgaaatgttgggttcaggaaacgaaagaatatttagggaatccaacaatagaaatagatgctcaacttgaagaacttcagattctcctaacagaagccacaaatcaccgacagaacattgaaaaaatggcagaagaacagaaggagaagtacttaggtctttataccatattaccttctgaactctcccttcagttggctgaagtggcgttagatctaaagatccgagatcagatccaagacaaaataaaagaagttgagcagagcaaggccacgagccaggaactcagccggcaaattcagaagttagctaaagacctcacaactattctaactaagctgaaagcgaagacagataatgtagttcaagctaaaactgaccaaaaggcagcatcacatttagaagaatacaatgaaatgcttgaattaattttgaagtggattgaaaaagctaaagtcttggctcatggaactattgcatggaattctgcaagccagcttcgggaacaatatattttgcatcagaccctgctagaagaatccaaagaaattgacagtgagctggaagcaatgactgagaaattacagtacctcactagcgtgtactgtacagaaaaaatgtctcagcaagtggcagaactgggacgggagactgaggagttgcgacagatgatcaaaattcgtttgcagaacctccaagatgcagctaaggatatgaaaaaatttgaagcagagttgaaaaagttacaagctgccttggagcaagcccaggcaacactgacttctccagaagttggacgtctcagtctcaaggagcagctctctcatcggcagcatttgttgtctgagatggagtcactgaagccgaaggtgcaagcagtgcagctctgccagagtgccctccggatccccgaggatgtggttgccagcttacctctctgtcatgctgctctgcggctgcaggaagaggccagccggctgcagcacaccgccatccagcagtgtaacatcatgcaggaagctgtggtacaatatgaacaatatgagcaagaaatgaaacatctccagcaactgatagaaggagctcacagagagattgaggataaacctgttgccaccagtaacatacaggagctgcaggctcagatttctcggcatgaggagctggcgcagaaaattaagggctaccaggagcagatcgcttctttgaattccaagtgcaagatgctgacgatgaaagccaagcacgccaccatgctgctgacggtgaccgaggtcgaggggctggcggaagggacagaggacctggatggggagctcctccccacgccttcggcccacccctctgtggtcatgatgactgcaggtcgctgtcacactttgctgtcaccggtcactgaggagtctggggaggagggaaccaacagtgagatttcctctccacctgcctgtcgctccccttcacctgtggctaatacagatgcttctgttaaccaggacattgcatattaccaagccttgtctgctgagaggttgcagacagatgctgcaaaaattcaccccagcacatccgcatcccaggagttctatgaaccgggattggagccatccgctactgccaaactgggtgatttgcagcgttcttgggaaaccttaaagaatgtgatcagtgagaagcagcgcacactctatgaagctttggaacgccagcagaagtaccaggactccctccagtccatctctacgaagatggaggccattgagctgaaactcagtgagagcccagagcctggcaggagtccagaaagccagatggctgaacatcaggcattgatggatgagattctcatgctccaggatgaaatcaatgagctccagtcctctctcgcagaggagctggtatccgagtcttgtgaggccgaccctgcggagcagctggccttgcagtccacgctcactgtcttagccgagcgaatgtccaccatcaggatgaaagcctcggggaaacggcagcttttggaggagaagttgaatgatcagctggaggaacaaaggcaggaacaggccctgcagaggtatcgctgtgaagccgatgagctggacagctggctcttgagtaccaaggccactctggacactgcgctgagtccacccaaggagcccatggacatggaggcccagcttatggactgccagaatatgctggtggaaatagagcagaaggtggtggctttatcagaactgtcagtccacaatgagaacctgctgctggagggcaaagctcacaccaaggacgaggccgagcagctggctggaaagctgagaaggctcaaggggagcctgctggagctgcagagagccctgcatgataagcagctcaacatgcagggaacagcacaggagaaggaggagagcgatgttgacctaacagccacgcagagccccggcgtccaggaatggctggcccaagctcgcaccacatggacccagcagcggcagagcagtctccagcaacaaaaagagttagaacaggaattagccgagcagaagagtctccttcgctcagtagccagtcgtggagaggagattctaattcaacattcggcggcagagacctctggtgatgctggcgaaaaacctgatgtgttatcccaggagttggggatggaaggggagaaatcatccgctgaagaccagatgagaatgaaatgggaaagcctacatcaagaatttagtaccaagcagaaactactacagaatgttctggaacaggaacaagagcaagtgctttatagcaggccaaatcgactcttgtctggtgtgccactgtacaaaggggacgtgccaacccaagataaatctgcagttacatctttgctggatggactgaaccaagccttcgaggaggtttcatcccagagtggaggggcaaagaggcagagtatacacttggagcagaagttgtatgatggagtctcagccacctctacttggttggatgacgttgaagaacgtttatttgttgccacagcacttttaccagaagaaacagagacttgtctcttcaaccaagagattcttgccaaagacattaaggaaatgtctgaagaaatggataagaacaaaaacttgttttcccaagcttttccagagaatggtgataatcgagatgttattgaagatactttgggttgtcttttgggcaggttatccttgctagactcagtagtgaatcaacgatgtcatcagatgaaagaaagacttcagcaaatactaaatttccagaatgatctgaaagtgctgtttacatcactggctgacaacaaatacatcattctgcaaaaactggcaaatgtgtttgaacagcccgtagcagaacaaatagaggcaatacaacaggctgaagatggactcaaagaatttgatgcaggaatcattgaattaaagaggcgtggtgacaagctacaggtcgagcagccgtccatgcaagaactctccaagctccaggacatgtatgatgagctgatgatgatcattggctcccggaggagtggtctgaatcagaaccttacactcaagagtcagtatgagagggccctacaagatctggctgacctgctagaaactggtcaggagaagatggcaggagaccagaaaatcatcgtgtcttccaaagaggaaatccagcaactacttgacaaacataaggaatactttcagggcctggaatctcatatgatcttgactgaaacactcttcagaaagataatcagctttgcagtccaaaaggaaacccagttccatacagagctgatggctcaggcttctgctgtactgaaacgggctcacaagaggggtgtggagctggagtacattctagagacgtggtcccatctggatgaggaccagcaggagctcagcagacagctggaggtggtggaaagcagcatcccaagcgtgggtctggtggaggagaacgaggacaggcttattgaccgcataacactctaccagcatttaaaatctagccttaatgaataccagcccaaattatatcaagtattagatgatgggaaacgacttctgatatccatcagctgctcagatctagaaagccaactaaatcaacttggagagtgctggctaagtaacaccaataaaatgtctaaggaacttcacagactggaaacaatattgaaacactggaccagatatcaaagtgaatctgcagatctaattcactggttacaatctgcaaaagaccggctagaattttggactcagcaatctgtgacagtcccacaagagctggaaatggtccgtgatcatctaaatgctttcctggagttttctaaagaagtggatgcccaatcttccctgaaatcatctgttctgagtactggaaatcagctccttcgactaaaaaaggtggacacagccacgctgcgctctgagctgtcgcgcattgatagccagtggactgacctgctaaccaatatcccagccgtccaggagaagctccaccagctccagatggataaactgccttcccgccatgccatttctgaagtcatgagttggatttctctaatggaaaatgttattcagaaggatgaagataatattaaaaattccataggttacaaggcaattcatgaataccttcagaaatataagggttttaagatagacattaactgtaaacagctgacagtggattttgtgaaccagtccgtgctacaaatcagcagtcaggatgtggaaagtaagcgtagtgataagactgattttgctgagcaacttggagcaatgaataaaagttggcaaattctgcaaggtctagtaactgagaagatccagctgttggaaggcttattggaatcttggtcagaatatgaaaataatgtacaatgtctgaaaacatggtttgaaacccaggaaaagagactaaaacaacagcatcgaattggagatcaggcttctgttcaaaatgcactgaaagactgtcaggatctggaagatttgattaaagcaaaagaaaaagaagtagagaaaattgagcagaatggacttgctttgattcagaacaagaaagaagacgtctctagcattgtcatgagcacactgcgagagctcggccaaacctgggcaaatttagatcacatggttggacaattaaagatactgctgaaatcagtgcttgaccaatggagtagtcacaaagtggcctttgacaagataaacagttacctcatggaggccagatactctctttcccgattccgtctgctgactggctccttagaagctgtgcaagttcaggtggacaatcttcagaatctccaagatgatctggaaaaacaggaaaggagcttacagaaatttggctctatcaccaaccaattattaaaagagtgtcacccacccgtgacagaaactcttaccaatacactgaaagaagtcaacatgagatggaataacttgctggaagagattgctgagcagctacagtccagcaaggccctacttcagctttggcaaagatacaaggactactccaaacagtgtgcttcgacagttcagcagcaggaggatcgaaccaatgagctgttgaaggcagccacaaacaaggacattgccgatgatgaggttgccacatggattcaagattgcaacgacctcctcaaaggactgggcacagttaaagattccctcttttttctccatgagctgggagagcaactgaagcaacaagtggatgcttccgcagcatcagctattcaatcggatcaactctctttgagtcaacacttgtgtgccctggagcaagctctctgcaaacagcagacttcattacaggctggagttcttgattatgaaacctttgccaagagtttagaagctttggaggcctggatagtggaagctgaagaaatactacaagggcaggaccctagccactcatctgacctctccacaatccaggaaaggatggaagaacttaagggacagatgttaaaattcagcagcatggctccagatttagaccgtctaaatgagcttggatataggttacccttgaatgataaggaaatcaaaagaatgcagaatctgaaccgccattggtctctgatctcctctcagactacagaaagattcagcaagttgcagtcatttttgctacaacatcagactttcttggaaaaatgtgaaacatggatggaattcctagttcagacagaacaaaagttagcagtagagatttcaggaaattatcagcaccttttggaacagcagagagcacacgagttgtttcaagccgagatgttcagtcgtcagcagattttgcactcaatcattattgatgggcaacgtcttctagaacaaggtcaagttgatgacagggatgaattcaacctgaaattgacactcctcagtaatcaatggcagggagtgattcgcagggcccagcagaggcgggggatcattgacagccagattcgccagtggcagcgctatagggagatggcagaaaagcttcgtaaatggttggttgaagtgtcctacctccccatgagtggtctcggaagtgttcctataccactgcaacaagcaaggaccctctttgatgaagtgcagttcaaagaaaaagtgtttctgcggcaacaaggcagctacatcctgactgtggaggctggcaagcaactccttctctcggcggacagtggcgctgaggccgccttgcaggccgaactcgctgaaatccaagagaaatggaaatcagccagcatgcggctggaagaacagaagaaaaaactagccttcttgttgaaagactgggaaaaatgtgagaaaggaatagcagattccctggagaaactacgaactttcaaaaagaagctttcgcagtctctcccggatcaccatgaagagctccatgcagaacaaatgcgttgcaaggaattagaaaatgcagttgggagctggacagatgacttgacccagttgagcctgctgaaggacaccctctctgcctatatcagtgctgatgatatctccattcttaatgaacgcgtagagcttctgcaaaggcagtgggaagaactatgccaccagctctccttaaggcggcagcaaataggtgaaagattgaatgaatgggcagtcttcagtgaaaagaacaaggaactctgtgagtggttgactcaaatggaaagcaaagtttctcagaatggagacattctcattgaagaaatgatagagaagctcaagaaggattatcaagaggaaattgctattgctcaagagaacaaaatacagctccaacaaatgggagaacgacttgctaaagccagccatgaaagcaaagcatctgagattgaatacaagctgggaaaggtcaacgaccggtggcagcatctcctggacctcattgcagccagggtgaagaagctgaaggagaccctggtagccgtgcagcagcttgataagaacatgagcagcctgaggacctggctcgctcacatcgagtcagagctggccaagccaatagtctacgattcctgtaactcggaagaaatacagagaaagcttaatgagcagcaggagcttcagagagacatagagaagcacagtacaggtgttgcatctgtcctcaacctgtgtgaagtcctgctgcacgactgtgacgcctgtgccactgatgccgagtgtgactctatacagcaggctacgagaaacctggaccggcggtggagaaacatttgtgctatgtccatggaaaggaggctgaaaatcgaagagacgtggcgattgtggcagaaatttctggatgactattcacgttttgaagattggctgaagtcttcagaaaggacagctgcttttcccagctcttctggggtgatctatacagttgccaaggaagaactaaagaaatttgaggctttccagcgacaggtccacgagtgcctgacgcagctggaactgatcaacaagcagtaccgccgcctggccagggagaaccgcactgattcagcatgtagcctcaaacagatggttcacgaaggcaaccagagatgggacaacctgcaaaagcgtgtcacctccatcttgcgcagactcaagcattttattggccagcgtgaggagtttgagactgcgcgggacagcattctggtctggctcacagagatggatctgcagctcactaatattgaacatttttctgagtgtgatgttcaagctaaaataaagcaactcaaggccttccagcaggaaatttcactgaaccacaataagattgagcagataattgcccaaggagaacagctgatagaaaagagtgagcccttggatgcagcgatcatcgaggaggaactagatgagctccgacggtactgccaggaggtcttcgggcgtgtggaaagataccataagaaactgatccgcctgcctctcccagacgatgagcacgacctctcagacagggagctggagctggaagactctgcagctctgtcggacctgcactggcacgaccgctctgcagacagcctgctttctccacagccttcctccaatctctccctctcgctcgctcagcccctccggagcgagcggtcaggacgagacaccccggctagtgtggactccatccccctggagtgggatcacgactatgacctcagtcgggacctggagtctgcaatgtccagagctctgccctctgaggatgaagaaggtcaggatgacaaagatttctacctccggggagctgttggcttatcaggggaccacagtgccctagagtcacagatccgacaactgggcaaagccctggatgatagccgttttcagatacagcaaaccgaaaatatcattcgcagcaaaactcccacggggccggagctagacaccagctacaaaggctacatgaaactgctgggcgaatgcagtagcagtatagactccgtgaagagactggagcacaaactgaaggaggaagaggagagccttcctggctttgttaacctgcatagtaccgaaacccaaacggctggtgtgattgaccgatgggagcttctccaggcccaggcattgagcaaggagttgaggatgaagcagaacctccagaagtggcagcagtttaactcagacttgaacagcatctgggcctggctgggggacacggaggaggagttggaacagctccagcgtctggaactcagcactgacatccagaccatcgagctccagatcaaaaagctcaaggagctccagaaagctgtggaccaccgcaaagccatcatcctctccatcaatctctgcagccctgagttcacccaggctgacagcaaggagagccgggacctgcaggatcgcttgtcgcagatgaatgggcgctgggaccgagtgtgctctctgctggaggagtggcggggcctgctgcaggatgccctgatgcagtgccagggtttccatgaaatgagccatggtttgcttcttatgctggagaacattgacagaaggaaaaatgaaattgtccctattgattctaaccttgatgcagagatacttcaggaccatcacaaacagcttatgcaaataaagcatgagctgttggaatcccaactcagagtagcctctttgcaagacatgtcttgccaactactggtgaatgctgaaggaacagactgtttagaagccaaagaaaaagtccatgttattggaaatcggctcaaacttctcttgaaggaggtcagtcgtcatatcaaggaactggagaagttattagacgtgtcaagtagtcagcaggatttgtcttcctggtcttctgctgatgaactggacacctcagggtctgtgagtcccacatcaggaaggagcaccccaaacagacagaaaacgccacgaggcaagtgtagtctctcacagcctggaccctctgtcagcagtccacatagcaggtccacaaaaggtggctccgattcctccctttctgagccagggccaggtcggtccggccgcggcttcctgttcagagtcctccgagcagctcttccccttcagcttctcctgctcctcctcatcgggcttgcctgccttgtaccaatgtcagaggaagactacagctgtgccctctccaacaactttgcccggtcattccaccccatgctcagatacacgaatggccctcctccactctgaactaagcagatgccatctgcagaagtgctggtagcataaggaggatcgggtcataagcaatcccaaactaccaacaagaggaccttgatcttggcgaaagccctcggtgtggcagctttagccctcctccagatcacatgtgtgcaaattatggcttcagaggtggaagataaacagtgacgggggaacaaacagacaacaagaaggtttggaagaaatctggtttgagactctgaaccttagcactaaggagattgagtaaggacctccaaagttccccggactcatgaattctgggcccttggcccattctgtgcacagccaaggacttcagtagaccatctgggcagctttcccatggtgctgctccaaccatcagataaatgaccctcccaagcaccatgtcagtgtcgtacaatctaccaaccaaccagtgctgaagagattttagaaccttgtaacatacaatttttaagagcttatatggcagcttcctttttaccttgttttcctttggggcatgatgttttaacctttgctttagaagcacaagctgtaaatctaaaaggcacttttttttagaggtataaagaaaaactagatgtaataaataagatcatggaaggctttatgtgaaaaaagttgaatgttatagtaaaaaaaaaaagatatttatgtatgtacagtttgctaaagccaagttttgtttgtattgatttctttgcatttattatagatattataaaata

SEQ ID NO: 257470 - DNA, 27748 bp, Artificial Sequence
  derived and/or modified sequence
cccgggcagtggaaaccgtgggcaaaagttagctggcaggacagcgcagctcctccaggcagcggaggcagcgcgtcccggctctcagggacatttccttcccacctcgacccccgggaggtggtcccggtataaaggctcgctgagcgggtgggtcacagcacagctttgcagctgcggagaaacgcccaaggccgtgcatctccaggagggcggctgggctcccgcagtcctgcagaccgcgcccgatcccggcgacagggcgggcggacagccgcgcatccccggggtcccgccgagcctgggcgcagagagccgggaggaagcgttcgctcgcttcgccttgctgctgggaaactgaacgaggccgagagagaaggttcttgagttcatgtaagaggacagtcttaaaacggaagaagaaaaagaagcagttcagtctttgggagagctgcctccttgttgagtgctgcaaaggcctggaattcatttatgacagaatagatctagaaaagtccaagcatgttttctagagtggtgtagccctgtgctgcctccagtgaagagtctcttggtgttggcttcgtgcttccggagggaccatggcaacctccagaggggcctcccggtgtcctcgggatatcgccaatgtgatgcagaggctgcaagatgagcaagagatagtacaaaaacgaactttcacaaaatggatcaactctcatctggccaagcggaaacctccaatggtggtggacgatctttttgaagacatgaaagatggtgttaaactgcttgcccttctggaggtcctgtctgggcagaaactgccttgtgaacaaggacgccggatgaagcgaatccatgctgtggctaacattggcacggcactcaagttcctcgaaggaagaaagattaaattagtcaacattaactccaccgatatagctgatggccgaccctcaatagttcttggattgatgtggaccattattctatatttccagattgaagagttgaccagcaacctgccccagctccagtctttgtccagcagcgcatcctccgtggacagcatagttagctctgagactcccagcccaccaagtaaacggaaggtgaccaccaagatccaaggaaatgctaagaaggctttattaaagtgggttcagtacacagctggcaagcagactggaatagaagtaaaagattttgggaagagttggagaagcggggttgcctttcattcagttattcatgccattcgaccggaattggtggacttggagacagtgaaaggcagatccaaccgagaaaatttggaggatgctttcactatcgccgaaacagaactggggatcccaagactgctagatcctgaagacgttgatgtggataaaccagatgagaaatctattatgacctatgtagcccagtttctgaaacattatcctgacatccacaatgcaagcactgatgggcaagaggatgatgaaatacttccaggtttcccatcttttgcaaattctgtacaaaattttaagagagaagacagagtaatttttaaggaaatgaaagtttggatagaacaatttgagagagatttgacaagagcacagatggtggaatcaaatttacaggataaatatcagtcatttaagcacttcagagttcaatatgaaatgaagaggaaacagattgaacatttaatacaaccattacacagagacggtaaattgtcacttgaccaagcattggtaaaacaatcttgggatagagtgacctccaggctctttgactggcatatacagcttgataaatctcttcctgcacctctgggcaccataggtgcctggctgtacagagcggaggtggccctgagagaggaaataaccgttcaacaggtccacgaggaaacagcaaacacgatacaacggaaacttgagcaacataaggatctgcttcaaaacacggatgcccacaaaagagcattccatgaaatctaccggaccaggtctgttaacgggattccagtgccacctgatcaattagaggacatggccgagaggtttcattttgtttcctccacatcagagctacacctaatgaaaatggaatttttagaattaaagtaccgtctgctctcactgctggttcttgcagagtcaaagctgaagtcttggatcattaagtacgggaggagagagtcagtggagcagcttctacaaaactacgtgtcttttatagaaaatagcaagttctttgaacaatatgaggtgacataccagatcttgaaacagacagctgagatgtatgtcaaagcagatggttcagtggaagaagctgagaatgtgatgaaattcatgaatgaaaccaccgctcagtggaggaatctctcagtagaagtgaggagtgtgaggagcatgctggaagaagtgatctctaactgggatcgctatggcaatacagtggctagtctgcaagcctggctagaggatgctgaaaaaatgctcaatcaatcagaaaatgccaaaaaggatttttttcgaaatttacctcattggattcagcagcatactgccatgaacgatgctggcaattttctaattgaaacctgtgatgagatggtttcccgtgacctgaagcagcaattactgttgctaaatgggcggtggagggagttgtttatggaagtcaagcaatatgctcaagctgatgagatggacagaatgaagaaggaatacacagactgtgttgttaccctgtctgcttttgcaacggaagcccataagaaactttctgaacccttagaagtctcttttatgaatgtcaagctattaattcaagacttggaggatattgagcagagggtgcctgtgatggatgcccaatacaagataattacaaagacagcacacctcattaccaaagaaagcccccaagaagaaggaaaagaaatgtttgcgaccatgtcaaagctcaaagagcagctaaccaaggtcaaagaatgttactccccactcctttatgagtctcagcagctgttgattccgttggaggaattagaaaagcagatgacgtccttttatgactcacttgggaaaatcaatgaaattatcacagttcttgagcgtgaggcacaatcgagtgccctttttaaacaaaaacatcaggaactgttagcttgtcaagaaaactgtaagaaaaccttgacacttattgagaaaggcagtcaaagtgttcaaaagtttgtgaccttgagcaacgtgttaaagcattttgatcagacgaggctacaaagacagattgcagatattcatgttgcttttcagagtatggtaaagaaaactggagattggaagaagcatgtggaaaccaacagtcgcttgatgaagaagtttgaggagtctcgagcagagttggagaaggtactgcggattgctcaggagggcctggaggaaaagggggatccagaggagctcctgcggagacacactgagtttttcagtcagctggatcagagggtgctcaatgctttcctgaaagcttgtgatgaactcaccgacatccttccagagcaggagcagcaggggctgcaggaagctgttcgaaagctccacaaacaatggaaggatcttcaaggagaagccccttatcatttgcttcatctgaagattgatgtggagaagaataggttcttagcctctgtagaagaatgcagaactgagctggatcgagagaccaagctgatgccccaggaaggcagtgaaaagataattaaagagcacagggttttcttcagtgacaaaggtcctcatcatctctgtgagaaaaggttacagctcatcgaggaactctgtgtgaaactcccagtgcgggacccagtaagggacacacctggaacctgtcacgtgactctcaaagagctcagagctgccattgacagcacctacaggaagctcatggaagacccagacaagtggaaggactacactagcagattctctgagttctcatcttggatatctacaaatgagacacaattaaaggggatcaagggtgaggccatcgatactgccaaccacggagaggttaaacgtgccgttgaagagatcagaaatggtgttaccaaaaggggtgagaccctcagctggctgaaatccaggctgaaagttttgacagaagtttcttctgagaatgaagcccaaaagcagggagatgagctggcaaaattatccagctctttcaaggctcttgtgacgctgctgtcagaggttgaaaagatgctaagcaattttggggactgtgtccagtacaaagaaatagtcaaaaattctctcgaagaattaatttctggctctaaagaagtccaggaacaagctgagaagatcttggatactgaaaatctgtttgaagcacagcagttacttcttcatcaccagcaaaagacaaagcggatctcagcaaagaagagagatgtgcagcagcagatcgcgcaggcgcagcagggagaaggggggctgcctgaccgaggccacgaggagctgcggaagctggagagcacactggatggcctggagcgcagccgggagaggcaggaacgccgcatccaggtcacattaagaaaatgggagcgatttgaaacaaacaaagaaacagtagtaagatacctttttcaaacaggttccagtcatgaacgcttcttgagttttagcagtttggaaagtttatcttcagaactggaacaaacaaaggagttttctaaacggacagaaagtattgcagtccaggctgagaaccttgtaaaggaagcttcagagataccgcttgggccccaaaataagcagctgcttcaacagcaggccaagtcaatcaaagaacaagtcaaaaaattagaagacacgcttgaagaagatattaaaaccatggaaatggtgaaaaccaagtgggatcattttggcagtaattttgagactctgtccgtctggataactgagaaagaaaaagaactcaatgccttggaaacttcgtcatctgccatggacatgcaaatcagccaaattaaggtcacaattcaggaaatagaaagtaagctcagcagcattgtaggattagaagaagaagcccagtcttttgctcagtttgttaccactggagaatctgctcgaattaaagccaagttgacacaaataagaagatacggggaagagcttcgagagcatgcacagtgtctggaaggaacaatcctgggacatttatctcagcagcaaaagtttgaagagaaccttagaaagatccagcaatctgtgtctgaatttgaagataaacttgctgttccaattaaaatatgttcttcagctacagaaacatacaaagttcttcaagaacatatggatctctgccaggccctggagtcactgagcagcgcgatcactgccttctcagccagtgccaggaaggttgtgaacagagattcctgtgttcaggaggctgcggctctacagcagcaatacgaggacatcctaaggagggcgaaggagagacagacggcgctggagaatctgctggcccactggcagaggctagagaaagaactatcatcctttttgacctggttagagcggggtgaagctaaagccagttccccagaaatggacatttctgcagacagagtcaaagtggaaggtgaacttcagttaatacaggcactgcaaaatgaagttgtatcccaggcctcattctatagcaaacttttgcaattgaaggaatcattgttctcagtagcctccaaagatgatgtgaaaatgatgaaactacatttggagcagttggatgagagatggagagatttaccacagatcattaacaaaaggattaattttcttcagtctgtggttgctgaacaccagcaatttgatgagctgctgctttccttttctgtctggattaaactgtttctcagtgaattacaaactacctctgagattagcataatggaccatcaagtagcccttactcggcataaggaccacgcagcagaagtagagagcaaaaagggcgaattgcagagtctgcagggtcacttagcaaagttgggttctctgggccgtgctgaggacctccacctcctgcagggaaaggctgaggactgcttccagctgtttgaggaggccagccaggttgtggagaggcggcagcttgccctgtcccatttggcagaattcctccagagccatgcctctctgtccggcattctccgccagctgaggcaaacagtggaagcaaccaacagtatgaataagaacgagtctgatttgatagaaaaggacctcaatgatgctcttcaaaatgctaaagcattagaatctgctgccgtcagtctggatggcattctttccaaagcccaataccatctgaaaatcgggagctctgagcaaaggacttcctgcagagccacggctgatcagctctgtggagaggtagagaggatccagaaccttctgggaaccaagcagagtgaggcagatgctctggcagtgttgaaaaaagcattccaagaccagaaagaggagcttctgaaaagcattgaggacattgaagaaaggactgacaaagagcgattgaaagaacctacccgccaagctcttcagcagaggttaagagtgtttaatcagctagaagatgaattgaattctcacgagcatgaactatgttggttgaaagacaaagccaagcaaattgcccagaaagatgtagcttttgcacctgaagttgacagggagataaaccgcttagaggtcacctgggatgataccaaaagactaattcatgaaaatcagggtcagtgctgtggacttattgacttaatgagagaatatcagaacctgaaatcagctgtatctaaagtcttagaaaatgccagcagtgtgattgtaaccagaactaccataaaagatcaggaggatcttaaatgggctttttccaagcatgaaactgccaagaacaaaatgaattacaaacagaaagacttggataactttaccagcaaaggaaaacacttgttatctgagctgaagaaaattcacagtagtgatttcagcttggtgaaaacagacatggagagcaccgtggacaaatggctggatgtatcagagaaacttgaagaaaacatggataggctgagagtaagcctgtccatttgggatgatgtactgtcaactagagatgagattgagggatggtcaaacaactgcgttccacagatggcagaaaacatcagcaacctggataaccacctcagagctgaagaactgcttaaagaatttgagtctgaagttaaaaacaaagcattgagattggaagaactgcattccaaagttaatgatctgaaagaattaactaaaaatctagaaacaccgccagaccttcagtttatagaagcagacttaatgcagaaactggagcatgccaaagaaataactgaagtagcaaaaggaaccctgaaggatttcacggctcaaagtacacaagtggagaagtttattaatgacataacaacatggttcacaaaagtggaagaatcgttgatgaactgtgcccaaaatgagacttgtgaagcattgaaaaaagtcaaggatatacaaaaagaacttcaaagtcaacaaagcaacatcagctctacccaagaaaatctcaatagcttgtgccgcaagtaccactcagctgagttggagagcctgggccgtgcaatgactggtctgataaagaaacatgaagccgtgagccagttgtgctccaaaacccaggccagcctgcaggaatctctggaaaaacacttcagtgagtctatgcaggaattccaagaatggtttttgggagcaaaggcagcagcaaaagaatcatcagatcgcaccggtgacagcaaagttctagaagcaaagctccatgatcttcagaacattttggactcagtcagtgatgggcagagcaaacttgatgcagtgactcaagaaggacaaactttgtatgcacatttgtctaaacaaattgtcagtagcattcaagaacaaatcacaaaggccaatgaagagtttcaagcatttctgaaacaatgccttaaagataagcaggctcttcaagactgtgcttcagaacttggaagctttgaagatcagcacagaaaactgaacttatggatccatgaaatggaagaaaggttcaatacggaaaacttgggagagagtaaacagcacattcctgagaagaaaaatgaagttcataaagttgaaatgtttttgggagaactgctggctgcaagagagtctcttgataagctttcccagagagggcagcttctgagtgaagaaggccacggtgctgggcaggagggccgcctgtgttcccagctcctcacaagccaccagaacctacttagaatgaccaaagagaaactccggagctgccaggtggcccttcaggagcacgaagccctggaggaagcactgcaaagcatgtggttctgggtgaaggccattcaggacagactggcctgtgcagagagcactcttgggagcaaagacaccctggagaaacggctgtcacaaatacaggatattctcctgatgaaaggtgaaggggaagttaagttgaatatggccattggcaagggggaacaggccttgagaagtagcaacaaagaaggtcagagggtgattcagactcagttagagacccttaaagaagtgtgggctgacatcatgagctcctccgtccacgctcaaagcactttagagtctgtgattagccaatggaatgactatgtagagaggaaaaaccagttggagcagtggatggaatcagtggatcaaaaaatagaacatcccttacaaccacagccaggtctgaaagagaagttcgtcctgcttgaccacctccagtccatcctgtctgaggcagaagatcacacgagagcccttcaccgtctaattgcgaagtccagggagctctacgaaaagacagaggatgagtctttcaaggacacagctcaagaggagctgaaaacacagtttaatgatataatgactgttgccaaggaaaaaatgaggaaagtggaagagattgtgaaagatcatctaatgtatttagatgcggtccacgagttcacagattggctccattcagcaaaggaagaacttcaccggtggtcagatatgtctggagattcatcagccacccagaaaaagttatcaaaaattaaggagctgatagattccagagagattggtgcaagccgtctcagcagagtggagtcgctggctcccgaagtgaaacagaacacaactgccagtgggtgtgagctcatgcacacggagatgcaggccctgcgtgccgactggaagcagtgggaagacagtgtattccaaacgcagagctgtttggagaacctggtcagccagatggccctttcggagcaggaattctcaggccaagtggctcaactggagcaggccctggaacagttcagtgcccttctgaaaacctgggctcagcagttaaccctcctggaaggcaagaacacggatgaggagatagtggaatgctggcacaaaggacaagagatactggatgctttgcaaaaagcagagcctagaacagaggatctcaagtctcagctgaatgaactttgtcgattttccagagacctgagtacctacagtggaaaagtttctggcttgattaaagagtataattgtctttgtttgcaagcatccaagggctgccagaataaagaacagattttacagcaaagatttcgaaaggccttcagggatttccagcagtggttggttaatgcaaaaatcactaccgccaagtgttttgatatacctcaaaatataagtgaagtttcaactagtcttcagaaaatacaggagtttttgtcagaaagtgaaaatggacagcacaagctaaacatgatgctgtctaaaggggaacttctgagtaccctgctgaccaaagagaaagcgaaagggatccaggccaaagttacagctgcaaaagaagattggaaaaattttcattcaaatctccaccaaaaagaatctgctctagagaatctaaagatccaaatgaaggactttgaagtaagtgctgagcctatccaggactggctgagtaaaactgagaagatggtccatgaaagcagcaatcgcctctatgatctgccagcaaagaggagggagcagcagaagctccagtctgtccttgaggaaatacactgctacgagcctcagctcaacaggctgaaagagaaagctcagcagctgtgggaaggacaagctgccagcaagagctttaggcacagagtgtcgcagctgtcttctcagtatctagcgctaagcaatttaacaaaggagaaagtgtcaagactggatagaatcgttgcagaacacaatcagttctctcttgggattaaagaattacaagactggatgacggatgcgattcacatgctggattcatactgccacccgacatccgacaaaagtgtgctggacagcaggacgctcaagctcgaggctctattatcagtcaaacaggaaaaagagattcagatgaaaatgatagtgaccaggggagaatctgtccttcagaatacttctccagaaggcattcccactattcagcagcagctgcagagtgtgaaggatatgtgggcatcccttttgtctgcagggattcgttgtaaaagccaactcgaaggagctctctccaagtggacaagttatcaggatggcgttcgacagttctccggttggatggatagtatggaagccaacctgaatgaatcagaaaggcagcatgcggagctgcgggataaaacaacgatgctcggaaaagccaagttattaaatgaagaagtgctgagttacagcagcttgctggagaccatcgaagtcaaaggggctggcatgacagaacactatgtcacccagctagaactccaggatctacaggaacgatacagagccatccaagagagggccaaggaagccgtaaccaagtctgaaaaacttgtccgcctgcaccaagagtatcagagagacctaaaggcatttgaagtttggttggggcaagaacaagaaaagctcgaccagtattcagttcttgaaggtgatgcccacactcatgagacaacattgcgtgatcttcaggagctacaggtacactgtgcagaggggcaggccctgttgaactcagtgctgcacaccagagaggatgtgatcccatcaggtatcccacaggcagaggaccgggctttagagtctctccggcaagactggcaggcttaccagcacaggctgtccgagactcgaactcagttcaataacgtggtgaacaaattgaggctaatggagcaaaagtttcagcaagtagatgaatggctcaaaacagcagaggagaaagttagtcccaggaccagacgtcagtctaacagggcaaccaaggagatacaattacatcagatgaagaagtggcacgaagaagtgactgcatacagagatgaagttgaggaagtgggagctagagctcaggagatactggacgagagccacgtgaacagcagaatgggttgccaggccacccagctgacttccagataccaggccctgcttctccaagtgctggaacaaataaaattcctggaggaggagattcagagtttggaggaatcagaatcatccctcagttcctattctgattggtatggctctactcataaaaacttcaagaatgtggctaccaagattgacaaagtagatacagtaatgatggggaagaaattgaagacgttggaggttttgctcaaagacatggagaaaggtcacagtttgctgaaatcagcccgggagaaaggagagagggctgttaaatacttggaggaaggcgaggcagagaggttaagaaaggagattcatgatcacatggagcagttgaaggaactgaccagcactgtccggaaagaacacatgacgctggaaaaaggtcttcatttagcaaaggaattctcagataaatgcaaagcactgacacagtggatagcagaataccaggaaattctacatgttcctgaagaacccaaaatggaattatatgagaaaaaagctcagttatctaaatacaagtcacttcaacaaacggtgctgtcccatgaaccatcagtaaagtcagtgagagagaagggtgaagctcttttggaactggtgcaggacgtcactttaaaggacaaaatagatcaacttcaaagtgattaccaggacctgtgcagcataggaaaggagcatgtcttcagtctggaggcgaaagtcaaagaccatgaagactacaacagtgagctccaagaggtcgaaaagtggctgctgcagatgtctggcagactggtggcacctgacctcctggagacaagcagcctggagacaatcacccagcaattggcccaccacaaggcaatgatggaagaaattgctggttttgaagaccgtttgaacaatcttcaaatgaaaggtgatactttgattggccaatgtgcagaccacctgcaagcgaaacttaaacaaaacgtgcatgctcatctgcagggcacaaaggacagctactcagcgatctgcagcacagctcagaggatgtaccagagtttggaacacgaacttcagaagcacgtcagccgacaagacaccctgcagcagtgccaggcctggctttctgcagtccagccggatttagagccaagtcctcaaccacctcttagtagggcagaagccattaagcaggtcaaacacttcagagctttgcaagagcaggcaaggacctacctagatctcctttgctccatgtgtgacctgtcaaatgcttcggtgaaaaccacagcaaaagacattcaacaaacagagcaaacgattgaacaaaagcttgtccaggcccagaacttaactcagggctgggaagagatcaagcacctgaagtctgagctctggatttacctgcaagatgctgatcagcaactgcagaacatgaagaggaggcactctgagctggagctgaacattgcacagaacatggtttcacaagttaaggattttgttaagaaactacagagcaaacaggcatccgtgaacaccataatagaaaaggtgaataagttaacaaagaaggaggaatcgcctgaacacaaggaaataaatcatttaaatgatcagtggctcgatttgtgccgtcagtctaacaacctgtgcttgcaaagggaagaggatcttcagagaacaagagattaccatgactgtatgaatgttgttgaagtgttcctagaaaaatttactacagaatgggataacttggccagatctgatgcagagagtacagctgtccacctggaagctttgaaaaagttagcattggcattgcaggagagaaagtatgctattgaagatctgaaagatcaaaagcagaaaatgatagagcatctgaatttagatgacaaggagttagtcaaagaacagacgagtcatttagagcaacgttggtttcagcttgaggacctcattaaaaggaaaatccaagtgtcagtcaccaacttggaggagttaaatgtggtgcagtccagatttcaggagctaatggagtgggcagaagagcaacaacccaacatcgccgaggcccttaagcagagccctcctccagatatggctcagaaccttctcatggatcacctggccatctgcagtgaactggaggccaagcagatgctcctgaaatcgcttataaaggacgcagacagggtcatggcagatcttggtctcaatgagcgacaggtcatccagaaggctctctctgatgcacaaagccacgtgaattgtctcagtgacttagtgggccagcgaagaaagtacttaaacaaagccttgtccgagaaaacccagtttctcatggcagtgttccaggccaccagccaaattcagcaacatgagcgaaagataatgttccgtgaacacatctgtctgttaccagatgatgtgagcaaacaagtcaaaacatgtaagagtgcacaagccagcctcaagacttaccaaaatgaagtcactggactttgggcccagggtcgcgaactaatgaaggaagtcacagagcaggaaaagagtgaagtgctggggaagcttcaggaattgcagagtgtctatgacagtgttttacaaaagtgcagtcaccggttacaagaactagagaagaatttggtttctaggaagcattttaaggaagattttgataaagcttgccactggctaaaacaagcagatattgttacatttcctgaaatcaacctaatgaatgagagttctgagcttcatacacaactggctaaataccaaaacattcttgaacaatctccagaatatgaaaatcttctacttacgctgcagagaactgggcagaccatattaccatcgctgaatgaagtcgatcattcctacctcagtgaaaagctaaatgctttgcctcgacaatttaatgtaattgttgccttggctaaagacaagttctataaagtccaggaagcaattcttgctcggaaggaatatgcttccttgattgagttgacaacccagtctctgagtgaacttgaagcccaattcttgaggatgagcaaagttcccaccgacctggccgttgaggaggctctttctctgcaagatggttgcagagccattctggacgaggtggcgggccttggggaggcggtggatgaactgaaccagaaaaaagaaggttttcgcagcacaggtcagccttggcagccagacaagatgctgcaccttgtcaccttatatcacaggctgaagcgacaaacagaacagagggttagcttattagaagacaccaccagtgcttaccaagaacacgagaagatgtgccaacagctggagagacaactgaagtctgtaaaagaggagcagtccaaagtgaatgaggaaacgctgcctgcagaggagaagctcaaaatgtatcactccctggcaggaagtctccaggactcagggattgtactgaaacgagtaaccatacatcttgaagatcttgccccacaccttgaccccttggcttatgagaaagccaggcatcagatccagtcctggcaaggggagttaaaactgttgacttctgccattggtgagacggtgacagaatgtgagagccgaatggtgcagagtatagacttccagactgagatgagtcgctccctggactggctgaggagagtgaaggcagagctcagtgggccggtgtacctagacctcaacctgcaggacatccaagaggaaatcagaaaaatccaaattcatcaggaagaggtccagtccagcttgagaatcatgaatgcgctgagtcacaaggaaaaggagaagttcacaaaggccaaggagctgatttctgcggatttagaacacagcctcgctgagctctcagagctggatggagacatccaggaagccttacgcaccagacaggctaccttgactgaaatatatagccagtgtcaaaggtattatcaggtatttcaagcagccaatgactggcttgaggatgcccaagaattgttacagctggcaggcaatggcctagacgtggagagcgcagaggaaaatctcaaaagccacatggaatttttcagtacagaggatcagttccatagtaacctggaggagctccacagcctggtagccaccctggacccactcatcaagccaaccggcaaagaagacctagaacagaaagtggcttctctggaactcaggagccagaggatgagccgggactctggtgcccaagtggatctcttgcagagatgcacagctcaatggcacgattaccagaaagcaagggaagaggttattgaattgatgaatgatacagaaaagaaattgtctgagttttctttgttgaagacttcgtctagtcatgaagcggaagaaaaattgtcagaacacaaggctttagtgtcagtggttaactctttccatgagaaaattgtggcccttgaggaaaaagcttcacaactggagaaaaccggaaatgatgccagcaaagccaccctgagcaggtcaatgaccaccgtctggcagcgctggacacgccttcgagctgtggcccaggaccaggagaagatcctggaagatgcagtggatgagtggacgggctttaacaacaaggttaaaaaggccactgaaatgattgatcagctgcaagataagttacctggaagttcagcagagaaagcatcgaaagcagagctcttaactcttcttgaataccacgacacgttcgttctggagctggagcagcagcagtcggccttgggcatgctgcggcagcaaaccctgagcatgctccaggatggagccgccccaacccctggggaagagcctccgctcatgcaggaaatcaccgccatgcaagatcggtgcctgaacatgcaggagaaagtgaagactaatggaaagttggtgaagcaagagctgaaggaccgagaaatggtggagactcagatcaattctgtgaaatgttgggttcaggaaacgaaagaatatttagggaatccaacaatagaaatagatgctcaacttgaagaacttcagattctcctaacagaagccacaaatcaccgacagaacattgaaaaaatggcagaagaacagaaggagaagtacttaggtctttataccatattaccttctgaactctcccttcagttggctgaagtggcgttagatctaaagatccgagatcagatccaagacaaaataaaagaagttgagcagagcaaggccacgagccaggaactcagccggcaaattcagaagttagctaaagacctcacaactattctaactaagctgaaagcgaagacagataatgtagttcaagctaaaactgaccaaaaggtgctgggagaggaattagatggctgtaattcaaagttaatggaattagatgcagcagtacagaaattcttggaacagaatggccaactgggtaagccactggccaagaagataggaaaactgactgaacttcaccagcagaccattagacaagctgagaatcggctctccaagctcaatcaggcagcatcacatttagaagaatacaatgaaatgcttgaattaattttgaagtggattgaaaaagctaaagtcttggctcatggaactattgcatggaattctgcaagccagcttcgggaacaatatattttgcatcagaccctgctagaagaatccaaagaaattgacagtgagctggaagcaatgactgagaaattacagtacctcactagcgtgtactgtacagaaaaaatgtctcagcaagtggcagaactgggacgggagactgaggagttgcgacagatgatcaaaattcgtttgcagaacctccaagatgcagctaaggatatgaaaaaatttgaagcagagttgaaaaagttacaagctgccttggagcaagcccaggcaacactgacttctccagaagttggacgtctcagtctcaaggagcagctctctcatcggcagcatttgttgtctgagatggagtcactgaagccgaaggtgcaagcagtgcagctctgccagagtgccctccggatccccgaggatgtggttgccagcttacctctctgtcatgctgctctgcggctgcaggaagaggccagccggctgcagcacaccgccatccagcagtgtaacatcatgcaggaagctgtggtacaatatgaacaatatgagcaagaaatgaaacatctccagcaactgatagaaggagctcacagagagattgaggataaacctgttgccaccagtaacatacaggagctgcaggctcagatttctcggcatgaggagctggcgcagaaaattaagggctaccaggagcagatcgcttctttgaattccaagtgcaagatgctgacgatgaaagccaagcacgccaccatgctgctgacggtgaccgaggtcgaggggctggcggaagggacagaggacctggatggggagctcctccccacgccttcggcccacccctctgtggtcatgatgactgcaggtcgctgtcacactttgctgtcaccggtcactgaggagtctggggaggagggaaccaacagtgagatttcctctccacctgcctgtcgctccccttcacctgtggctaatacagatgcttctgttaaccaggacattgcatattaccaagccttgtctgctgagaggttgcagacagatgctgcaaaaattcaccccagcacatccgcatcccaggagttctatgaaccgggattggagccatccgctactgccaaactgggtgatttgcagcgttcttgggaaaccttaaagaatgtgatcagtgagaagcagcgcacactctatgaagctttggaacgccagcagaagtaccaggactccctccagtccatctctacgaagatggaggccattgagctgaaactcagtgagagcccagagcctggcaggagtccagaaagccagatggctgaacatcaggcattgatggatgagattctcatgctccaggatgaaatcaatgagctccagtcctctctcgcagaggagctggtatccgagtcttgtgaggccgaccctgcggagcagctggccttgcagtccacgctcactgtcttagccgagcgaatgtccaccatcaggatgaaagcctcggggaaacggcagcttttggaggagaagttgaatgatcagctggaggaacaaaggcaggaacaggccctgcagaggtatcgctgtgaagccgatgagctggacagctggctcttgagtaccaaggccactctggacactgcgctgagtccacccaaggagcccatggacatggaggcccagcttatggactgccagaatatgctggtggaaatagagcagaaggtggtggctttatcagaactgtcagtccacaatgagaacctgctgctggagggcaaagctcacaccaaggacgaggccgagcagctggctggaaagctgagaaggctcaaggggagcctgctggagctgcagagagccctgcatgataagcagctcaacatgcagggaacagcacaggagaaggaggagagcgatgttgacctaacagccacgcagagccccggcgtccaggaatggctggcccaagctcgcaccacatggacccagcagcggcagagcagtctccagcaacaaaaagagttagaacaggaattagccgagcagaagagtctccttcgctcagtagccagtcgtggagaggagattctaattcaacattcggcggcagagacctctggtgatgctggcgaaaaacctgatgtgttatcccaggagttggggatggaaggggagaaatcatccgctgaagaccagatgagaatgaaatgggaaagcctacatcaagaatttagtaccaagcagaaactactacagaatgttctggaacaggaacaagagcaagtgctttatagcaggccaaatcgactcttgtctggtgtgccactgtacaaaggggacgtgccaacccaagataaatctgcagttacatctttgctggatggactgaaccaagccttcgaggaggtttcatcccagagtggaggggcaaagaggcagagtatacacttggagcagaagttgtatgatggagtctcagccacctctacttggttggatgacgttgaagaacgtttatttgttgccacagcacttttaccagaagaaacagagacttgtctcttcaaccaagagattcttgccaaagacattaaggaaatgtctgaagaaatggataagaacaaaaacttgttttcccaagcttttccagagaatggtgataatcgagatgttattgaagatactttgggttgtcttttgggcaggttatccttgctagactcagtagtgaatcaacgatgtcatcagatgaaagaaagacttcagcaaatactaaatttccagaatgatctgaaagtgctgtttacatcactggctgacaacaaatacatcattctgcaaaaactggcaaatgtgtttgaacagcccgtagcagaacaaatagaggcaatacaacaggctgaagatggactcaaagaatttgatgcaggaatcattgaattaaagaggcgtggtgacaagctacaggtcgagcagccgtccatgcaagaactctccaagctccaggacatgtatgatgagctgatgatgatcattggctcccggaggagtggtctgaatcagaaccttacactcaagagtcagtatgagagggccctacaagatctggctgacctgctagaaactggtcaggagaagatggcaggagaccagaaaatcatcgtgtcttccaaagaggaaatccagcaactacttgacaaacataaggaatactttcagggcctggaatctcatatgatcttgactgaaacactcttcagaaagataatcagctttgcagtccaaaaggaaacccagttccatacagagctgatggctcaggcttctgctgtactgaaacgggctcacaagaggggtgtggagctggagtacattctagagacgtggtcccatctggatgaggaccagcaggagctcagcagacagctggaggtggtggaaagcagcatcccaagcgtgggtctggtggaggagaacgaggacaggcttattgaccgcataacactctaccagcatttaaaatctagccttaatgaataccagcccaaattatatcaagtattagatgatgggaaacgacttctgatatccatcagctgctcagatctagaaagccaactaaatcaacttggagagtgctggctaagtaacaccaataaaatgtctaaggaacttcacagactggaaacaatattgaaacactggaccagatatcaaagtgaatctgcagatctaattcactggttacaatctgcaaaagaccggctagaattttggactcagcaatctgtgacagtcccacaagagctggaaatggtccgtgatcatctaaatgctttcctggagttttctaaagaagtggatgcccaatcttccctgaaatcatctgttctgagtactggaaatcagctccttcgactaaaaaaggtggacacagccacgctgcgctctgagctgtcgcgcattgatagccagtggactgacctgctaaccaatatcccagccgtccaggagaagctccaccagctccagatggataaactgccttcccgccatgccatttctgaagtcatgagttggatttctctaatggaaaatgttattcagaaggatgaagataatattaaaaattccataggttacaaggcaattcatgaataccttcagaaatataagggttttaagatagacattaactgtaaacagctgacagtggattttgtgaaccagtccgtgctacaaatcagcagtcaggatgtggaaagtaagcgtagtgataagactgattttgctgagcaacttggagcaatgaataaaagttggcaaattctgcaaggtctagtaactgagaagatccagctgttggaaggcttattggaatcttggtcagaatatgaaaataatgtacaatgtctgaaaacatggtttgaaacccaggaaaagagactaaaacaacagcatcgaattggagatcaggcttctgttcaaaatgcactgaaagactgtcaggatctggaagatttgattaaagcaaaagaaaaagaagtagagaaaattgagcagaatggacttgctttgattcagaacaagaaagaagacgtctctagcattgtcatgagcacactgcgagagctcggccaaacctgggcaaatttagatcacatggttggacaattaaagatactgctgaaatcagtgcttgaccaatggagtagtcacaaagtggcctttgacaagataaacagttacctcatggaggccagatactctctttcccgattccgtctgctgactggctccttagaagctgtgcaagttcaggtggacaatcttcagaatctccaagatgatctggaaaaacaggaaaggagcttacagaaatttggctctatcaccaaccaattattaaaagagtgtcacccacccgtgacagaaactcttaccaatacactgaaagaagtcaacatgagatggaataacttgctggaagagattgctgagcagctacagtccagcaaggccctacttcagctttggcaaagatacaaggactactccaaacagtgtgcttcgacagttcagcagcaggaggatcgaaccaatgagctgttgaaggcagccacaaacaaggacattgccgatgatgaggttgccacatggattcaagattgcaacgacctcctcaaaggactgggcacagttaaagattccctcttttttctccatgagctgggagagcaactgaagcaacaagtggatgcttccgcagcatcagctattcaatcggatcaactctctttgagtcaacacttgtgtgccctggagcaagctctctgcaaacagcagacttcattacaggctggagttcttgattatgaaacctttgccaagagtttagaagctttggaggcctggatagtggaagctgaagaaatactacaagggcaggaccctagccactcatctgacctctccacaatccaggaaaggatggaagaacttaagggacagatgttaaaattcagcagcatggctccagatttagaccgtctaaatgagcttggatataggttacccttgaatgataaggaaatcaaaagaatgcagaatctgaaccgccattggtctctgatctcctctcagactacagaaagattcagcaagttgcagtcatttttgctacaacatcagactttcttggaaaaatgtgaaacatggatggaattcctagttcagacagaacaaaagttagcagtagagatttcaggaaattatcagcaccttttggaacagcagagagcacacgagttgtttcaagccgagatgttcagtcgtcagcagattttgcactcaatcattattgatgggcaacgtcttctagaacaaggtcaagttgatgacagggatgaattcaacctgaaattgacactcctcagtaatcaatggcagggagtgattcgcagggcccagcagaggcgggggatcattgacagccagattcgccagtggcagcgctatagggagatggcagaaaagcttcgtaaatggttggttgaagtgtcctacctccccatgagtggtctcggaagtgttcctataccactgcaacaagcaaggaccctctttgatgaagtgcagttcaaagaaaaagtgtttctgcggcaacaaggcagctacatcctgactgtggaggctggcaagcaactccttctctcggcggacagtggcgctgaggccgccttgcaggccgaactcgctgaaatccaagagaaatggaaatcagccagcatgcggctggaagaacagaagaaaaaactagccttcttgttgaaagactgggaaaaatgtgagaaaggaatagcagattccctggagaaactacgaactttcaaaaagaagctttcgcagtctctcccggatcaccatgaagagctccatgcagaacaaatgcgttgcaaggaattagaaaatgcagttgggagctggacagatgacttgacccagttgagcctgctgaaggacaccctctctgcctatatcagtgctgatgatatctccattcttaatgaacgcgtagagcttctgcaaaggcagtgggaagaactatgccaccagctctccttaaggcggcagcaaataggtgaaagattgaatgaatgggcagtcttcagtgaaaagaacaaggaactctgtgagtggttgactcaaatggaaagcaaagtttctcagaatggagacattctcattgaagaaatgatagagaagctcaagaaggattatcaagaggaaattgctattgctcaagagaacaaaatacagctccaacaaatgggagaacgacttgctaaagccagccatgaaagcaaagcatctgagattgaatacaagctgggaaaggtcaacgaccggtggcagcatctcctggacctcattgcagccagggtgaagaagctgaaggagaccctggtagccgtgcagcagcttgataagaacatgagcagcctgaggacctggctcgctcacatcgagtcagagctggccaagccaatagtctacgattcctgtaactcggaagaaatacagagaaagcttaatgagcagcaggagcttcagagagacatagagaagcacagtacaggtgttgcatctgtcctcaacctgtgtgaagtcctgctgcacgactgtgacgcctgtgccactgatgccgagtgtgactctatacagcaggctacgagaaacctggaccggcggtggagaaacatttgtgctatgtccatggaaaggaggctgaaaatcgaagagacgtggcgattgtggcagaaatttctggatgactattcacgttttgaagattggctgaagtcttcagaaaggacagctgcttttcccagctcttctggggtgatctatacagttgccaaggaagaactaaagaaatttgaggctttccagcgacaggtccacgagtgcctgacgcagctggaactgatcaacaagcagtaccgccgcctggccagggagaaccgcactgattcagcatgtagcctcaaacagatggttcacgaaggcaaccagagatgggacaacctgcaaaagcgtgtcacctccatcttgcgcagactcaagcattttattggccagcgtgaggagtttgagactgcgcgggacagcattctggtctggctcacagagatggatctgcagctcactaatattgaacatttttctgagtgtgatgttcaagctaaaataaagcaactcaaggccttccagcaggaaatttcactgaaccacaataagattgagcagataattgcccaaggagaacagctgatagaaaagagtgagcccttggatgcagcgatcatcgaggaggaactagatgagctccgacggtactgccaggaggtcttcgggcgtgtggaaagataccataagaaactgatccgcctgcctctcccagacgatgagcacgacctctcagacagggagctggagctggaagactctgcagctctgtcggacctgcactggcacgaccgctctgcagacagcctgctttctccacagccttcctccaatctctccctctcgctcgctcagcccctccggagcgagcggtcaggacgagacaccccggctagtgtggactccatccccctggagtgggatcacgactatgacctcagtcgggacctggagtctgcaatgtccagagctctgccctctgaggatgaagaaggtcaggatgacaaagatttctacctccggggagctgttggcttatcaggggaccacagtgccctagagtcacagatccgacaactgggcaaagccctggatgatagccgttttcagatacagcaaaccgaaaatatcattcgcagcaaaactcccacggggccggagctagacaccagctacaaaggctacatgaaactgctgggcgaatgcagtagcagtatagactccgtgaagagactggagcacaaactgaaggaggaagaggagagccttcctggctttgttaacctgcatagtaccgaaacccaaacggctggtgtgattgaccgatgggagcttctccaggcccaggcattgagcaaggagttgaggatgaagcagaacctccagaagtggcagcagtttaactcagacttgaacagcatctgggcctggctgggggacacggaggaggagttggaacagctccagcgtctggaactcagcactgacatccagaccatcgagctccagatcaaaaagctcaaggagctccagaaagctgtggaccaccgcaaagccatcatcctctccatcaatctctgcagccctgagttcacccaggctgacagcaaggagagccgggacctgcaggatcgcttgtcgcagatgaatgggcgctgggaccgagtgtgctctctgctggaggagtggcggggcctgctgcaggatgccctgatgcagtgccagggtttccatgaaatgagccatggtttgcttcttatgctggagaacattgacagaaggaaaaatgaaattgtccctattgattctaaccttgatgcagagatacttcaggaccatcacaaacagcttatgcaaataaagcatgagctgttggaatcccaactcagagtagcctctttgcaagacatgtcttgccaactactggtgaatgctgaaggaacagactgtttagaagccaaagaaaaagtccatgttattggaaatcggctcaaacttctcttgaaggaggtcagtcgtcatatcaaggaactggagaagttattagacgtgtcaagtagtcagcaggatttgtcttcctggtcttctgctgatgaactggacacctcagggtctgtgagtcccacatcaggaaggagcaccccaaacagacagaaaacgccacgaggcaagtgtagtctctcacagcctggaccctctgtcagcagtccacatagcaggtccacaaaaggtggctccgattcctccctttctgagccagggccaggtcggtccggccgcggcttcctgttcagagtcctccgagcagctcttccccttcagcttctcctgctcctcctcatcgggcttgcctgccttgtaccaatgtcagaggaagactacagctgtgccctctccaacaactttgcccggtcattccaccccatgctcagatacacgaatggccctcctccactctgaactaagcagatgccatctgcagaagtgctggtagcataaggaggatcgggtcataagcaatcccaaactaccaacaagaggaccttgatcttggcgaaagccctcggtgtggcagctttagccctcctccagatcacatgtgtgcaaattatggcttcagaggtggaagataaacagtgacgggggaacaaacagacaacaagaaggtttggaagaaatctggtttgagactctgaaccttagcactaaggagattgagtaaggacctccaaagttccccggactcatgaattctgggcccttggcccattctgtgcacagccaaggacttcagtagaccatctgggcagctttcccatggtgctgctccaaccatcagataaatgaccctcccaagcaccatgtcagtgtcgtacaatctaccaaccaaccagtgctgaagagattttagaaccttgtaacatacaatttttaagagcttatatggcagcttcctttttaccttgttttcctttggggcatgatgttttaacctttgctttagaagcacaagctgtaaatctaaaaggcacttttttttagaggtataaagaaaaactagatgtaataaataagatcatggaaggctttatgtgaaaaaagttgaatgttatagtaaaaaaaaaaagatatttatgtatgtacagtttgctaaagccaagttttgtttgtattgatttctttgcatttattatagatattataaaatagtt

SEQ ID NO: 257471 - protein, 604 aa, Artificial Sequence
  derived and/or modified sequence
MNIVENSIFLSNLMKSANTFELKYDLSCELYRMSTYSTFPAGVPVSERSLARAGFYYTGVNDKVKCFCCGLMLDNWKRGDSPTEKHKKLYPSCRFVQSLNSVNNLEATSQPTFPSSVTNSTHSLLPGTENSGYFRGSYSNSPSNPVNSRANQDFSALMRSSYHCAMNNENARLLTFQTWPLTFLSPTDLAKAGFYYIGPGDRVACFACGGKLSNWEPKDNAMSEHLRHFPKCPFIENQLQDTSRYTVSNLSMQTHAARFKTFFNWPSSVLVNPEQLASAGFYYVGNSDDVKCFCCDGGLRCWESGDDPWVQHAKWFPRCEYLIRIKGQEFIRQVQASYPHLLEQLLSTSDSPGDENAESSIIHFEPGEDHSEDAIMMNTPVINAAVEMGFSRSLVKQTVQRKILATGENYRLVNDLVLDLLNAEDEIREEERERATEEKESNDLLLIRKNRMALFQHLTCVIPILDSLLTAGIINEQEHDVIKQKTQTSLQARELIDTILVKGNIAATVFRNSLQEAEAVLYEHLFVQQDIKYIPTEDVSDLPVEEQLRRLQEERTCKVCMDKEVSIVFIPCGHLVVCKDCAPSLRKCPICRSTIKGTVRTFLS

SEQ ID NO: 257472 - DNA, 1815 bp, Artificial Sequence
  derived and/or modified sequence
atgaatatagtcgagaactctatatttctatccaacctcatgaagtccgctaacacttttgagctcaagtatgatttgtcctgtgaattgtatcgcatgtccacttactctactttcccggctggggtccctgttagcgagcgctccttggctcgggccggcttctattacacgggcgttaatgacaaagtcaaatgcttttgctgtggtttgatgctggacaactggaagcgaggcgacagccccactgaaaaacataagaagttatacccgagctgccggtttgtccagtccctgaactctgtgaataatctggaagccacttcccagccaacttttcccagcagtgtaactaactctactcacagtctgctgccggggactgagaacagcgggtacttcagaggttcctactctaattctccttccaacccagtgaactccagagctaatcaggatttctccgcgctcatgcgctcaagctaccattgtgctatgaacaatgagaatgcgagactcctgactttccaaacttggccactgacctttctgagtcccactgacctggctaaggctggtttttactacatagggccaggcgacagggtcgcgtgttttgcttgcggaggtaaacttagcaattgggagccaaaagataatgctatgagtgagcacctgcgtcactttcccaaatgcccatttattgaaaaccagcttcaagatacctcaagatacaccgtcagcaatctgagcatgcagacccacgcagcaaggtttaagacattctttaattggccttcgtccgtcctggtcaaccccgagcagctggcttccgccggcttttattatgttgggaattccgatgatgtgaaatgcttctgttgcgacggcggactcaggtgttgggaaagcggagacgacccttgggttcaacatgctaaatggtttcccagatgtgagtacctgataagaattaaggggcaggagttcattcgtcaggtacaggcctcatatccccacctactcgagcagctcctaagtacatccgacagtcctggcgatgaaaacgccgagtctagcattattcattttgagcctggggaagaccattcagaggatgccatcatgatgaatacacctgtcataaacgcggctgtggagatgggattcagccggagcctggtaaaacagaccgtgcaacgtaagatactggctaccggggagaactatcgcctggtcaacgacctagttctggaccttctgaatgccgaagacgagattcgagaagaagaaagagagagggctaccgaggaaaaggaaagtaacgacttacttctcattcgtaaaaatcggatggccttgttccagcacctgacctgcgtcattccaatcttagactcactgctcacagccggcataattaacgagcaagagcatgacgtcatcaagcagaagacacaaacgtcattgcaagctcgggaactcatcgacactatccttgtgaagggcaacattgccgctactgtctttcgtaactcattacaggaagcggaggccgtgctgtatgaacatctgtttgtccagcaggatattaagtacatacccaccgaggacgtatctgatctccccgtggaagaacaattaagaagattgcaagaggagcgtacttgcaaagtgtgcatggataaggaagtttcgattgtgtttatcccttgtggtcatctggtggtgtgcaaagactgtgccccgtccctgcgaaagtgtccaatctgccggtcgactattaagggaaccgttcgcaccttcctgtcatag

SEQ ID NO: 257473 - DNA, 1815 bp, Artificial Sequence
  derived and/or modified sequence
atgaatattgtggagaactctatctttctgagcaacctcatgaagtctgctaacacattcgagctgaagtatgacttatcctgcgaactataccgcatgtcaacttattctacgttccccgccggggtgcccgtcagcgagcgtagtctggctagagccggtttctactacacaggagtgaatgacaaagtcaagtgtttctgttgcggacttatgcttgataactggaagcgcggcgactctccaacagaaaaacataagaaattgtatccatcttgtcggttcgtccagagcctcaattcagttaataacctcgaggctacctcacagcctacctttccatcaagcgttacaaatagcacccattctctcttaccaggtactgagaactctggctatttccgaggcagctattccaattccccatcgaatccagtgaatagtcgcgctaaccaggattttagcgctcttatgcgctcttcctatcattgcgctatgaacaatgagaacgccaggctgctgacttttcagacctggccgttgaccttcctgtccccaaccgacctggccaaagccggcttttattacattgggcccggagatagagtcgcatgcttcgcctgtgggggcaaactcagtaactgggagccaaaagacaatgctatgagcgaacacctccgtcacttccccaaatgtccctttatcgaaaaccaactgcaagacacatctagatatactgtgagcaacttgtcaatgcagacccacgcagctcgcttcaaaacctttttcaattggccgtcctccgttctagtcaacccagaacagctagcaagcgctggtttttattatgttgggaactcggatgatgtgaagtgtttttgctgtgatgggggactccggtgttgggaaagcggagacgatccatgggtgcaacatgccaaatggtttccccggtgcgaatatctcatacgaattaaagggcaggagtttatacggcaagtgcaagccagctacccgcacctcctcgaacagctgctttcaactagcgactcacctggggacgagaacgcagagtcctcaataattcacttcgaaccaggggaagaccacagcgaggatgcaattatgatgaatacgccggttattaatgccgctgtggagatgggtttttcgcgctccctggtgaagcagacagtgcagcggaagatcctcgctacgggtgaaaactaccggcttgtgaacgatctggtgctggatctactcaatgccgaagacgagatcagagaggaggagagagagagagccacggaggagaaagaatcgaacgatctgctccttatccgaaaaaatagaatggcgttattccagcacctgacgtgcgtgatcccaatcttggactctctcctgacagctggtatcattaacgaacaggaacatgacgttatcaagcagaaaacccagacatctctccaagctagagaactgatcgatacaatcctggtcaagggtaacattgctgccaccgtgttccggaacagcttacaggaggctgaagccgtcttgtacgagcacctctttgtccagcaagatatcaagtacatacctacagaggacgtttctgacctccctgtagaggaacagcttcgcaggcttcaggaagagagaacctgtaaggtctgcatggacaaggaggtgtccatcgtgtttataccctgtggccatctcgtcgtttgtaaggactgtgcaccttccttgaggaagtgtccgatatgccggagtacgatcaagggtactgtgaggacttttttaagttag

SEQ ID NO: 257474 - DNA, 1815 bp, Artificial Sequence
  derived and/or modified sequence
atgaacatcgtggagaacagcatcttcctgagcaacctgatgaagagcgccaacacctttgagctgaagtatgacctgagctgtgagctgtacaggatgagcacctacagcaccttccctgctggggtgcctgtgtctgagaggagcctggcccgggccggcttctactacacaggagtgaatgacaaggtgaagtgcttctgctgcggcctgatgctggacaactggaagagaggagacagccccacagagaagcacaagaagctgtaccccagctgccgctttgtgcagagcctgaacagcgtgaacaacctggaggccaccagccagcccaccttccccagctctgtgaccaacagcacccacagcctgctgcccggcacagaaaattctggctacttccggggcagctacagcaacagccccagcaaccctgtgaacagccgggccaaccaggacttcagcgccctgatgaggagcagctaccactgtgccatgaacaatgaaaatgcccggctgctgaccttccagacctggcccctgaccttcctgagccccacagacctggccaaggccggcttctactacatcggccctggggacagagtggcctgctttgcctgtggcggcaagctgagcaactgggagcccaaggacaatgccatgtctgagcacctgcggcacttccccaagtgccccttcatcgagaaccagctgcaggacaccagccgctacacagtgagcaacctgtccatgcagacccacgccgcccgcttcaagaccttcttcaactggcccagctctgtgctggtgaaccctgagcagctggccagcgctggcttctactacgtgggcaacagtgatgatgtgaagtgcttctgctgtgatggcggcctgcgctgctgggagagcggagatgacccctgggtgcagcacgccaagtggttcccccgctgtgagtacctgatccgcatcaagggccaggagttcatccggcaggtgcaggccagctacccccacctgctggagcagctgctgagcaccagtgacagccctggagatgaaaatgctgagagcagcatcatccactttgagcccggggaggaccacagtgaagatgccatcatgatgaacacccctgtgatcaatgctgctgtggagatgggcttcagccgcagcctggtgaagcagacagtgcagaggaagatcctggccaccggggagaactaccgcctggtgaatgacctggtgctggacctgctgaatgcagaagatgagatccgggaggaggagcgggagcgggccacagaggagaaggagagcaatgacctgctgctgatcaggaagaacaggatggccctcttccagcacctgacctgtgtgatccccatcctggacagcctgctgacagctggcatcatcaatgagcaggagcatgatgtgatcaagcagaagacccagaccagcctgcaggcccgggagctgattgacaccatcctggtgaagggcaacattgctgccaccgtcttcaggaacagcctgcaggaggccgaggccgtgctgtatgagcacctgtttgtgcagcaggacatcaagtacatccccacagaagatgtgtctgacctgcctgtggaggagcagctgcggcggctgcaggaggagaggacctgcaaggtgtgcatggacaaggaggtgtccatcgtgttcatcccctgtggccacctggtggtgtgcaaggactgtgcccccagcctgaggaaatgtcccatctgccgcagcaccatcaagggcaccgtgaggaccttcctgtcctag

SEQ ID NO: 257475 - DNA, 1815 bp, Artificial Sequence
  derived and/or modified sequence
atgaacatcgtggagaacagcatcttcctgagcaacctgatgaagagtgcaaacacattcgagctgaaatacgaccttagttgtgagctgtacaggatgtcaacatactcaacatttccagctggggtgccagtatccgagcgaagcttagcccgggccggattttactacacaggcgtcaatgacaaggtgaagtgcttctgctgtggtctcatgttggataactggaaaagaggggattcccccacagagaaacacaagaaactgtatcctagttgtcgattcgtgcaatctctgaactctgtaaataacctcgaagccacctctcaacctactttcccatcctccgtgactaactccacccactcactgctgcccggaaccgagaactccggctattttagaggcagctattctaatagcccttctaacccggtcaattccagagcaaaccaggatttttcagcacttatgcgaagcagttaccactgcgccatgaataacgagaatgccagattgctgacatttcagacatggccgctaacgttcctgtctccaacggatttagcaaaggctggattctattatatcggaccaggagatagggttgcgtgcttcgcatgtggcgggaagctctcaaattgggaacctaaagataacgctatgtccgagcacctccgacacttccctaaatgtccattcatagaaaaccaactccaggatacctcccgttacaccgtttccaacctttctatgcagacccatgccgctaggttcaaaacgttttttaactggccctcttctgttctcgtgaatcctgagcagttggctagcgcagggttttactacgtcgggaatagcgacgatgttaagtgtttctgctgcgacggcggacttagatgttgggagtccggcgacgatccctgggtgcaacacgcgaagtggtttcctcggtgcgagtatctcatccgtatcaaaggacaggagttcattaggcaggtgcaggctagttaccctcacctcctcgagcagctgctctccacatcagattctcccggagacgaaaacgctgaatcctctattatacattttgagcctggggaggaccatagtgaggacgcaatcatgatgaacactccagttattaacgccgccgtggaaatgggctttagccgatccctcgtaaagcagactgtgcagagaaaaattctggctaccggggagaattaccgcctagtgaatgacttggttctggacctgctgaatgcagaagatgaaattagagaagaggaaagagagagggccaccgaagaaaaggagtccaatgatttactcctcatcaggaaaaataggatggcactgttccaacacctgacatgtgtgatcccaatcttggattcattactgacagccgggatcattaatgagcaagagcacgacgtgattaaacaaaaaacccagacttcactgcaggcccgcgagctgatagacaccatcttggtgaagggcaatatagccgcgactgtttttaggaattccttacaggaggccgaggccgttctctatgagcatctgttcgttcagcaggacataaaatacattcccacggaagatgtctccgacctgccagtcgaggagcaactcagacgcctacaggaggagaggacatgcaaagtgtgcatggacaaagaagtgagtattgtcttcatcccatgcggccatctagtagtttgcaaggattgcgccccctccctgagaaagtgccccatatgtagatctaccataaaaggaacggtgcgcacattcctaagttag

SEQ ID NO: 257476 - DNA, 1815 bp, Artificial Sequence
  derived and/or modified sequence
atgaacatcgtggagaacagcatcttcctgagcaacctgatgaagagcgccaacacgttcgagctgaagtacgatctatcatgcgagctgtatagaatgagcacatatagcaccttcccagcaggagtgccagtgagcgagagatctctggcccgtgcaggattctattataccggcgtcaacgataaggtcaagtgtttctgctgcgggctcatgctcgacaactggaagcgcggtgactcgcctactgaaaaacataagaagctgtatccctcttgtcgcttcgtgcagtcgcttaactcggtcaataatctggaagcaacttcacagcctacatttcccagcagcgtgaccaactccactcattcactgttacctgggactgaaaactcgggatatttccggggatcatacagcaactctccctcgaatcccgtgaactcacgcgccaaccaagacttctctgcccttatgcggagctcctatcattgcgcgatgaataatgaaaacgcaagactcctaaccttccagacgtggcccttaacgtttctgtccccaacggacctcgcgaaagccgggttttattacatcgggccaggagatcgggtggcctgttttgcctgcggaggcaagctgtcaaattgggaacctaaagataacgccatgtctgagcacctgcgacatttcccaaaatgccctttcatcgagaatcaactgcaggacacgtcccgctatacggtgagtaatctttcaatgcagacccacgcagcacgtttcaagactttcttcaattggccatcctcagtcttagtgaacccagagcagctagcttctgcagggttttattacgtcggcaattccgacgacgtgaaatgtttctgctgcgacggcggactgcgttgctgggagtcaggggacgatccctgggtgcagcacgcaaagtggtttcctaggtgcgaatacctgatccgaatcaagggacaggaatttatccggcaagtgcaggcctcctatccccacctgctcgagcagctgttaagcacctcagactcaccaggtgatgagaatgctgaatcgtcaatcatccacttcgaacccggtgaagaccactctgaggatgccatcatgatgaacaccccagtgatcaatgccgcggtggagatggggttttcccgctccctcgttaagcagacagtgcagagaaaaatacttgctactggtgagaattaccggttagttaatgacctggtcctcgacctgctaaatgccgaagacgagatccgtgaagaggagagggaacgggctacagaggaaaaggagtccaacgatctcctccttattcgaaagaacaggatggcactattccaacacctcacttgtgtcatcccgatactcgacagcctgctaactgccggcatcattaatgagcaggagcacgatgtaatcaagcagaaaacacagacaagccttcaagcgcgagaacttatagatacaatcctggtgaaggggaatattgctgctaccgtgttccgtaatagcctccaggaagcagaggccgtgctgtacgagcacctgtttgtacagcaagatataaagtatattcctacagaagacgtgtcagacctgcccgtcgaggagcagcttaggagattgcaggaagaaaggacatgcaaggtctgtatggacaaagaagtgtcgatcgtgttcattccttgcggacatctcgtggtttgcaaggactgtgctccatctctccgaaaatgccctatctgtcggtctacaattaagggcacggtgaggacattcctgtcctag

SEQ ID NO: 257477 - DNA, 1815 bp, Artificial Sequence
  derived and/or modified sequence
atgaacatcgtcgagaatagcattttcctgtccaatctgatgaaatcagccaacacctttgagttgaaatacgacctgtcttgcgaactctacaggatgagcacatactctaccttcccagccggtgtgcctgtgagtgagcgaagtctggcacgagcaggattttattacactggggtcaatgataaagtgaaatgcttttgctgcggactgatgctcgacaactggaagagaggggattcacccacagagaagcacaaaaaattataccccagttgccggtttgtgcaaagcctgaatagcgtgaacaatcttgaagctacaagccagcccacatttccctccagcgtgacgaactccacccactcactccttccgggaacagagaacagcggatatttcagaggctcttacagtaacagcccctcgaatcccgttaatagtcgcgctaatcaggatttcagcgccctgatgcgtagcagttatcactgcgccatgaataacgagaacgctagactgctgaccttccagacatggccactgacttttctttctccaaccgatctcgccaaagcgggtttctactatataggaccaggcgaccgcgtggcctgttttgcctgcggtggcaagctttcaaactgggaacctaaggataatgcgatgtcggagcatcttcgacatttcccaaaatgtccatttattgagaaccagttgcaagacacctcacggtacactgtctcaaacctcagcatgcagactcacgccgcacggttcaagacgttcttcaattggccctccagcgtcttagtgaatccagaacagctggcttcagccggattctactacgtaggaaactcagatgatgttaaatgcttctgttgtgatggcggacttcggtgctgggagtccggcgacgacccgtgggtgcagcacgctaagtggtttccgagatgtgaatacttaatcagaataaagggacaggaatttatccggcaggtgcaggcctcttaccctcatttgctggaacagctgctgtccacttctgacagtccgggtgacgagaacgctgagtctagcattatccatttcgaacccggtgaggaccactctgaggatgctattatgatgaacacacctgtgattaatgctgcagtcgagatgggcttcagccggtctctagtcaaacagacagtacaaagaaagatcctggccacgggtgaaaactatagactggtcaacgacctggtgcttgacctgctgaatgctgaagacgagatcagagaagaagaaagggagagagccactgaagaaaaagaatcgaatgatctcctgctgatacggaaaaatcgaatggccttgttccaacaccttacttgtgtgatcccaatcctggactcccttctcaccgctggtatcattaatgagcaagagcatgacgtgattaagcagaaaacccagacatctcttcaagctagagaactgatagacacaatcctggttaaaggtaacatcgctgccactgtgtttaggaactccctgcaagaagcagaggcggtgctgtacgaacacctgtttgtgcaacaggacatcaagtacatacccacagaggatgtcagtgacttacccgtggaggagcagctgcggagactccaggaggaacgcacctgtaaagtttgtatggacaaagaggtgagcatagtttttattccctgtggccacctcgtcgtttgtaaagactgtgcaccgagcctccggaagtgtccaatctgtaggtcaacaataaagggaactgtcaggacatttctgagttag

SEQ ID NO: 257478 - DNA, 1815 bp, Artificial Sequence
  derived and/or modified sequence
atgaacatcgtagagaactctatatttctaagcaatttgatgaaatccgcgaataccttcgaactaaagtacgatctgagttgcgagctctaccggatgtcaacctattcaaccttccccgcaggtgtacccgtttctgagaggtccttggcgcgtgccggattctattacacaggggtcaacgacaaggttaagtgtttttgctgcggtttgatgcttgacaattggaaaagaggtgattccccaacagagaagcataagaagctgtacccgtcctgccgattcgtccagtcccttaattctgttaacaacttagaagccacgagccagccaacttttccttcctcggtcaccaattctacgcactctctgctgccagggaccgaaaactctgggtatttccgtgggtcttattccaactctccttccaatcctgttaactcccgagctaatcaagatttcagcgccctgatgcgcagctcctaccactgcgctatgaacaacgaaaatgcacggctgctaactttccagacctggccccttacctttctttcaccgaccgacttggctaaagctggcttctattatatcggcccaggtgatcgggtcgcctgtttcgcatgcggcggaaaactctcgaattgggaacccaaggacaatgccatgtcagagcacttgcgccacttccccaaatgcccgtttattgaaaatcaacttcaggacacgagtaggtataccgtttccaacctttctatgcaaacccacgctgcccgtttcaagacttttttcaattggccttccagtgttctggttaaccctgagcaactggccagcgccggtttctattacgtcggcaactctgatgacgtgaaatgtttttgctgcgacggcggactacgttgctgggagagcggcgacgacccctgggttcagcatgccaagtggtttccccgatgtgagtacctgattcggattaagggtcaagaattcattcgccaggtgcaggcaagctacccgcacctgttggagcagctcttgtccacatccgattcgcctggcgacgagaatgccgaatcctctatcatccactttgaaccaggcgaggaccacagcgaggatgctatcatgatgaatacaccagtcattaatgccgctgtggagatgggatttagccgcagccttgtgaagcaaaccgtgcagcggaagatacttgcaacaggggaaaattacaggctggtgaacgacctggtactggatttgctaaacgctgaagatgagatccgtgaggaggagcgagagcgggcaacagaggagaaggaatccaacgacttgttgcttatcagaaagaacagaatggccttgttccagcacctcacatgtgtgattccaatcctcgactcactgctcaccgcaggtattataaacgagcaggaacacgacgtgatcaaacagaaaactcagacatccttgcaggccagagagcttatcgataccatacttgtgaaagggaatatcgccgctaccgtgttccgcaactcgttgcaggaggcagaggctgtgctgtatgagcatctattcgtgcagcaggatattaaatacatcccaaccgaggacgtgtcagacctcccagtcgaggagcagttgagaaggctgcaggaagagcggacctgcaaggtgtgcatggacaaggaggtgagcattgtgtttattccgtgcggacatctcgtagtctgtaaggattgcgcaccctcgctcaggaagtgccccatctgtaggtcaactattaaaggtaccgtccgaaccttcctctcttag

SEQ ID NO: 257479 - DNA, 1812 bp, Artificial Sequence
  derived and/or modified sequence
atgaatattgtggaaaactcaatcttcctttcaaacctgatgaaatctgccaacacgttcgagctcaagtacgacctgtcctgtgaactttaccggatgtcgacgtattcgacgtttccagcgggagtgccagtgtcggagcggtccctggcaagagccggcttttactatactggagtgaatgataaggtcaagtgcttctgctgtggtctgatgcttgacaattggaagcggggagactcgccaaccgaaaagcacaagaaactgtacccatcatgtcgttttgtccaatccctcaactccgttaacaatctcgaagccacctcccaacctaccttccctagcagcgtgacgaacagcactcattcacttctgcccgggacggaaaacagcggatactttagaggatcatattccaattctccttccaaccctgtcaactcaagggccaaccaggacttttccgcactgatgagatcgtcgtaccattgtgccatgaacaatgaaaacgcacgtctgcttacttttcaaacgtggcccctgacctttctttcgcctactgaccttgctaaggcaggtttttactacattggacccggtgatcgcgtcgcgtgtttcgcatgtggtggaaaattgtcgaactgggagcctaaggataatgcgatgtcggaacatttgaggcacttcccgaagtgtccctttatcgagaaccaactgcaagacaccagcagatacactgtctcgaatctttccatgcaaacccacgccgcacgcttcaaaacttttttcaactggcccagttcagtgcttgtgaatccagaacagctcgcgtcggccggtttctactatgtgggtaattccgacgatgttaagtgtttttgttgcgatggaggtttgagatgctgggaatctggcgacgatccatgggtgcagcacgcaaagtggtttccgcggtgtgaatacctgatacgcatcaaggggcaagaattcattagacaagtccaggcatcatacccacacttgctcgagcagcttctttcgacctctgactcaccaggcgacgagaatgctgaatctagcattatacattttgaacctggagaagatcattccgaggatgccattatgatgaacactccagtcattaacgcagcagttgaaatgggattcagtagatctcttgtcaaacaaaccgtgcagcggaagatactggcaaccggggaaaactacaggttggtgaatgatctggtgctcgatctcctgaatgcggaagatgaaattcgcgaagaagagcgtgaacgcgcaactgaggagaaggagtccaacgacctgctcctcattagaaaaaaccgaatggctctgtttcaacatctcacctgtgtgatacccattttggactcactgctgactgcaggcattatcaacgaacaagagcacgatgtgattaagcagaaaactcagacttcgctgcaggcaagggaactgatagataccatcctcgtgaaaggaaacatcgcagccactgtgtttaggaactccctgcaggaggccgaggcagtcttgtacgaacatctttttgtgcaacaggatatcaagtacattccaactgaagatgtctcggaccttccagtggaggaacagctcagacgtttgcaagaagaacggacctgcaaagtgtgcatggacaaagaggtgtctatcgtgtttataccatgtgggcacctcgtggtttgcaaagattgtgcaccgagcttgaggaagtgcccaatttgtcggtcgaccataaagggaaccgtgagaacttttctgagc

SEQ ID NO: 257480 - DNA, 1812 bp, Artificial Sequence
  derived and/or modified sequence
atgaatattgtggaaaattctattttcctatctaaccttatgaaaagcgctaatacttttgaattgaagtacgatctctcttgtgaactctatagaatgtcaacgtattctactttcccagcaggagttccggtgagtgaacgcagtttggcccgtgctggtttctattacactggagtaaatgataaagttaaatgtttctgctgcggactcatgcttgataattggaagaggggagattcaccgaccgaaaagcacaaaaaactgtatccttcctgtcggttcgtacagtccttgaatagcgttaacaatcttgaagctacttctcaaccaacgtttcctagctcagttactaattcaacgcattcgcttttgccggggacagagaatagcggatactttagaggatcttattcaaactctccatccaatccggtaaattcgcgagcaaatcaagatttttctgcattgatgcgctcatcgtatcattgtgcgatgaataacgagaatgcccggttattgactttccaaacttggccgttgacgttccttagtcctacagatttggctaaagctggattttactatatcggtccgggagatagagttgcatgtttcgcatgtggtggaaaactttctaattgggaaccaaaagataatgcgatgagtgagcacctaagacattttcctaagtgccctttcatagagaatcagttgcaagatacgagtagatacactgtttcaaacctatcgatgcaaacacatgccgcccgattcaaaacgttttttaattggccatcttcagttcttgtcaatccagaacagctcgcctcggcaggattctattatgtgggtaatagtgacgatgtaaagtgtttttgttgtgatggtggactccgctgttgggaatcgggagatgatccttgggttcagcatgctaagtggttcccgaggtgtgaatatcttatccggatcaaaggacaggaattcattagacaggtccaagcctcgtatcctcatctgttagagcaattgctgtctactagcgattctccgggagatgagaatgcggagtcatcgattattcactttgagccaggggaagaccactccgaagacgcgattatgatgaatacccctgttatcaatgcagcagttgaaatgggttttagtcgatcgctagtcaagcaaaccgtacaacgcaaaatcttagcaacaggagaaaattatcgcttagttaatgatctggtcctcgatcttctaaatgcagaagatgaaattcgagaagaggagcgtgagagggcgactgaggaaaaggaatcaaatgatttgctattaatacgaaaaaatagaatggcactttttcaacatttaacctgcgtaatcccaattcttgacagtctcctaacagctggaatcattaacgaacaggaacatgatgtcatcaaacaaaaaacccagacttccttgcaggcgcgcgaattgattgataccattctagttaaaggcaatattgcagcaacagtgtttcgtaactcactccaggaagctgaagccgttttgtatgagcatcttttcgtacaacaggatattaagtacataccgaccgaagatgtgagcgatctgcctgttgaagaacagcttagaagactccaagaagaacgtacttgcaaagtttgtatggataaggaggtttcgattgtctttattccttgtggacatttggtcgtttgcaaagattgtgccccatcacttagaaaatgcccaatttgtagaagtacaataaaaggcacagtgcgcacatttttatcc

SEQ ID NO: 257481 - DNA, 1812 bp, Artificial Sequence
  derived and/or modified sequence
atgaacatcgtggagaacagcatctttctctcgaacctgatgaagtccgcaaatacctttgaactgaagtacgacctgtcctgcgagttgtaccggatgtcaacttattccaccttccccgcaggtgtgccggtgtctgaacgctcactcgcgcgcgcaggattctactacacgggcgtcaatgacaaagtgaaatgtttctgctgcggattgatgctggataattggaagcggggcgacagcccaactgagaagcacaagaaattgtaccccagttgccggtttgtgcagtctctgaatagcgtgaacaatctggaggcgacctcgcagccaaccttcccatccagcgtaactaactctactcattcgctgctgccgggtactgagaactcaggctactttagggggtcctactcgaattccccatcaaacccagtgaactcgcgggcgaatcaagacttctctgctctgatgcggtcctcgtaccattgcgccatgaataacgagaatgcacggctgcttaccttccagacctggcccctgaccttcctctcacccaccgatctcgccaaggccggattttactacattggaccaggcgaccgcgtggcttgcttcgcatgtggcgggaagctgtccaactgggagcctaaggacaatgccatgtccgagcacctgcggcacttcccaaagtgcccgtttatcgaaaaccaactccaagacaccagccggtacaccgtgagcaacctctccatgcagactcacgcagcgcgcttcaagacgttcttcaactggcctagctccgtcctggtcaaccctgaacagctcgcaagcgcaggcttctactatgtgggaaattcagacgatgttaagtgtttttgttgcgacgggggcctgcgctgctgggaatccggggatgacccgtgggtgcagcatgccaagtggttccctcgctgcgaatacctcatccggatcaaaggtcaggaattcatcagacaagtgcaagcatcttacccgcatctgctggaacagctcctgtcaacctcagactcgccgggggatgaaaatgcagaaagctccattatccacttcgagccgggggaggaccacagcgaggacgccatcatgatgaacacgccagtgatcaatgctgccgtggaaatgggattctcgcggtccctcgtcaaacaaaccgtgcagcgcaaaatcctggcaaccggggaaaactaccgactggtgaatgatctcgtcctggatctgctcaacgcagaagatgagatacgcgaggaggaaagagagagagccactgaggaaaaagaatccaacgaccttctcttgattagaaagaaccggatggccctgtttcaacacctgacgtgcgtgatcccgattcttgactcactcctgaccgcgggaattatcaacgagcaggagcatgacgtgatcaagcaaaagactcaaaccagcctgcaagccagggaactcatcgatactatcctcgtgaaaggtaacatcgcggctaccgttttcagaaattccttgcaagaggcagaagccgtgctgtacgaacatctctttgtgcagcaagacatcaaatacatcccgactgaagatgtctcagacctgccagtcgaggagcagctgcgccggttgcaagaagaacgcacttgcaaggtctgcatggataaagaagtgagcatcgtgttcatcccatgcggacacctggtcgtgtgtaaggactgtgcaccgtcgctgcggaagtgccctatttgtagatccactatcaaaggcaccgtccgaacgtttcttagc

SEQ ID NO: 257482 - DNA, 1812 bp, Artificial Sequence
  derived and/or modified sequence
atgaatatcgtagaaaactcgatttttttgagcaaccttatgaagtctgcaaacacgttcgaactcaagtacgatttgtcatgcgaactgtatcggatgagcacctatagcacttttccagccggagtgcccgtgagcgagcgaagtcttgccagagccggcttttattacaccggcgttaatgataaagttaagtgtttctgttgcggactgatgcttgacaattggaagagaggtgacagcccgacagagaagcacaaaaaactgtacccttcctgtagattcgtgcagagtctcaacagcgtgaataacctcgaagctacatcacagccgacattcccatcaagtgttaccaatagtacccattcattactgcccggcactgaaaattctggatactttcggggaagttactccaactcgccaagcaacccagtgaatagcagagccaaccaggattttagtgcactgatgcgctcctcttatcactgcgcgatgaataatgaaaacgcacgtctactgacatttcagacatggcctttgacctttttgtccccaactgatttggccaaggccggattttattatatcggaccgggagacagagtcgcttgtttcgcctgtggggggaagctctctaattgggaaccaaaggataatgctatgagtgagcacctgagacattttccgaagtgtccattcattgaaaaccagcttcaggatactagcaggtacaccgtgtccaatctttccatgcagacacatgctgcaagatttaaaacgttcttcaattggcctagctctgtgctggtgaatcccgaacagctggcctctgctgggttctattatgttggcaattcagacgacgtaaagtgcttctgttgcgacggcgggctgcgctgttgggagtccggcgatgatccctgggtgcagcacgcgaagtggttcccccgttgtgagtaccttataaggattaaaggccaggaattcattagacaggtgcaagcatcatacccccatcttcttgagcagctgctgtctacaagtgacagtccaggtgatgagaacgctgagtcttcgatcatccacttcgagcctggcgaggaccactccgaagatgcaattatgatgaacacccccgtgattaatgccgcagtggagatggggtttagcaggtcactggtgaagcaaacagttcagcgtaaaatattagcaactggagaaaactatcgactcgttaacgaccttgttcttgacctgcttaatgctgaggatgaaattcgggaggaagagagggaaagagcgacagaggagaaggaaagcaacgacttacttctgatccgaaagaacagaatggcactctttcagcatttgacctgtgtgattcccattttagacagcctgctgacggcaggcattatcaacgagcaggaacacgatgttattaagcagaagactcaaacgtctttacaagcacgtgagctgattgatacgatattggtgaaaggcaacatcgcggccaccgtgttcagaaattctctgcaggaggctgaggccgtgctctatgagcacttgtttgtgcaacaggacattaagtacatccctaccgaagacgtaagtgacctgcctgtggaggaacaactgcgacggctgcaagaggagcgtacttgtaaagtctgtatggataaagaagtgagtatcgtctttataccttgcggccatctcgttgtctgtaaggactgtgctccaagtttgcggaaatgtcctatatgtcggtctaccatcaaggggacagtgcgcaccttcctctca

SEQ ID NO: 257483 - DNA, 1812 bp, Artificial Sequence
  derived and/or modified sequence
atgaatatagttgagaactctatttttttatccaacctgatgaagtccgctaacacctttgaactcaaatatgacctctcttgtgagctttatcgtatgagtacctattctactttcccggccggagttcccgtgtccgaaaggagtttggctcgagcgggcttctactatactggggtgaacgataaggtaaagtgtttctgctgtggcttgatgctcgacaactggaaaaggggggacagcccaacggagaaacacaaaaagttataccctagttgtaggtttgttcaaagtttaaactctgtaaataacctggaagcgacctcacagccaacctttccaagctccgtcaccaacagcactcactcgttgctgccagggacagaaaacagtggttacttccgcggctcatactccaactcaccttccaacccagtgaactctagagccaatcaagatttcagcgccctcatgcggtctagttaccattgtgcaatgaacaatgagaatgcccgcctgctcacctttcagacctggcctctgactttcctgtctccaactgacttggcaaaggctggcttttactatattggtcctggggaccgcgtggcttgcttcgcttgtgggggaaaactgtcgaattgggaaccaaaggacaacgcaatgagcgaacacctgcgacatttccctaagtgtcccttcattgagaaccagttgcaagacacttcacgctatacagtctccaacctgagcatgcagacgcacgctgcacgctttaagactttctttaactggccgtccagtgtgctggtaaaccctgagcaactggcctctgcgggcttttactatgttgggaacagcgatgatgtgaaatgtttctgctgcgatggagggttgcgttgctgggaatcaggcgacgacccctgggtgcagcacgcgaagtggtttccccgatgtgagtacctcatcaggatcaaaggccaggaattcatccgccaggtgcaggcctcttacccgcacctcttagagcagcttctgtctacctccgattcacctggcgacgagaacgcggagagctctattattcacttcgagccaggagaagatcatagcgaggatgccatcatgatgaacaccccagtcattaacgccgccgtcgaaatgggctttagccgctcactggtaaaacagaccgtgcagaggaagattctagccaccggcgaaaactatcgactcgtgaatgaccttgtgctagatctgctgaacgcagaagacgagattcgagaggaggagagggagcgcgccactgaggaaaaagagtctaacgacttactgctaattcgaaagaacaggatggcactcttccaacacctgacctgtgtaatccccattctggattctcttctaactgctgggattataaatgagcaagagcacgacgtgatcaaacagaagactcagaccagtcttcaagcccgcgagctgatagacacaattcttgtgaagggaaacatcgctgcaacagtcttccgtaactcccttcaggaagccgaagctgtgctgtatgagcatctgttcgtacagcaagacataaaatatattccaaccgaggacgtgagcgatctgcccgtcgaagagcaactccgtaggctgcaggaggaaaggacatgtaaggtgtgcatggacaaggaagtgtcgattgtgttcatcccttgtgggcatctggtggtttgtaaggattgtgcgcctagtcttcggaaatgccctatctgtcgatccactattaagggtactgtgcggacattccttagc

SEQ ID NO: 257484 - DNA, 1812 bp, Artificial Sequence
  derived and/or modified sequence
atgaatatcgtggagaattctatctttttgagtaacctgatgaagagtgcgaacactttcgagcttaagtatgacttgagctgcgaactatatagaatgtccacctattcaacttttcctgcaggcgtacctgtgtcagagaggtctctcgcaagagcgggattttattacaccggtgtgaacgacaaagttaagtgtttctgttgtggcctgatgctggataactggaaacgtggtgatagtcctaccgaaaagcataaaaaactgtacccctcctgtcgcttcgtgcagagcctcaatagcgtcaacaacctggaagccacgtctcagcctactttcccctcttcagtaacgaactccacgcattccctattacccggaacggaaaacagcggctactttaggggcagttattctaattcgccgagtaatcctgtgaactctcgggccaatcaggattttagcgccctaatgcggagctcctaccactgcgcaatgaacaatgaaaacgcacgactgctgacctttcagacatggcctctgacatttctgtcccctacagatctggccaaggctggtttctactacatcggcccaggcgatcgggtggcatgcttcgcttgtgggggcaaactgtctaactgggagccgaaggataacgccatgtcagaacatttacggcacttcccaaaatgcccttttatcgagaatcaactgcaggacaccagtcgctacacagtgtccaatcttagtatgcagactcatgccgcacggtttaagacgttttttaactggccatcttccgtcctggtgaaccccgaacagttagctagtgcaggtttctactacgttggcaatagcgacgatgtaaaatgcttttgctgtgacggcgggttacgttgctgggaatctggagatgacccctgggttcagcatgctaagtggtttccgcggtgtgagtatctgattcggatcaaggggcaggaattcataagacaagtgcaggcttcttatccccatctgttagaacagctgctctcaacttctgacagtcctggagatgagaatgcagagagttccatcatccacttcgaacccggggaagaccacagtgaggatgctataatgatgaataccccggtcatcaacgctgccgtcgagatgggattctcaaggagtctggtgaagcagacagttcagagaaagattttggcaaccggcgaaaattacagactcgtaaacgatctagttctggacctcttgaacgccgaggacgagatcagggaggaagagcgggagcgtgccaccgaggaaaaggaatctaacgatcttctgctcatccgtaaaaatcggatggctctgtttcagcaccttacctgtgttattcctattctggactccttgctaaccgcagggatcattaatgaacaggagcacgatgttatcaagcagaaaacacaaactagtctgcaggctcgggagttaattgacaccatcctggtgaagggaaacatcgctgccactgtcttccgaaacagcctgcaggaagccgaggcggtgctgtatgagcatctcttcgtgcagcaggatattaagtatattccgacggaagatgtatctgacctgccagtagaggaacaactcaggcggctgcaggaggagaggacctgcaaggtatgtatggacaaagaagtgtctattgtctttataccttgcgggcatctcgtggtgtgcaaagattgtgccccctcattgcggaaatgtccgatttgccggtcaactatcaagggcactgtgagaacgttcctctct

SEQ ID NO: 257485 - DNA, 1812 bp, Artificial Sequence
  derived and/or modified sequence
atgaacatcgtggaaaattcgatttttctttccaacctgatgaagagcgcaaatacctttgagcttaagtacgatctctcgtgtgagctctataggatgagcacttacagcacctttcctgcaggagtcccagtgtcggaacggtcgttggcacgggcagggttctactacaccggtgtgaatgataaggttaagtgtttctgctgcggactgatgcttgataattggaaacgtggagactcgcccacggaaaaacacaagaagctgtacccttcgtgccgcttcgtgcagtcgctcaattcggtcaacaatcttgaagcaacgtctcaacctaccttcccttcgtcggtgactaattcaactcatagccttcttccagggactgaaaactctggatacttccggggatcttattcaaacagcccatcaaacccggttaatagccgagcaaaccaagatttttctgctttgatgagatccagctaccactgcgcgatgaacaatgagaacgctcgactgctgacctttcagacttggccgttgacgtttctgtcgccgactgacctcgcaaaggcaggtttctactacattggccctggagatcgggtggcctgttttgcgtgtggaggtaaactttcgaattgggagccaaaagataacgcaatgtccgagcaccttagacattttcccaagtgtccattcattgaaaatcaactgcaggatacctccagatacactgtgtctaacctgagcatgcaaactcatgcagcccgctttaagaccttctttaactggcctagctcagtgctggttaaccctgaacagcttgcatcggctggattttactacgtggggaatagcgatgacgtcaagtgtttttgctgtgatgggggtcttagatgttgggagtcaggtgatgatccttgggtgcaacatgcgaaatggttcccccgctgtgaatacctgatccgtatcaagggtcaggagttcatcaggcaagtccaagcatcctacccccatctgctggaacaactgctgagcacctccgattcacctggcgacgaaaacgccgagagcagcattattcattttgaaccaggggaagatcattccgaagatgccatcatgatgaataccccagtgattaacgcagcggtggaaatgggtttctcccgcagcctggtgaaacagaccgtgcagagaaagattcttgcgaccggagagaattatcgccttgtgaacgacttggtcctggatcttctgaacgcggaagatgagattcgcgaagaagaaagggagagagcaacggaagagaaggaaagcaacgatctgctccttatcaggaagaatcgaatggcgttgtttcagcaccttacctgcgtgatccccatcctggattccctccttaccgccgggataatcaacgaacaggaacacgatgtgataaagcagaaaacccagaccagcctccaagcgagagagctgatcgataccatcctcgtgaaagggaatatagcagctacggtgttccggaactcactgcaggaagcagaggcagtcctttacgaacacctgtttgtgcaacaagatatcaagtacattcccaccgaggatgtctccgatcttccagtggaagaacagcttagacgcctgcaggaagagagaacttgtaaggtttgcatggataaggaggtgtcaattgtgttcatcccctgtggacatctggtggtgtgtaaggactgtgcaccttcactgagaaagtgccctatttgtcgatcaacgattaaggggaccgtgcgcacctttctttca

SEQ ID NO: 257486 - DNA, 1812 bp, Artificial Sequence
  derived and/or modified sequence
atgaatatcgtcgaaaactctatctttctgagcaacctgatgaagagtgcaaatacctttgagcttaagtacgatttgagctgcgagctgtaccgcatgtccacctacagcactttcccagcgggagtgccggtgagcgaacgctcgctggcccgggcgggtttctattacaccggggtcaacgataaggttaagtgcttttgctgcggactgatgctggacaactggaagcgcggagactccccgactgaaaaacacaagaaactgtacccctcgtgtcggttcgtgcagagcttgaactcggtgaataacctggaagctacgtcccagccaacgttcccgtcatccgtgacgaattcgacccacagcttgctgcctggcaccgaaaattccggatacttccggggatcatattccaattcgccctctaatccggtgaatagccgggccaaccaggatttctccgcactcatgcgctcgtcctaccattgcgctatgaacaacgaaaatgcgcgactgctcaccttccagacttggccactgacctttctctcgcccacggatctggccaaggcgggattctactacatcggaccgggggaccgcgtggcctgttttgcgtgtgggggaaagctcagtaactgggaacccaaggacaatgctatgtcggagcaccttcgccatttcccgaagtgcccgtttatcgaaaatcaactgcaggatacctcccgctacaccgtgtccaacctgtccatgcaaacgcacgcggcgagattcaagactttcttcaattggccgagctcggtgctcgtgaacccggaacagctggcatccgcagggttctactacgtgggcaactctgacgacgtgaagtgtttctgttgtgacggtggacttagatgctgggaaagcggcgacgatccgtgggtgcagcatgccaaatggttccctcggtgcgaatacctcatcagaatcaaaggccaggagttcatccgccaagtccaggcgagctacccccacctgctcgaacagctgctctcgacttcggattcccccggggacgagaacgcggaatcgtcaattatccacttcgagccgggagaggatcacagcgaggacgccattatgatgaatacccctgtgattaacgcagcggtggaaatgggattctcaagaagcctggtgaagcagactgtgcagaggaagatcttggccaccggggagaattacagattggtaaacgatctcgtgctggatctgctgaatgccgaggacgaaattcgtgaggaggagagggaacgggcgactgaggaaaaggagtccaacgacctgctgctgattcgcaagaacaggatggctttgttccagcacctgacttgcgtcatcccaatcctcgattccctcctgaccgctggaatcatcaatgaacaagaacatgacgtgatcaaacagaaaactcagacttccctgcaagctcgagaactgatcgatacgatcctcgtgaagggaaacatcgcagccaccgtctttcgaaactcactccaggaagccgaagccgtgctgtacgaacatctgttcgtccagcaagacatcaagtacattcctactgaggacgtctccgatctgcccgtggaggaacagttgcgcagactccaagaagaacgcacctgtaaggtgtgtatggacaaggaggtttctatcgtgttcattccctgcggccacttggtcgtgtgcaaggattgtgctccgtccttgagaaagtgcccaatctgccgctcgactatcaagggaactgtgcgaacttttctctcg

SEQ ID NO: 257487 - DNA, 1812 bp, Artificial Sequence
  derived and/or modified sequence
atgaatatcgtggagaactcaatcttcttgtccaatctgatgaagtccgcaaacactttcgaactgaaatatgatttgtcctgcgaactgtaccgtatgagcacatatagcactttccctgcaggcgtacctgtgtctgaaaggtcccttgctcgtgctggtttttactacacaggagttaacgacaaggtcaagtgcttctgctgtggtttgatgttggataactggaagcgtggcgactcccccactgagaagcacaaaaagctgtacccctcctgtagattcgtccagtccctgaattctgtcaacaatctggaggccacctcccagccaacttttccttcctctgtcactaactccacccacagtttgctgcccggcactgagaatagtggctacttccgcggctcctactcaaactcaccatccaatccagttaatagtagagctaaccaagatttttcagcccttatgagaagcagctaccactgcgctatgaacaacgaaaatgctagactgctgacctttcaaacatggcctctgaccttcttgagcccaactgacctggcaaaagcaggtttctactatatcggccccggagatcgtgtcgcctgttttgcttgcggtggcaaactctccaactgggagcccaaggacaacgctatgtctgagcatcttcgccattttcccaagtgcccattcattgagaaccagttgcaagacacttctcgctacacagtgtctaatctgtctatgcaaactcatgccgcccgcttcaaaacctttttcaattggcccagtagtgtcttggtcaaccccgagcagttggcctccgccggcttctactacgtaggtaatagtgatgacgttaagtgcttctgctgcgatggcggccttcgctgctgggaatccggcgatgacccttgggtgcagcacgccaagtggttccccagatgtgaatatcttatacgcatcaagggtcaggagtttataaggcaggtacaggcatcttacccacacctgctggaacagttgctctccactagtgattcaccaggtgacgaaaatgccgagtctagtatcattcacttcgaaccaggagaggaccacagcgaagacgctatcatgatgaatacccccgttattaacgccgcagtggagatgggattttctcgcagtcttgttaagcagactgtgcagcgtaagatcctggccactggtgagaactacagactcgtcaacgatctggtgctggaccttctcaacgccgaagacgaaattagagaagaggagagggagcgcgcaacagaggagaaggaatctaatgatctgttgctgatcagaaagaaccgcatggcattgttccagcatttgacatgcgtgattccaatcttggactcactgctgaccgcaggcattatcaacgaacaggagcacgatgtgatcaagcagaagactcagacatctctgcaggcaagggagctgatagacacaattctggtgaaaggtaatattgctgccacagtgtttagaaacagtttgcaggaggctgaggctgttctgtatgagcatcttttcgtgcagcaggatattaaatatatccctaccgaagacgtctcagatctgcctgtggaagagcagctgcgtaggctgcaggaggagcgtacctgtaaagtgtgtatggacaaggaagtgtccatagtcttcattccctgcggacacctggtcgtgtgtaaggactgtgctccctctctgcgtaaatgtcccatatgtagatccaccatcaaaggcaccgtgcgcacttttctttcc

SEQ ID NO: 257488 - DNA, 1812 bp, Artificial Sequence
  derived and/or modified sequence
atgaatattgtggagaacagcatttttctttcaaacttgatgaaatcagccaatacttttgaacttaagtacgatctgagttgtgaactgtatcgaatgtcgacttactcgactttcccggccggagtgcctgtgtcggagagatccttggcaagggcgggtttttactacaccggagtgaatgacaaagtcaagtgcttctgttgtggcctcatgttggacaactggaagaggggagactcgcccactgaaaaacacaaaaagctgtacccaagctgtaggtttgtgcaatccctgaatagcgtcaacaacctggaagcgacctcccagcctacctttccttcctcagtgaccaattcaacccatagcctgcttcctggcaccgaaaattcgggatactttcgaggatcgtactccaactcgccttcgaaccctgtcaattccagggcaaaccaagatttttccgcactcatgaggagctcataccattgtgccatgaacaatgaaaacgcaaggttgttgaccttccagacttggccacttacttttctttcccccactgatctcgcaaaagcgggattctactacataggtcccggagacagagtcgcatgtttcgcatgtggtgggaagctgtcgaactgggaacctaaggataacgcaatgtcagagcatcttcggcattttccgaaatgtccattcattgagaaccagcttcaggacacgtcaagatacactgtctcgaatctgtccatgcaaacgcacgcagcgcgcttcaagactttcttcaattggccgagctcggtgctcgtcaacccagagcagcttgcgtcagcaggattctattatgtgggcaacagcgacgacgtgaagtgcttttgctgtgacggaggtctgaggtgttgggagtcaggtgatgacccctgggtgcaacatgcaaaatggtttccaaggtgtgaatacctcattaggattaagggacaagagtttatcaggcaggtccaggcttcctacccgcaccttcttgaacaactcctttcaacctccgactcccctggtgatgaaaatgctgaatcatccattatacatttcgagccaggcgaagatcattcggaagatgcaatcatgatgaacactcctgtgattaatgcagctgtggagatggggttttcgcgctcactcgtgaagcagacggtccaacgcaagatattggcaaccggagaaaactaccggcttgtgaacgaccttgtgctcgatctgttgaacgccgaagatgaaattagagaagaggaacgtgaaagagcaaccgaggagaaagagtccaacgatctccttcttatcagaaagaataggatggccctgttccaacacctgacttgtgtgatcccaattctggattccctcctcacggccggtatcattaacgagcaagaacacgacgtcatcaagcaaaagacgcaaactagccttcaggcccgggaactgatcgataccatacttgtgaagggtaacatcgccgccaccgtctttagaaactcgctgcaggaagcagaagccgtgctgtacgagcacctcttcgtgcaacaagacattaagtatattcctactgaggacgtgtcggatctgccagtggaagagcagctcagaagattgcaagaggaacgtacttgtaaagtgtgcatggacaaagaagtctctattgtctttatcccgtgcgggcatctggtcgtgtgcaaggactgtgcgcctagccttagaaagtgtccaatctgtagatccactattaaggggaccgttcgcacgtttctgtcc

SEQ ID NO: 257489 - DNA, 1812 bp, Artificial Sequence
  derived and/or modified sequence
atgaatatagtcgagaattctatcttcctctcgaacctcatgaagtctgccaatactttcgaactgaagtacgacttaagctgtgagctgtatcgtatgtcaacatactcaactttcccggccggcgtccccgtctctgaaaggagcctcgcccgtgctggcttctactataccggcgtaaacgataaagttaagtgcttttgctgtggcctcatgctcgataattggaagcgcggcgattccccaaccgaaaaacacaagaagctgtatccctcatgtcggtttgtgcagtcactgaacagcgtgaacaatttggaggcaacttcacaaccaaccttccctagcagcgtgaccaactctacccattccttgctacccgggacagaaaactctgggtactttcgggggagttactctaactcgccgagtaaccccgtcaactcccgtgccaatcaggacttctccgccctcatgcggtcatcctatcattgtgcgatgaacaacgagaacgctcggctgctgacctttcagacgtggcctctaaccttcctgtcacccactgatctcgcgaaggcaggtttctattatatcggcccgggcgaccgcgtggcttgctttgcctgcgggggcaaactttccaactgggaacctaaggacaacgcgatgtccgagcacctgcggcatttccccaaatgtcccttcatcgagaaccagctccaggacacatcccgctacaccgtctcgaatttgagtatgcagacccatgccgccaggttcaaaacattttttaactggccgagttctgtactggttaatcctgaacagctcgcaagtgccgggttctactacgttgggaattccgacgacgtaaagtgcttctgctgcgacggaggacttcggtgctgggagtcgggagatgatccctgggtccagcatgcaaagtggtttccaagatgcgagtatcttattagaattaaaggacaggagttcattcgccaggtgcaggctagttaccctcatctgctagagcagctgttgtccacaagtgatagtcccggcgatgaaaacgcagagtcctctataatccatttcgagccaggtgaagaccactcagaggacgccattatgatgaacactcctgttatcaacgctgcagttgagatgggcttctctcgttccctggttaagcagacagtccagcgcaagattctggcaactggcgaaaactatcggctggttaacgaccttgtgctcgacctgcttaacgcggaggacgaaattcgcgaggaagaaagggagagagccacagaagaaaaggagtcaaatgacctcctgctgatccgcaaaaatagaatggcactgttccagcacctaacatgtgtgataccgattctagactccctgctcaccgcgggaattataaatgagcaagaacatgacgtcattaagcagaagacccagacgagcctgcaggcacgcgagcttatagatacaatcctggtgaaggggaatattgctgcgaccgtgtttcggaattctcttcaggaggccgaggctgtactttatgaacatctgtttgtgcagcaggatataaagtacattcccacggaggatgtgtcagatctgcctgttgaagagcagctgaggaggctgcaggaggagcgaacatgcaaggtctgtatggacaaggaggtgagcatcgtatttattccctgtggtcacctcgtggtctgtaaagattgcgccccgagcctgcggaagtgtcccatttgccgctctacaatcaagggtacagtcagaacatttctgagc

SEQ ID NO: 257490 - DNA, 1812 bp, Artificial Sequence
  derived and/or modified sequence
atgaatattgtcgagaattccattttcctttcaaatcttatgaaatccgccaacacctttgagctcaagtacgacctcagctgcgagctctatcgcatgtccacgtacagcaccttccccgctggcgtccctgtatccgagcgttcgctggcccgagccggtttctactacacgggcgttaatgataaggtcaaatgtttttgttgcggtctaatgctggacaactggaagcgcggcgattctcccaccgagaaacataagaagttgtaccctagttgtcgcttcgtgcaaagcctgaactccgtaaataatctcgaggctaccagccaaccaacattcccttcgagcgttacgaactctacccactcccttctgcccggcacagagaatagtggatactttcgtggcagctacagcaactctccctccaaccccgttaactctcgcgcgaaccaggactttagcgctctgatgcgcagttcctaccactgcgccatgaacaatgagaacgcccgcttgctaacattccaaacctggcccctcaccttcctgtctcccaccgacttggcgaaggccggcttctattacatcggtccgggtgaccgcgttgcttgcttcgcctgcggtggtaagctatccaactgggaacccaaagataatgctatgtccgaacacctgcgtcacttccccaagtgccccttcatcgagaaccagctgcaagatacgagccgctacactgtctccaacctttccatgcagactcacgctgcccgcttcaaaacgttctttaactggccatcctccgtgctggtgaacccggagcaactagcctccgcaggtttctactacgtaggcaactctgatgacgtgaagtgtttctgctgtgatggcgggctccgctgctgggagtctggtgatgacccttgggttcagcacgcgaagtggttcccgcgctgcgagtatctcatccgtatcaagggacaggagttcatccgccaggtgcaagcgagctaccctcatctgctcgagcagcttctgtcgacttccgacagccctggagacgaaaacgctgagagctccatcattcacttcgagcccggtgaggatcactcggaagatgcgattatgatgaacaccccggtaatcaacgccgcggtcgagatgggtttttcacgcagcctcgtcaagcaaaccgtccagagaaagatccttgccactggagagaactaccgcctggtgaacgatctcgtcctcgatctccttaacgccgaagatgaaatccgcgaggaggagcgagaacgcgctaccgaggagaaggagtcaaatgacctgctgttgattcgtaagaaccgcatggccctgtttcagcacttgacgtgcgtcatccccatcctcgattcgctactgactgctggaatcattaatgagcaggagcacgatgtcattaagcagaagactcagacgagcctccaggcgcgtgagctcattgacaccatccttgtaaagggaaacatagctgccacagtgtttcgcaactcactgcaggaagcagaagctgtcctctatgaacacctgttcgttcagcaggacattaagtacatcccaaccgaggacgtttccgatctccccgtcgaggagcagttgcgccgattgcaggaagaacgtacgtgtaaggtctgcatggataaggaagtttctattgtcttcatcccttgcgggcatctggtggtctgtaaggattgtgccccaagccttcgcaaatgccccatctgccgttccaccatcaaggggaccgtccgtacattccttagt

SEQ ID NO: 257491 - DNA, 1812 bp, Artificial Sequence
  derived and/or modified sequence
atgaacatcgtcgagaattccatcttcctatcgaacttgatgaaaagcgcaaacaccttcgaactgaaatacgacctgtcttgcgagctgtataggatgtctacctatagcacattccccgccggagttccggtatctgagaggtccttggcccgtgcaggcttttattacaccggcgtaaacgataaggtaaaatgcttttgttgtgggttgatgctagacaattggaagcgcggagattcacctaccgagaagcataaaaagctgtatccgtcatgtcgatttgttcagagcctgaactccgtcaacaacctggaggctacctctcagcctacattccctagtagtgttaccaactctacacactccctcctgcccggcacagagaattcagggtatttcagaggctcatacagtaattcgccgtcaaacccggttaactctcgggcaaaccaggatttctcagccttgatgcgctctagctaccattgcgcgatgaataatgagaacgctcgcctactcacattccagacttggcccctgactttcttgagccccaccgacctggccaaggcgggtttctactacatcggccctggagatcgggtagcatgtttcgcatgtggcggcaaactgtccaattgggaacccaaggacaacgcaatgtccgaacatttacggcactttcccaaatgcccatttattgagaatcagcttcaagacacgtctcgctacaccgtatcgaacctatccatgcagacccacgctgcccgtttcaaaactttctttaactggccctcctctgtgcttgttaatccggagcagctcgcctcagcaggattttactatgttggcaactctgatgacgtcaaatgcttctgctgcgatggcggactacggtgctgggagtcaggtgatgacccctgggtacagcacgccaagtggttccccagatgtgaatacctgatccggatcaaaggccaggagtttatacgccaggtgcaggcatcatacccacaccttttggagcagctgctgagcacctcggacagtccaggggacgaaaatgcagaatcctccataatccattttgagccaggagaagaccactcggaggatgcaattatgatgaatacaccagtcattaatgcggccgtcgagatggggttctcacggagcctcgtcaagcaaaccgtacagcggaagatcctagcaaccggcgagaattaccgcctggtgaacgacctggttctggacctcctgaatgccgaagacgagatccgcgaagaggagcgtgagcgcgccactgaagagaaggaaagcaatgacctgctgctgattcggaaaaatcgcatggcactctttcagcacctcacatgcgtgatacccatccttgatagcctgctgaccgctggaatcatcaatgagcaggaacatgacgttattaaacagaagacacagacctccctccaggcccgcgagcttatcgacactatactggtgaaggggaatattgccgctactgtttttcggaattcactacaggaggcggaggctgtcttatacgagcacctgtttgtacaacaggacatcaaatacataccaacagaggatgtgtcggatctgcctgttgaggagcagcttcgcagactgcaggaagaacgcacgtgtaaagtctgcatggataaggaagttagcatcgtctttatcccttgcggacatcttgtagtatgcaaggattgtgccccaagtctgagaaagtgccccatctgcaggtccacaatcaaagggacggttcgaaccttcctgtca

SEQ ID NO: 257492 - DNA, 1812 bp, Artificial Sequence
  derived and/or modified sequence
atgaatatcgtggaaaactcaattttcctctctaacttaatgaagtctgctaacacgtttgaacttaagtacgacctgtcctgcgagttatacagaatgagcacatactctacgtttccagccggagtcccagtgtcagaacggtcactggcacgggccggcttctactataccggtgttaacgataaggtaaaatgtttctgttgtggtctgatgcttgacaactggaaacggggtgactctcccaccgaaaaacacaaaaagctgtatcccagttgcaggttcgtgcagtctctgaattctgtgaataacctggaagcaactagccagccaacattcccgagctcggtgaccaacagcacgcactcattactgcccggcacggagaatagcggttattttcgcgggagctactctaactctccttccaaccccgtgaactcgcgcgccaatcaggatttcagcgccttgatgcgaagctcgtatcattgtgccatgaataatgagaacgccaggctgctgacattccagacatggccactcaccttcttgtcccccaccgatcttgcaaaggccgggttctactatataggccccggcgaccgagtggcttgtttcgcctgtggcggcaaactgtctaactgggaacctaaggacaacgcgatgtccgagcatctaaggcacttcccgaagtgcccttttatcgaaaaccagctgcaggacacatcgaggtacaccgtgagcaacttatcaatgcagacacatgcagcccgattcaagaccttcttcaactggcctagttctgtgttagtcaatcccgagcagttggccagtgcaggattttattacgtgggtaattccgatgatgtaaaatgcttctgttgtgacggtggcctaagatgttgggaatcaggtgacgacccatgggtccagcacgcaaaatggttccccaggtgtgaatacctaattaggattaagggtcaggaattcatccggcaggtgcaggccagctatccacatttgctggaacagctcctgtcgacctccgattctcccggtgatgaaaacgccgagagctctatcatccatttcgagccaggggaggaccactctgaagatgcaatcatgatgaatacgccagtcattaacgccgctgtggagatgggcttcagcaggtcgcttgtaaaacagacagtccaacgcaaaatccttgccaccggcgagaactatcgcctcgtgaatgacctggtgctggacttgcttaatgccgaggatgagatcagagaagaagaacgcgaaagggccactgaagagaaggagtctaatgacttattgctgatccgtaaaaatcgtatggcactctttcagcacctgacctgcgtcatccccatcctggatagcctcctgactgccggcatcattaacgagcaagagcacgacgtcatcaagcagaaaacccaaactagcctgcaggctagggagctcatcgacaccatcttggtgaaagggaatatcgctgccaccgtgttcagaaattccctccaagaagccgaagccgtactttacgaacacctatttgttcaacaagacattaaatatattccaacagaggatgtgagcgacctgccagtagaagaacagctgcgccggttacaggaagagcgcacctgcaaagtgtgcatggataaggaggtctctatagtcttcatcccatgcgggcacctcgtcgtatgtaaagattgtgcgcccagcctccgaaagtgtccgatctgtcggtcaacgataaaggggaccgtccgcaccttcctcagc

SEQ ID NO: 257493 - DNA, 1812 bp, Artificial Sequence
  derived and/or modified sequence
atgaatatcgtggaaaactctatttttttgagcaacttaatgaagagcgcaaacacatttgagcttaagtacgacctgagttgcgaactctacagaatgtctacatacagcactttccccgccggcgttcccgtgagcgagcgatctctggcaagagccggcttttactatacaggggtgaatgataaggtaaaatgtttttgttgtggtttaatgttagacaactggaaaaggggagactcaccaacagagaaacacaagaagctctacccatcttgtagatttgttcagagtctgaacagcgtcaacaatctagaagcaaccagtcaaccaacctttccctctagtgtgaccaattccacccatagtctactacccggcaccgagaattccggttatttccggggcagctatagcaattccccatccaatcccgtgaactcacgcgccaatcaggacttttctgctctgatgcggtcctcctaccattgtgctatgaataacgagaatgccagattattaacttttcagacatggccactgacttttttatcaccaaccgacttagctaaggctggattctattatattggccctggcgaccgcgttgcctgcttcgcttgtggcgggaagctaagcaattgggagcctaaagacaatgccatgtctgaacatctgagacacttccctaagtgcccatttatcgagaatcagctgcaggacacctcccgatataccgtttctaacctgtccatgcagactcatgctgccagattcaaaactttctttaactggccctcaagtgtactcgtgaatcccgagcaattagcttctgccggattttattatgtgggaaactctgacgatgtgaagtgcttctgctgcgacggtggcctccggtgctgggagagcggtgatgatccatgggtgcaacatgcaaagtggtttccacgatgcgaatatctcattcggattaaaggacaggaattcattagacaggtacaggcctcttatcctcacctactggagcagctactcagtacatcagatagcccgggcgatgaaaacgccgagtcctccattatacatttcgagcctggcgaggaccatagcgaagacgctataatgatgaatactccagtcataaatgctgccgtggaaatgggctttagcaggagcctagtgaaacagacagttcagaggaaaatccttgctaccggtgagaactaccgactggtgaatgatctggtcctggacctgctgaatgccgaggacgagatccgagaagaagagagagagcgtgctaccgaggaaaaggagtccaacgacctgctgctcatacggaagaacaggatggccctgtttcagcatcttacctgcgtgattcctatactcgactccctactgacagctggcattattaatgaacaggagcatgatgttataaaacaaaagacacagacctccctgcaggcccgcgaactaattgacaccatactggtcaaaggtaacatagctgccactgtgtttcggaactcactacaggaggctgaagcagtgctgtatgagcacctgtttgtgcaacaggatattaagtacatacctacagaagacgtgtctgatctaccagtcgaggagcaactgcggcgcctccaagaggagcgcacctgtaaggtgtgcatggacaaggaagtatccatcgtattcatcccatgcggccatttagtggtgtgcaaagattgtgctccttctctgagaaagtgtcccatttgtaggtctactatcaaggggactgtgaggacttttctatcc

SEQ ID NO: 257494 - DNA, 1812 bp, Artificial Sequence
  derived and/or modified sequence
atgaacattgtggagaattcaatttttctgagcaacctgatgaagtccgccaatacctttgagctaaaatatgacctgtcctgcgaactatataggatgtctacctacagtacgttcccggcgggggtgcctgtaagcgagagaagcctggctcgcgctggcttctactacacaggtgttaacgacaaggtgaagtgcttctgttgtgggctgatgttggacaactggaagcgaggggattctcccacggaaaagcacaaaaagttgtatcctagttgcaggtttgtacagagcctgaacagtgtgaataatttggaggccacatctcaaccaacattcccttccagtgtcaccaactcaacacacagcttattgcccggcactgaaaatagtggatactttaggggctcatactcaaactcgcccagcaaccccgtcaatagtagagccaaccaagatttttcagcactgatgagatcctcctatcattgcgcaatgaacaatgaaaatgcaagactgctcaccttccagacttggcccttgaccttcctaagtccaaccgaccttgccaaagctgggttttattacatcggaccaggcgatagagttgcctgcttcgcttgtggaggaaaactcagcaattgggagcctaaggacaatgcgatgagtgaacatttgcgacattttcccaagtgcccatttatcgagaatcagctgcaggacaccagtcgatataccgtgagcaatctctccatgcaaacccacgccgccaggttcaagacctttttcaattggcctagcagcgtcctcgtgaacccagagcagcttgcctctgctggattttactacgttggcaactctgacgacgttaagtgcttttgttgtgatgggggccttcggtgctgggagagtggagatgacccttgggtgcaacatgccaaatggtttcccaggtgcgagtatcttatacgtataaagggacaggagtttataaggcaggtccaggcatcatacccccacctgctggagcagctgctgtctacttccgattctcctggcgacgagaacgctgagtcatcaattatccacttcgagcctggagaagatcacagtgaggatgccatcatgatgaacactccggtgataaacgcagccgtggaaatggggttcagtcgcagtctggtgaagcaaaccgtgcagcggaagatcctggcaaccggagagaactatcgcctggtaaacgacctggtactggatctgctaaacgccgaagatgagattcgagaagaagagcgcgaacgcgcgacagaagaaaaagaaagcaacgacctattgctgattcgaaaaaataggatggcactgtttcagcatctaacttgcgtgattcctattttggattcgcttcttaccgcgggcataattaacgaacaggaacacgatgttattaagcagaagacacagacgtctcttcaggcccgggaactcattgacaccattctggtcaaaggcaatattgccgcaactgtgttccgcaattcactacaggaggcagaggctgtgctgtatgagcacctgttcgtgcagcaggatatcaaatacatccctacggaagatgtcagtgatttgccagtcgaggagcaactcaggagactccaggaggagcgcacatgcaaggtctgcatggacaaagaagtgagcattgtgtttatcccttgcggtcatctggttgtgtgcaaagactgtgccccgtcgctccgcaagtgccccatctgccgttcaacaatcaaaggcactgttaggacatttctgtcc

SEQ ID NO: 257495 - DNA, 1812 bp, Artificial Sequence
  derived and/or modified sequence
atgaatatcgttgagaatagcattttcctgtcaaatctgatgaaatccgccaacacctttgagctgaagtatgacctcagttgtgaactgtatcgcatgagtacctatagcacatttccagcaggcgtgcctgtgtcagagaggtcccttgcacgggcggggttttattacacaggggtcaatgacaaagtcaagtgcttttgctgtggactcatgttggacaattggaagcgcggagactcaccaacagagaagcataagaaactttaccccagctgtcgctttgtgcaaagtttaaactcagttaataatctggaggctacctcccagcctaccttcccctcctccgtgacaaactctacccacagtctgctgccaggaaccgaaaacagcggatatttccgtggaagttacagcaatagtcctagcaacccagtgaattcgagagccaaccaagactttagcgcactgatgcgtagcagctaccactgcgccatgaataacgagaacgcacggttactgacctttcagacatggccactcacgtttctctctccaacggacctggcaaaagcaggtttctattatattggacccggggatcgcgtagcgtgcttcgcctgcggtggaaagctgtctaactgggaacccaaggataatgccatgagcgagcaccttcgccatttccctaagtgcccctttatcgagaatcagctccaagacacttccaggtataccgtttccaacttgtctatgcagactcacgcagcaagatttaagacatttttcaactggccctctagcgtgttggtcaacccagaacaactggcatcggcaggattttactacgtgggaaactccgatgacgtcaaatgtttctgctgtgatggagggctgagatgttgggaaagtggagacgacccctgggtgcaacatgcaaagtggttcccgcgctgcgagtatctcatacgcataaaggggcaggagttcattagacaagtccaggcatcctatccccatctgttggaacagcttttatctacttccgactcccccggggatgaaaacgctgaaagtagcatcattcattttgagcccggagaggaccattctgaagatgccatcatgatgaacactcccgtaatcaatgcagcagtagaaatgggtttctctaggagcttagtcaaacagacagtgcagcggaagatacttgcgaccggagaaaattatcgcctggtgaatgacctagttcttgaccttctgaacgcggaagatgaaattagagaagaagagagagagagagctactgaggaaaaggaatctaatgatttgctgctcattcgtaagaatagaatggctctattccagcacttgacctgcgtaatcccgattctcgattcgctcctgaccgccggcatcatcaatgagcaggaacatgacgtgatcaaacagaagacccagacatcgctccaggccagagagcttatcgacaccattcttgttaagggtaacattgctgctacggtgttccgcaatagcctgcaggaggctgaagctgtgctctacgaacatctgttcgtacagcaggacatcaaatatattcccacggaggacgtgtccgacctgcccgtggaagagcagctaagaagactgcaggaagaaagaacttgcaaggtctgtatggacaaggaggtctctatcgtattcattccgtgcggacacctggtcgtctgcaaagattgcgccccttctctaaggaagtgccccatttgccgctccacaatcaagggcactgtcagaacctttctgtct

SEQ ID NO: 257496 - DNA, 1812 bp, Artificial Sequence
  derived and/or modified sequence
atgaacatagtggagaattccatatttctgtccaatctaatgaaaagtgctaacactttcgagttgaagtacgacctctcttgtgaactgtatagaatgtcgacctattcaacctttcccgccggagtgcccgttagcgagaggtctctggctagagccgggttctactatacaggggtcaacgacaaggtgaaatgtttttgttgtgggctgatgctggataactggaaacgaggagattcacctactgaaaagcacaagaagctgtacccgtcttgccgatttgtccaaagcctgaacagcgttaataatttggaagccacaagtcagccgactttcccaagttccgttactaatagcacccactcgctgcttcctgggaccgagaatagcgggtacttccgaggatcttatagtaatagcccgagtaacccggtcaactcaagggctaaccaggattttagcgcattaatgaggtcttcctaccattgcgcaatgaacaatgagaatgctcgattgctgaccttccagacgtggccccttacatttctgagccccactgacctcgcaaaggcaggtttctattatattggtcccggtgatagggttgcttgcttcgcatgcggcggaaaattatctaattgggagcctaaagataacgctatgtccgaacatctgcgtcattttccaaaatgtcctttcattgaaaatcagctgcaggacacctcgagatataccgtgtctaacctgtcaatgcagacccacgccgccagatttaagacctttttcaactggccttctagcgtgctggtgaatccagagcagttggcctccgcagggttttattacgttggtaactctgacgacgtgaaatgtttctgctgcgacgggggtctcaggtgttgggaaagtggagatgatccttgggtccaacacgccaaatggttccccagatgcgagtatttgattagaatcaaggggcaggaatttattcggcaagtacaggcaagctaccctcatttactggagcagctcctgagcacatccgatagcccaggggatgagaatgcagagtctagcattatacacttcgaacccggcgaggaccacagcgaagatgctatcatgatgaatactcccgtgattaacgcagccgtcgagatgggcttcagtagatcccttgtcaaacaaacagtccagcgtaagattctggcaaccggcgagaattaccgtttagttaatgacttggtactcgatctgctgaacgcagaagatgagataagggaggaggaaagagaacgtgcgacagaggagaaggagagcaatgatctgctgctcatcagaaaaaacagaatggcattgttccagcatctgacttgtgtaattcccatcctggacagcctgctgaccgccggcatcataaacgagcaggaacatgatgttataaaacagaaaacccagacctccctacaggcacgagagcttatcgataccattctagtcaaggggaatatcgcggctactgtcttcagaaattctctgcaggaagccgaggcggttctgtatgagcatctgttcgttcagcaggacattaaatatatcccgacggaagacgtgtctgatctgcctgtagaagaacaactgcgacggttgcaagaggagcgcacatgtaaggtgtgcatggataaagaggtgtctattgttttcataccgtgtgggcacctggtggtgtgcaaagactgcgcaccaagcctcaggaaatgccccatttgtcgctccacaattaaaggtacagttcgtaccttcctgagc

SEQ ID NO: 257497 - DNA, 1812 bp, Artificial Sequence
  derived and/or modified sequence
atgaatattgtggagaattcaatcttcctgtccaatttgatgaaatccgccaacaccttcgagctgaaatatgatctatcttgtgaactatacagaatgtcaacttattcgacttttcccgcaggtgtgcctgtctcagagcgcagccttgccagggcagggttctattataccggagtgaatgataaagtcaagtgtttttgctgtggcctcatgctcgataactggaagaggggggactccccgactgagaaacacaaaaagctgtatccttcgtgtaggttcgtgcaatctctcaacagtgtcaataacttagaggccacatcccagccgacatttccaagcagcgtgactaacagtacccatagtctgctgccaggaacagaaaactctggatattttcggggaagttattctaattcccccagcaacccggtgaactctcgcgccaaccaggacttttccgctctcatgaggagttcctatcactgtgctatgaacaatgaaaatgccagactcctcactttccagacttggcctctcacctttctgtcccctactgacttagcaaaagcagggttttactatatcggccctggcgaccgcgtcgcctgctttgcctgtggcggaaaactcagcaactgggagccgaaggacaacgccatgagcgagcatctgcgccactttcccaagtgtccatttatcgaaaatcagctccaggacactagcagatatacagtgagtaatctgtcgatgcagactcacgcagctagatttaagactttcttcaattggcccagctctgtacttgtcaatccggaacagctggcctcagccgggttctactacgtaggcaattccgatgacgtcaagtgtttctgttgtgacggtgggctccgttgttgggagagtggtgacgacccttgggtccagcacgctaagtggtttccgaggtgtgagtatctgattcgcatcaaagggcaggagtttatcaggcaggtgcaggcctcctacccacatcttcttgaacagctactttccacttcggatagtcctggtgatgagaacgccgaaagttctataattcactttgagccgggcgaggaccattctgaggatgctattatgatgaatacgcccgtgattaatgctgctgtggaaatgggtttcagccgctcactcgtgaaacagactgtccaaaggaagatcttggctacaggagaaaattaccgcctcgttaatgatctggtcctcgatttgctgaacgcagaggatgaaatccgagaggaggagagggaacgcgcaacagaggagaaagaatccaacgacctactgcttattcgtaagaaccggatggctctattccaacacctgacttgtgtcatacccattctagactctttgctgaccgctggcatcatcaatgaacaagagcatgacgtaataaaacagaaaacacaaacctccctgcaggcacgagaactgattgacactatcctggtcaaagggaacatcgccgcaactgtgttcagaaatagcctgcaggaggctgaggctgtcttgtacgagcacctgttcgtgcagcaggacatcaaatacattccaaccgaagacgtctccgacttgccggtggaggagcagcttcgaagactccaggaagagcggacatgtaaagtgtgcatggataaggaggtctcgattgttttcattccatgtgggcacctggtcgtctgcaaagactgcgcccccagtctccgtaagtgccccatttgccggagcaccatcaaagggaccgttagaacctttctgtct

SEQ ID NO: 257498 - DNA, 1812 bp, Artificial Sequence
  derived and/or modified sequence
atgaacatcgtggaaaattctatttttctgagtaacctaatgaagtccgcaaatacattcgaacttaaatacgatctgtcatgcgagctgtaccgaatgtctacgtacagcacctttcctgccggggtcccggtcagcgagcggtctctggctagagcaggtttttactataccggcgtcaacgacaaggtcaagtgcttctgttgtggtcttatgttggacaattggaagagaggtgattcacccaccgaaaaacacaaaaaactatacccgtcttgccgctttgtacagtcattgaactcagtaaacaacctcgaggccacctctcagccgacttttccatcatctgtaacgaactcgacacattctcttctgccgggcaccgaaaattctggatatttcaggggctcttatagtaactcaccctccaatcccgttaatagtagagctaatcaggacttctccgctctgatgcgctccagctaccattgcgcgatgaacaatgaaaacgcaagactactgacctttcagacctggccactaaccttcctttctccaaccgacttggccaaggccggcttttattacattggcccaggtgacagagtggcttgtttcgcctgcggcggcaaattgtccaattgggaacctaaggataacgcgatgtctgagcatctgcgacacttccccaagtgccccttcatagaaaatcagttgcaggatacttccaggtacactgtgtcaaacctcagcatgcagacccatgccgctcgcttcaagactttctttaactggccaagcagcgtcctagtgaacccagaacaactggcctcagcgggcttttactacgtgggtaactcagatgacgttaaatgcttttgctgcgacggtggtctgcgctgctgggagtctggtgatgatccgtgggtacagcatgccaaatggtttcctagatgtgagtatttgattcggatcaagggccaggagttcatccgccaggtccaagcttcttatccacatctactcgagcagctcctgtcaacatcagatagccccggagatgaaaatgccgaatcatctatcatccattttgagcctggcgaagatcacagcgaagatgctattatgatgaacaccccggtaattaatgccgccgtggaaatggggttttcccgctctctggtcaaacagacagttcagagaaaaatcctagctaccggggagaattatcgtttggtaaacgatctggtgctggatctgctgaacgccgaggatgagatacgagaggaggagcgtgagcgggctacagaggaaaaggaaagtaacgacctgctgctgattcgaaaaaacaggatggccctgttccaacatctcacctgcgtaatccccattctggacagcctgctgaccgccgggattatcaatgaacaggagcatgacgtgattaagcagaagactcagacaagcttgcaggctcgggagcttattgacactattctggtcaaaggcaacattgcagccactgttttccgtaattcacttcaagaggcggaagcagtcctctatgaacacttattcgtccagcaggatatcaagtatattcctacggaggacgtttctgacctgcccgtcgaagagcaactccgaaggctccaagaggagagaacctgtaaggtgtgcatggataaggaagtgagcattgtttttattccctgtggtcatctggtcgtttgcaaagactgcgcccctagtctcagaaagtgccccatctgtagatcgacgattaagggcactgtgaggacgtttctgagc

SEQ ID NO: 257499 - DNA, 1812 bp, Artificial Sequence
  derived and/or modified sequence
atgaacattgtcgagaactcgattttcctgtccaaccttatgaaaagcgcaaatacttttgagttgaagtacgacctgtcgtgtgagctttaccgcatgtctacgtactccaccttcccagcaggggtgcctgtgtcggagagatcactggcacgcgccggcttttactacaccggagttaatgataaggtcaagtgcttctgttgcggactgatgctcgataattggaaaaggggtgattcgcctactgaaaagcacaagaaactttaccctagctgtcggtttgtgcaatccttgaactcggtgaacaacctggaagccacctcgcaacccactttcccatcgagtgtcacgaatagcacgcactccctcttgcccggaaccgaaaactcgggatactttaggggttcctactcgaactccccttcaaatcccgtcaacagcagagctaaccaggatttctccgcactgatgcgctcatcgtaccattgtgctatgaacaacgagaacgctaggctgttgactttccaaacctggccacttacttttctgtcgccgaccgacctggcaaaggcgggattctactacatcggaccaggggaccgcgtggcatgctttgcatgcgggggaaaactcagcaactgggaacctaaggacaacgcaatgtccgagcatcttcgacacttcccaaagtgcccctttatagagaaccaacttcaagatacttccaggtatactgtgtcgaatctgagcatgcagacgcacgcagcaagatttaagaccttcttcaattggccttcttcggtcctcgtgaatccagaacaactcgcatccgccggtttttactacgtgggtaacagcgatgacgtcaagtgcttttgttgtgatggaggactgagatgttgggagtccggagacgatccttgggttcagcacgccaaatggttcccaagatgtgaataccttatccgtatcaagggacaagagttcattagacaggtgcaagcctcctacccccatctcctggaacaacttctttcaacttccgactcgccaggagatgaaaacgccgaatcctcgattattcatttcgaaccaggggaagatcactccgaggacgcaatcatgatgaatactcccgtgattaacgcagcagtggagatgggattttcacgctcccttgtgaagcagactgtgcaacgcaagatactcgccactggggagaactatcgactggtcaatgacctggtgcttgatctccttaacgccgaagatgagatcagagaggaagagcgcgaacgagcaaccgaagagaaagagtcgaacgacctccttttgataaggaaaaatcgcatggcactttttcagcatctgacttgcgtgataccaattttggactcgctccttactgcaggaatcataaacgaacaagaacatgatgtcattaagcaaaagactcaaaccagccttcaggctcgcgaacttatcgacactatcctggtgaagggcaacatcgccgccactgtttttcgtaactctttgcaagaagcggaagcggtgctgtacgaacatctttttgtgcaacaagatatcaaatacattccaaccgaagatgtgtcagacctccctgtggaggaacaactgcggaggttgcaggaggaaagaacgtgtaaggtttgcatggataaggaagtttccattgtgttcataccatgtggtcatctggtggtctgcaaagattgtgctccatcgctcagaaaatgtcctatctgtaggtccaccatcaaaggcaccgtgagaacttttctttcc

SEQ ID NO: 257500 - DNA, 1812 bp, Artificial Sequence
  derived and/or modified sequence
atgaatattgtggaaaactccatttttctctcaaatctcatgaagtcggcgaatactttcgaacttaagtacgatctttcgtgcgagctctaccgaatgtccacctactcgacgttcccggccggggtgcccgtgtcggagcgcagcctggccagagccggattttactacactggagtgaacgataaagtgaagtgcttctgttgtggccttatgctggacaattggaaacgcggggattcaccgactgaaaagcataagaagttgtacccatcttgtcgttttgtgcaatctctcaattccgtgaataaccttgaggcgacctcccaacccaccttcccttcgagcgtgaccaattccacccactccttgctgcccgggactgagaactcgggatactttcgtgggtcgtacagcaattccccatcgaaccctgtcaactcaagagcaaaccaggacttctcagcgctcatgagatcctcctaccattgcgctatgaataacgaaaatgcccggctgctgacttttcaaacctggccactgacctttctgagcccgactgatttggcaaaggcaggtttctattacattggaccgggagatcgcgtcgcttgttttgcatgtggaggtaagctctccaactgggaacccaaagataatgcaatgtcggagcaccttcgccattttcctaagtgtcccttcatcgagaaccaactgcaggatacctcgcgatacactgtgagcaacttgagcatgcaaacgcatgcagcaagatttaagacttttttcaactggccttcatcggtgctggtgaaccctgagcaactggcctcagcaggcttttactacgtgggcaactcagatgatgtgaaatgtttctgctgtgacggtgggttgcggtgttgggaatccggagatgatccctgggtccaacatgccaaatggttcccgcgctgtgagtatttgatacgaatcaaggggcaggagtttatacggcaagtgcaggcttcctatccccacctcctggaacagctgctttcgacgtccgacagcccaggagatgaaaacgcagagtcatcgattattcacttcgaaccaggtgaggaccattccgaggatgccataatgatgaacaccccagtgatcaacgcagctgtcgaaatgggattttcccgttccctggtgaagcaaaccgtgcagcgcaagattctggcaaccggcgagaactaccggctggttaatgacctcgtgcttgatcttctgaatgccgaagatgaaataagagaagaagagagagaaagagcaaccgaagaaaaggaatccaacgatcttctgctgatacgcaagaataggatggccttgtttcagcatctcacttgcgttattcctatcctggacagccttctgacggctgggatcatcaacgagcaagagcatgatgtgattaaacaaaaaacccagaccagcttgcaagcccgcgaactcatcgatactattcttgtgaaaggaaacattgcggcaaccgtgtttagaaactcacttcaggaagcagaagccgtcctgtacgaacatctgtttgtccaacaggacatcaaatacatacctaccgaggacgtgagcgacctccctgtcgaagagcagcttcgacgacttcaagaagaacggacttgcaaggtctgtatggataaggaagtgtccattgtgttcatcccttgtggacatctcgtggtctgtaaagactgcgcgccttcacttcgcaagtgtccaatctgccgtagcaccataaagggtactgtccgaacctttctttca

SEQ ID NO: 257501 - DNA, 1812 bp, Artificial Sequence
  derived and/or modified sequence
atgaacatcgttgaaaactccatcttcctcagtaacttgatgaagtccgcaaacacattcgagctgaaatacgacctgtcatgtgagctgtatcgcatgtccacctactccactttccccgccggagtgccagtgtccgaacgctcccttgcgcgcgccggattctattacaccggtgtgaacgacaaggtcaagtgcttctgttgtggtcttatgttggataactggaaaaggggagattcaccgaccgagaaacacaaaaagctgtacccgtcctgtcgatttgtgcagtcgttaaattcggtgaacaaccttgaggctacaagccagcccaccttcccttcttccgttaccaactcaacacatagcctgctccccgggacagagaacagtgggtactttcgcggctcttatagcaactccccctctaatccagttaacagtagagctaaccaggactttagtgctctgatgagaagcagttaccactgtgctatgaacaacgagaatgctcgcctactgacctttcagacatggccacttacctttttaagccctacggatctggccaaggctggcttctattatataggaccaggcgatcgcgtggcttgctttgcctgcggcgggaaactgtccaactgggagccgaaagacaatgctatgagcgagcacttaagacatttcccgaagtgtcccttcatagagaaccagttgcaagatacatctcggtacacagttagcaatttaagcatgcagacacatgctgccaggttcaaaaccttcttcaattggccctcgtccgtgctcgtgaatcctgagcaattagcatccgccggattctattacgtcgggaactccgacgacgtcaagtgcttctgctgtgacggaggtctgcgttgctgggagtcgggagatgacccgtgggtgcagcatgccaaatggttcccaagatgtgagtatctgatccgcataaagggacaggagtttatccggcaggttcaggctagttacccccacctgctcgaacagttactgtcaacctctgattcaccaggggacgaaaacgcagaaagctctattattcatttcgagcctggagaagaccacagcgaagacgcaataatgatgaacactcccgttattaacgcagcagttgaaatggggttcagccggtccttggtgaagcagactgtccagagaaaaattcttgctaccggagaaaattaccgcctggtgaacgatcttgtgctagacctgctaaacgcggaggacgagattagagaggaagagcgcgaacgcgcgaccgaggagaaggagtctaacgatctgctgctcatcagaaagaaccggatggctctttttcaacacctgacgtgcgtcatcccaattttagatagccttctgaccgctggcataatcaatgagcaagagcacgacgtgattaagcagaagacccaaacatcgctgcaggcgcgagagctgatcgatacgatcctggtgaagggaaatatagcagccactgtttttaggaacagcctccaagaggccgaggctgtgttgtacgagcacctgttcgtgcaacaggatatcaagtacatccctaccgaggacgtgagcgacctacctgttgaggagcagctcagaaggctgcaggaggagagaacttgcaaggtgtgcatggacaaggaggtatcaattgtgtttatcccatgcggacatttagtcgtttgtaaagattgtgccccgagcctcagaaagtgccctatttgtaggagcaccatcaaggggactgtcagaactttcctgagt

SEQ ID NO: 257502 - DNA, 1812 bp, Artificial Sequence
  derived and/or modified sequence
atgaacatcgtggagaactccattttcttgagcaacctgatgaagtcagcgaatacttttgaattgaaatacgacctgtcgtgcgaattgtaccggatgtcaacctattccacttttcccgcaggcgtccctgtgtccgaaaggtcgctcgcgcgcgccggcttctactacaccggagtgaatgacaaagtcaaatgtttctgttgcggactgatgctcgacaactggaaacggggggactccccgacggaaaaacacaagaagctctacccttcctgcaggttcgttcaatcccttaattccgtgaataacctggaagcgacttcgcagcctaccttcccgtcctcggtgaccaacagcactcactccttgctgccaggaactgagaattcgggatacttccggggaagctactcgaatagtccaagcaatccagtgaattcgcgggcaaaccaggacttctccgcactcatgagatcgtcctaccactgcgctatgaacaatgagaacgcccggctgctgacttttcagacttggccactgactttcctctctcctactgatcttgctaaggccggattctactacattggacccggagatagagtagcttgtttcgcttgtggtgggaagctgtcgaattgggaaccgaaagacaacgccatgtccgagcatcttagacatttcccgaagtgcccgtttatcgaaaaccaactgcaggataccagccgctacaccgtgtccaacttgagcatgcagactcacgctgcccgatttaagacgtttttcaattggccatcaagcgtacttgtgaacccggagcagctcgcctctgcaggattctattacgtgggcaactcggacgatgtgaaatgcttctgctgcgacggagggctccggtgctgggaatctggcgatgacccgtgggtgcagcacgctaagtggtttccgcgatgcgaatacctgattaggatcaaaggccaggaattcatccgtcaagtccaggcatcatacccgcatctgctcgagcaactgttgagcacttcagacagccccggagatgaaaacgccgagtcatcaatcatccacttcgaaccgggagaggatcattccgaggacgcgatcatgatgaacactcctgttatcaatgccgcggtggaaatgggattctcacgcagccttgtcaagcagactgtccagagaaagatccttgccactggagagaactaccgcttggtgaacgacctggtgctggatctgctgaacgccgaagatgaaatcagagaggaagaacgggaacgcgccacggaagaaaaggaatcgaacgaccttctcctcattcgcaagaaccggatggcactctttcagcatcttacttgtgtgattccaatcctcgacagcctgcttacggccggtattatcaacgaacaggaacacgacgtgatcaagcagaaaacccaaacgtccctccaagctcgggagctcattgacaccatcctggtgaagggcaatattgctgctactgtgttcagaaactcgctgcaagaagcggaggccgtgctgtacgagcacctcttcgtgcaacaggacatcaagtacattccgaccgaggatgtctccgatctcccagtggaggagcagctgcgccggctgcaggaagagagaacctgtaaggtttgtatggacaaggaagtttcgattgtgttcataccatgcgggcacctggtggtttgtaaggattgcgcaccgagcttgcgtaagtgtcccatctgtcgctctactatcaaagggactgtgcggaccttcctgagc

SEQ ID NO: 257503 - DNA, 1812 bp, Artificial Sequence
  derived and/or modified sequence
atgaatattgtggagaactcaattttcctgagtaaccttatgaagtccgccaacaccttcgagctaaagtatgacctgtcgtgcgagctttatagaatgtccacctactccacctttcctgcaggagtccctgtgtccgaacgctctcttgcccgagccggattctactacacaggcgttaatgataaggtcaagtgtttctgctgtggattaatgctggacaattggaagaggggggacagccccacagagaagcacaagaaactgtacccctcgtgtcgatttgtgcagtcattaaactctgtcaacaatctggaggcaacctcacaacccacgttcccttcgtccgtcactaattccacccatagtctgctgcccgggacagaaaattccgggtactttcgcgggtcctactccaattcgccttctaacccggttaactcaagggctaaccaagactttagcgctttaatgaggagttcataccattgcgcgatgaacaatgaaaatgcacgactgctaacatttcaaacgtggccactcacctttctgtctccgactgacctagctaaggctgggttctactacatcggacctggtgatcgcgtggcctgctttgcctgcggcggcaagctgtctaactgggaaccaaaggacaacgccatgtccgagcatctgagacatttccctaagtgcccattcattgaaaatcagttacaggatacttctcgatacaccgtgtctaatctgtctatgcaaacacatgctgctaggttcaaaacatttttcaactggccgtcatccgtcttggttaacccagagcagctcgcatccgcggggttctactatgtggggaacagtgacgatgtgaaatgcttctgttgcgatggaggactgcgctgctgggaatctggcgatgatccatgggtgcagcacgccaagtggttccccaggtgtgagtatctgatcaggattaagggtcaggagttcattcggcaagttcaggcctcatatcctcacttgctcgaacagctcctgagcacaagcgattccccaggtgatgagaacgccgaaagctctataattcatttcgagccaggagaggaccatagtgaggatgccatcatgatgaacacccctgtgatcaacgcggcggtcgagatgggctttagtagatccttagtgaagcaaactgtgcagaggaagatactggcaactggagaaaactatcgcctcgtgaatgatctagtcttggacttgctaaacgcagaggacgaaattcgggaggaggaacgagaaagggccactgaagagaaagaaagtaatgacctgctgttaatacgcaagaatcggatggctttgtttcagcatttgacctgtgtgatccccattctcgactcactccttactgctggaattatcaacgagcaggagcatgatgttatcaagcagaaaactcaaacgagtctccaggctcgggagctaattgacaccatcctggtgaaagggaatatcgctgcaactgtgttcaggaactccttacaagaagccgaagcagtcctgtacgagcatctgtttgtgcaacaagacatcaagtacatacctactgaagacgtctcagacttgcccgtggaggagcagcttagaagactacaggaggaacgtacctgcaaggtgtgtatggacaaagaggtttctattgtgtttataccatgtggccatctcgtcgtgtgcaaagattgcgctccttcattgagaaaatgtccaatctgccgatcaacaattaaaggaaccgtgagaaccttcctgagt

SEQ ID NO: 257504 - DNA, 1812 bp, Artificial Sequence
  derived and/or modified sequence
atgaacattgtggagaattccatctttctttcaaacctgatgaaatctgcaaatacattcgaactgaagtatgacctatcttgcgaactgtatcggatgagtacctacagcacctttcctgccggggtgcccgtgtcggaacgctccctggcccgcgcgggcttctactacaccggggtaaacgataaagtcaaatgcttttgctgtgggctgatgctggacaattggaagcggggggattcccctacagagaaacataagaaactttatcccagctgccggttcgtgcagagcttaaactctgttaataatcttgaagctacctcgcagccaacattcccgagctctgttaccaatagcacacattcccttcttcctggaaccgagaattctggctatttccgtggctcctattcaaactcaccctccaaccccgtgaactccagagctaatcaggactttagcgctctgatgcggagttcatatcattgcgccatgaataatgagaatgctcgtctgcttacctttcagacctggcccttgaccttcctctccccaaccgatttggccaaggcgggcttctactatataggccctggagatcgggtggcttgttttgcctgtggcgggaagctgtccaactgggaacctaaggacaacgccatgtctgagcatctgaggcactttccgaagtgccctttcatcgagaaccagctgcaggatacatcacgttacactgttagcaacctgagcatgcagactcatgcagcgcggttcaaaaccttctttaattggccatctagcgtgctggtgaatccggaacaactagccagcgccgggttctattacgttggaaacagcgatgacgtgaaatgcttctgctgtgatggagggcttcgatgttgggagtcaggcgacgatccatgggtgcaacatgccaaatggttcccacgatgtgagtacctgatcaggatcaagggtcaagaatttatccgtcaggtgcaggcatcttatccccatttgttggagcaactgctgtccacaagtgatagcccgggggatgagaatgccgagagctctatcatccacttcgaaccgggtgaagaccactcagaagacgctatcatgatgaatactcccgtcattaatgccgccgtagagatgggattctcacgaagtctagttaagcagacagttcaacgtaaaattctggccactggcgaaaactaccgtctcgttaacgaccttgttctagatctgcttaacgcagaggacgagatccgcgaggaagaaagagagcgggccacagaagagaaggaatccaatgacttactgctcattcggaaaaataggatggcattatttcagcatctcacctgcgtgatacctattctggactcactgctcaccgccgggatcattaacgagcaagagcatgatgtcataaagcaaaaaacacagacatcactgcaggcccgcgagctcattgatactattctggtcaagggaaatattgccgccacagtatttcgcaacagcttgcaggaggccgaggccgtcctgtatgagcatctttttgtgcagcaggatatcaagtatatccctactgaggatgtcagtgacctgcctgtggaagaacagttaagaaggctgcaggaggaacgcacctgcaaggtgtgtatggacaaagaggtttccatcgtgttcatcccctgtgggcatcttgtggtttgtaaagattgtgcaccctctcttaggaagtgccctatctgtaggtctacaataaaaggcacggtgcgcacatttctgtcc

SEQ ID NO: 257505 - DNA, 1812 bp, Artificial Sequence
  derived and/or modified sequence
atgaacatcgtggagaattccatcttcctctcaaaccttatgaagtccgcgaacacgttcgagctgaagtacgacctgtcgtgcgaattgtaccggatgtctacctactcgacgttcccggcgggagtgccggtatcggaacgtagtctcgcacgcgctggtttctactacaccggagtgaacgataaagtgaagtgcttctgctgcggactcatgctggataattggaaaagaggggatagcccaactgagaaacataagaaactctacccttcttgtcggttcgttcagtcgctgaactcagtgaacaatttggaggccacttcacaaccgactttcccatcctcggtgactaactcaactcactccctgctgccgggcactgaaaatagcggatactttcggggaagctacagcaactccccatcgaatcccgtgaattcgagagccaatcaggatttttccgctttgatgcgctcttcgtatcattgcgcgatgaacaatgagaacgctcggctgctgacgttccaaacgtggcccttgacttttcttagccctaccgatctggccaaagccggattctactacatcggtcccggcgaccgcgtggcctgtttcgcgtgcggaggcaagttgagcaactgggaacctaaggacaacgcgatgtccgaacacctgaggcattttccgaagtgcccgttcatcgaaaatcagctgcaggatacttcaagatacaccgtctcgaacctctctatgcaaacgcatgccgcccgtttcaagaccttctttaactggccgtccagcgttctggttaacccagaacagttggcatcggcaggcttctattacgtcgggaacagcgacgacgtcaaatgtttttgctgcgacggtggacttaggtgttgggagtccggggacgacccttgggtccagcacgcgaaatggttcccgaggtgcgaataccttatccgcatcaagggtcaggaattcatccgccaggtccaggctagctatccacacctcctggaacagctcctcagcaccagtgactcgccaggcgacgaaaacgccgagtcatcaatcattcacttcgagccgggcgaggatcatagcgaggatgcgatcatgatgaacacccctgtcattaacgcagctgtcgaaatgggattctctcgcagccttgtcaagcagaccgtccagcggaagatcctggcaaccggagagaattacagactggtgaacgatctggtgctggatttgctgaatgcagaggacgaaatccgcgaggaggagcgagaacgcgctaccgaggagaaggaatcaaatgatctgctgctcatcagaaagaacagaatggccctcttccaacacctgacctgtgtaatccctatccttgactccctgcttactgcaggaattatcaacgaacaagaacacgacgtaatcaaacaaaagacccaaaccagcttgcaggcccgggaactgattgacactattctcgtcaagggtaatatcgctgcgactgtgttccggaactcgcttcaagaagccgaggcggtgttgtacgagcacctgtttgtgcagcaggacatcaagtacatcccaacggaagatgtgtcggaccttccggtcgaagagcaacttcgccgactccaggaagagcgcacctgcaaggtgtgcatggacaaggaagtttcgatagtgttcatcccgtgcggacacctcgtggtttgcaaggactgcgcgccgtcactgaggaaatgcccgatttgtcgctccactataaagggaaccgtccggacctttctgtcg

SEQ ID NO: 257506 - DNA, 1812 bp, Artificial Sequence
  derived and/or modified sequence
atgaatatagtggaaaattctatattcctatccaaccttatgaaaagtgctaatactttcgaattgaaatacgatctctcttgtgaattgtatcggatgtctacatattccacttttcctgctggagttcccgtgagtgaacgttctctggcccgagctggattttattatactggagttaacgataaagttaaatgtttctgttgcgggttaatgctcgataattggaaacggggggactcccccacagaaaaacataaaaaactgtacccctcttgccggttcgtgcagtccctcaattctgttaacaatctggaagccacaagtcagcctactttcccttcttctgtgacgaattccactcattctctcctgcctgggacagaaaattcagggtattttagagggagttattccaactctcctagtaatcccgtgaattctcgcgccaaccaggatttcagtgctctcatgcgctcaagttaccactgcgccatgaacaacgagaatgcaaggctactgacttttcagacatggcccttaacttttctcagtccaacagatctcgctaaagccggattttattacatcgggccgggagatagagtagcctgttttgcatgtgggggaaaactgtccaactgggaacctaaagataatgccatgtccgagcacctaagacactttcccaaatgtccctttatcgagaatcagctccaggatacatctcgatatactgtatctaacctctccatgcagacgcacgccgctcggtttaaaactttctttaactggccttcgtcagtcctcgtgaaccccgagcagctagcttctgccggattctattacgttgggaactcagacgatgtaaaatgcttctgttgtgatggaggactgagatgctgggaatctggggatgatccatgggtgcagcatgccaaatggtttccaagatgcgaataccttatcaggataaaaggacaggagttcatacggcaggtgcaggcctcctacccccatctcctcgaacagctgctgtcaacttcagatagtcccggagatgagaatgccgagagtagtataattcattttgaacccggggaagatcactctgaggatgccataatgatgaacacaccagtcatcaatgccgctgtagaaatgggattctcccgctccctggtaaaacagacagttcagaggaagattctagcaacaggagaaaattatcgacttgtgaacgacttagtgttggacctgcttaacgcagaggatgaaataagagaggaagagcgagaacgcgctacagaagaaaaagaatcaaatgacctcctcctgatacgcaagaatcgaatggccttgtttcagcatctcacatgtgttatacctatcctcgatagtctccttacagccgggattataaatgaacaggaacacgatgtcataaaacagaaaacacagacttctcttcaagcacgtgaacttattgatacaatactagtgaaaggaaacatcgccgccacggtattccgcaactctctccaggaagcagaagcggtgctgtacgaacatctgtttgttcagcaggatataaaatacataccaacagaggatgtctcggatttgcccgtggaagaacagcttagaaggctacaggaggaacggacatgtaaagtgtgcatggataaagaagtcagtatcgtgttcataccctgtggacacctggttgtgtgcaaagactgcgctccctctctgcggaaatgtccaatatgccgcagtacaatcaaagggacagtgaggacatttctatcc

SEQ ID NO: 257507 - DNA, 1812 bp, Artificial Sequence
  derived and/or modified sequence
atgaatattgttgaaaattcgatcttcctttccaacctgatgaagtcagcgaatacctttgaactgaagtacgacctgtcgtgcgaattgtaccgaatgtcgacgtactcaacctttcctgccggagtgccagtgtcggaaagatccctggcacgggcaggtttctactacaccggagtgaacgacaaggtcaagtgtttttgttgtggcctgatgcttgataattggaagagaggagatagccctaccgaaaagcataagaagctgtacccatcctgcaggttcgtccaaagcctcaactcggtgaataacctggaagccacttcgcagccaacgttcccatcatccgtgactaacagcactcattccctgctgcctggtaccgagaatagcggttactttaggggctcatacagcaactcgccatcgaatcctgtgaattcacgcgcaaatcaggatttcagcgcactcatgcgctcatcgtaccattgtgccatgaacaacgagaacgcaagactgttgactttccagacgtggccgctgacttttctttcgccaaccgacctggccaaggccggattttactacataggacccggtgatagggtggcatgttttgcatgtggagggaagctctccaactgggaacctaaagacaatgcgatgtccgagcatttgagacatttccccaagtgtccctttatcgagaatcagcttcaggatactagccgctacactgtcagcaatctgagcatgcagacccatgctgcacgcttcaaaaccttcttcaactggccctcgagcgtgctggtgaaccctgaacagctggcttcagccgggttctattacgtgggtaactcggatgatgtgaagtgtttttgctgcgatggagggcttcgctgttgggaatcaggagatgatccttgggtgcagcacgctaaatggtttccaagatgtgagtaccttattaggattaagggacaggagtttatccgacaggtccaggcttcgtacccacacctgttggaacagctcctttcgacctccgattcccctggtgacgaaaatgcagaatcgagcattatacacttcgaacctggtgaggatcattccgaagatgccatcatgatgaatactccagtgattaacgccgcagtggaaatggggttttccagatcactggtcaagcaaactgtgcaaaggaagattctggccaccggtgagaattatcgtcttgtaaacgatttggtgctggacttgcttaatgccgaggacgaaattagggaggaagagcgggaacgagccaccgaagaaaaggagagcaacgatctgcttctgattcggaagaacagaatggccctttttcaacatctcacctgtgtgattccaatactggattccctgctgacggcaggaatcattaatgaacaggagcatgatgtgattaagcaaaagactcaaacctcccttcaagcacgggaactcattgatactatcctggtgaagggaaatatcgctgctaccgtgtttcgcaactctcttcaagaggcagaagcagtcctgtacgaacatctttttgtgcaacaagatatcaagtacatccccaccgaagatgtgtctgatctgcctgtggaagagcagctgcggcgcctccaagaagagcgtacttgtaaggtgtgtatggacaaagaggtcagcattgtgtttattccctgtggacatcttgtggtgtgtaaggattgcgcaccttcgctcaggaagtgccctatatgtcgcagtaccattaagggaaccgtgcggaccttccttagc

SEQ ID NO: 257508 - DNA, 1812 bp, Artificial Sequence
  derived and/or modified sequence
atgaatatcgttgagaactccattttcctttccaacctaatgaagtcagcgaatacctttgagctgaagtacgatttgtcttgcgaactctatcgaatgagcacctactcgacattcccagccggcgtcccagtcagcgagagaagccttgcaagagctggattctattatactggagtgaatgataaagtgaaatgcttttgttgcggattaatgctggacaattggaagagaggagattcccccacggagaaacacaaaaaactgtaccccagctgcagattcgtacagtcactgaattccgtgaacaatttggaggcaacaagccagcccacattcccttccagtgtgacaaacagcactcactcgctcttacctggaaccgagaacagtggatatttccgagggagctacagtaatagcccatccaaccctgttaatagtagagctaatcaagacttctctgctctgatgagaagttcctaccattgtgccatgaacaacgaaaacgcccgcttgctgacttttcagacatggcccctgaccttcctttcaccgacagacttagcaaaggcaggattttactacatcggcccaggggaccgtgtcgcctgctttgcctgcggcgggaaactgagcaactgggaaccaaaagacaacgcgatgtcagaacatctccgccattttccaaagtgtcccttcatcgagaaccagttgcaggatacaagccggtatacagtgtcgaatctctccatgcagacacacgctgcgcgttttaagactttctttaactggccctcaagtgtactggtgaatcctgaacagttagccagcgcaggattctactacgtgggaaatagcgatgacgtgaagtgcttttgctgcgacggtggtctgaggtgctgggaatcaggagatgatccctgggtgcagcacgcgaagtggttcccacgatgtgagtacttgatacgaatcaagggccaggagttcatccgacaggtccaggccagttacccccacttactcgaacaacttttgtctacctctgattcccccggagatgaaaatgccgaatcgtctataatccacttcgagccaggcgaggaccacagcgaggacgccattatgatgaatactcccgttatcaatgccgctgtggaaatggggttctctcggagcctggttaagcagacagtccaaagaaagattcttgccactggtgagaactacaggctcgtcaatgacctagtcctggacctgctgaatgcggaagacgaaatccgcgaggaggaacgtgagcgagctaccgaagagaaagaatctaacgacctactgttgattagaaagaaccgtatggccctgtttcagcacttgacttgtgtcattcccattctggatagcctgctcaccgcgggaataattaacgaacaagaacacgatgtaataaaacagaagactcagaccagcctccaggcccgggaactcattgacaccattctggtgaaagggaacattgcagccacagtgtttagaaactcactgcaggaggctgaggcagtgctctacgaacacctgtttgtacaacaagacattaagtacatccctaccgaagatgttagcgatctccctgtggaggagcagctgcggcgtctgcaggaagagagaacctgtaaagtttgtatggataaagaggtgtctattgtgtttatcccgtgtgggcatctggtggtatgtaaggactgcgcaccgagccttcgtaaatgtccaatctgtaggagcacaattaaaggcacggtccggactttcctttca

SEQ ID NO: 257509 - DNA, 1812 bp, Artificial Sequence
  derived and/or modified sequence
atgaacatcgtggaaaactcgatttttctgtccaatctcatgaaaagcgctaatactttcgaactgaagtacgatttgtcctgtgagctgtaccggatgtccacctacagcaccttcccagctggtgtgcctgtctccgaacggtccctggcaagagcaggattttattacaccggagtcaacgacaaagttaagtgcttttgctgcggacttatgctggataattggaagcgcggggacagtccgaccgagaagcacaagaaactctaccccagctgccgattcgtccaatccctcaattcagttaacaatctggaggccactagccagccgacctttccgtcgtcggtgaccaactctactcactcgctgctgcctggaaccgaaaactccggatacttcagaggctcgtacagcaactccccgagcaaccccgtcaactcacgcgcgaaccaggacttctcggcactgatgagatcctcctaccattgtgccatgaataatgagaacgccagacttctcactttccaaacttggccgctgactttcctgtcccccaccgacctggcgaaggcgggattctactatatcggaccaggagacagagtggcctgcttcgcctgcggaggcaaactttcgaattgggaaccaaaggacaacgccatgagcgaacatctccgacactttccgaagtgcccttttatcgaaaaccaactgcaagatacctctcggtacaccgtgagcaacctgtcgatgcagacccatgccgccaggttcaagaccttcttcaactggccgtcatcggtgctggtcaaccctgaacagctcgcttctgccgggttctactacgtcggtaactcggatgatgtgaagtgcttctgctgtgacgggggcctgaggtgctgggagagcggggacgacccgtgggtacagcatgctaagtggttcccacggtgtgaatacctcatccgtatcaagggtcaagagttcatcagacaggtgcaagcgtcatacccacacctcctggagcagttgctcagcacttccgattccccaggtgacgaaaacgcggagtcatcgataatccacttcgaaccaggcgaagatcacagcgaagatgcgattatgatgaacaccccggtgatcaacgcggcagtggagatgggattctcgcgctcactggtgaaacagaccgtccaaaggaaaatccttgcgaccggagagaactacaggctcgtgaacgatctggtcttggacctcctcaacgccgaggacgagatccgcgaagaagaacgcgagagagcaacggaggaaaaagagagcaatgacttgcttctgatccgcaagaatcggatggccctgtttcaacacttgacttgtgtgatccctattttggactcactgctcacggcaggcatcatcaatgaacaggaacatgacgtgattaaacaaaagactcagacctcactgcaggcccgcgaactgatcgacacgattcttgtgaagggaaatatcgccgccactgtgttccgcaattcacttcaggaagcagaggctgtgctctacgagcatctgttcgtgcagcaggatatcaagtacatccctactgaagatgtctcggacctcccggtcgaggaacagctgcggcgcctgcaggaggagcgcacttgcaaagtgtgcatggataaggaagtgtccatcgtgtttatcccgtgcggacacctggtggtgtgcaaggactgcgctccctcgctgcggaagtgcccgatctgtcggtcaactattaagggcactgtccggacgttcctctcg

SEQ ID NO: 257510 - DNA, 1812 bp, Artificial Sequence
  derived and/or modified sequence
atgaacattgtggagaattccatctttctgtctaacctcatgaagagcgcaaacacctttgagctcaagtatgatttgtcatgcgaattgtacaggatgtcgacttacagtactttcccagcaggtgtacctgtgtccgaacgttctctggccagagctgggttctattacactggggttaacgataaggtaaaatgcttttgttgtggactgatgcttgataattggaagagaggagactcaccaactgaaaaacacaaaaagctttatccctcgtgtcggtttgtacaatccctcaatagcgtgaataacttggaagccacctcccagcccaccttcccatcatctgtgactaactctacccactccctgttaccaggtacggaaaattctggctattttcgggggtcatatagtaactcgccatccaatcctgtcaactcccgggctaatcaggatttctccgctcttatgaggtcctcttatcactgtgccatgaataatgagaacgcgaggctgctgacctttcagacatggccactcacgtttctgagtccaacagatctcgctaaagccggtttttattacattggacccggggatcgtgtggcgtgcttcgcctgtggtgggaaactcagtaattgggaacccaaagataacgccatgtcagagcacctacggcatttcccaaaatgcccatttatcgagaatcagctccaagacacgagcaggtacaccgtgtcaaacctcagcatgcagacccacgccgcacggtttaagaccttcttcaattggcctagcagcgtcttggtgaatccagagcagctggcctctgctggattctactacgtgggaaactccgatgacgtcaagtgtttttgctgcgatgggggcctgaggtgttgggagtctggggacgacccatgggtgcagcatgctaagtggttcccacgctgtgaatacctgattagaattaaaggtcaggagttcatccgccaggtacaagcaagctacccccaccttctcgaacaacttctgagtacatcagactccccaggagatgaaaacgcggaatctagcatcattcattttgagccgggcgaagaccacagcgaggatgctatcatgatgaacactcctgtgataaatgccgctgtggagatgggtttttcacggagcctggtgaagcagactgtccagagaaaaatactggctactggagaaaattataggctggtcaatgacctggtgctcgatctgttaaacgctgaggacgaaattcgagaggaggagagggaacgggcaaccgaagagaaggaatctaatgatctgttgctgatccggaagaataggatggcattattccagcacctgacgtgtgttatccccatactggactctttactcacagcaggcataatcaatgagcaggagcacgatgtgataaagcagaagacacagacctccctgcaggcccgagaactcatcgatacaatactcgttaaaggtaacatcgcggccacggttttcagaaactcgcttcaggaagccgaggccgttctttatgagcatctgttcgtgcaacaagacattaagtacatccccactgaggatgtgtccgacctcccagttgaagagcaactgcggaggctgcaagaagagcggacatgcaaggtatgcatggacaaagaagtttccatcgtattcatcccatgcggacatcttgtggtttgtaaggactgtgccccttcccttagaaagtgcccaatctgcaggtcaaccatcaaaggcacagtgaggactttcttatct

SEQ ID NO: 257511 - DNA, 1812 bp, Artificial Sequence
  derived and/or modified sequence
atgaatatcgtcgaaaactcaatctttctgagtaacctcatgaagtccgctaacacctttgaactgaaatatgacctgtcttgcgaactataccggatgagcacatactctaccttccccgctggcgtgccggtgagcgagcgaagtctagcccgggcaggattctactataccggagtgaatgacaaggtgaaatgcttttgttgtggcctcatgcttgacaattggaaaaggggcgacagtcctaccgaaaagcacaaaaagttgtacccgagttgtcgattcgtgcagtcactgaacagcgtcaacaatttagaagcaactagccagccaacttttccctcctccgtcacaaattctactcacagcctgctgcctggcaccgaaaattccggatactttcggggaagctacagcaattctccttccaaccccgtaaattcccgagcaaatcaggatttttcagccctgatgcggagctcttaccactgtgccatgaataacgagaatgcaagacttctgaccttccaaacctggcctcttacctttttatcccctaccgacctggcaaaggccgggttctattacataggccctggcgatagagttgcgtgcttcgcgtgcgggggcaaactttccaactgggagcccaaggataatgccatgtctgaacacttgcggcatttccccaagtgtcctttcattgagaaccagctgcaagatacaagtagatacacagtttcaaatctgagcatgcaaacacacgcagccaggttcaagaccttctttaattggccatctagcgtgcttgtgaacccggaacaacttgcatccgctggcttttattacgtagggaacagcgatgatgtgaaatgtttttgctgtgacggtggactgcgctgctgggagtcaggcgatgacccctgggttcagcacgcgaagtggttccctcgctgcgaatacctgattaggatcaagggccaagagtttattcgacaggtgcaggcctcttatccccacctgctggagcaactgctcagtactagcgacagtcctggggacgaaaatgctgagagtagcattatccactttgagcctggagaagatcatagcgaagatgctattatgatgaatactcctgtcatcaatgccgccgtggagatggggttctctaggtctttggttaagcagaccgtacagagaaagatcttggctaccggagagaattataggctcgtgaacgatctagtgctggacctgctgaacgcagaggacgagattcgggaggaggagagagagagagccaccgaagaaaaagaatccaacgatcttctgttgatcaggaaaaacagaatggctctcttccagcatttgacttgcgtgatacccatcctggatagcttgctcaccgccggtatcataaatgagcaagagcacgacgtgatcaagcaaaaaacccagaccagtttgcaagctcgggaactgatagacacaatcctagttaaggggaatattgctgctaccgtgttccggaactctctgcaggaggccgaggctgtgctgtacgagcatctgtttgtgcagcaagatattaaatacattcctacagaggatgtgagtgacctgcctgtagaagagcagctgcggcgcctgcaggaagagaggacctgcaaagtgtgtatggataaagaggtctccatagttttcattccttgcgggcacctagtcgtctgtaaggattgcgccccttcccttcgtaagtgcccaatctgtaggtcaactattaaagggaccgtgcgcacgttcctgagc

SEQ ID NO: 257512 - DNA, 1812 bp, Artificial Sequence
  derived and/or modified sequence
atgaacatcgtcgaaaattctatctttctgagcaaccttatgaaatccgctaacacctttgagctgaaatacgacctctcctgcgagctttacaggatgtccacatattccactttccctgcaggtgtccccgtgtctgaaaggagtctggcacgggccggattttattacactggcgtgaatgataaggtgaagtgcttctgttgcggcctcatgctggataactggaagcgcggtgattccccgacagagaaacataaaaaactctatcccagttgtcgattcgtacagagccttaatagtgtaaacaacctggaggcaactagccagcccacctttcctagctccgtaaccaattcaacccattccctgctgccagggaccgaaaacagcggctacttccgggggagttacagtaacagcccgagcaatcctgtgaatagcagggccaaccaggatttcagcgccctcatgcgatcatcttatcattgtgctatgaacaacgagaacgcaagactgctgacgtttcagacgtggcctctgactttcctgtcaccaactgacctggccaaggccggcttttactatattggtccaggagaccgagtggcctgttttgcctgcggtggtaaactttcaaactgggaacccaaagataatgccatgtctgaacatctcagacattttcccaagtgtccctttatcgagaatcagctgcaggatacatctaggtacacagtgagtaaccttagcatgcagacccatgccgcgcggttcaaaactttcttcaactggccatcaagtgttcttgtgaacccagagcaactggcatctgctggtttttactacgtagggaactcagacgacgtgaagtgcttttgctgcgatggaggactgcggtgctgggaatccggagatgatccttgggtacaacatgccaaatggttcccccggtgcgagtatcttataaggattaaaggacaggaatttatcagacaggttcaggccagttatcctcatcttctggaacagctgctctccacctctgatagcccaggggatgaaaacgccgagtcctccatcattcatttcgagcctggcgaggatcactccgaggatgccattatgatgaacacccccgtgatcaatgccgctgtcgaaatggggtttagccggagcctcgtgaaacagaccgttcagaggaaaatccttgcaaccggggaaaactatcggctggttaatgatttggtgctggacttgctgaatgccgaggacgagatccgggaagaagaaagggaacgcgcaacagaggagaaagagtccaatgacttgcttcttataaggaagaaccgcatggctctcttccagcacctcacctgtgtcatcccaattctcgacagtctgcttactgcgggcattatcaacgaacaggagcacgacgtgatcaaacagaagacacagacctcactccaggccagggaactgatagatacaattctggtcaaggggaatatcgccgcaaccgtcttccggaattccctccaggaggcagaagcagtgctgtatgagcacctgtttgtccagcaagacatcaagtacatccccacagaagacgtcagcgatctgcccgtcgaggagcaactgcggcgattgcaggaggaacgcacatgcaaggtttgcatggacaaggaggtgtctattgtgttcatcccgtgcggacatctggtcgtgtgtaaggactgcgccccatccctccgaaagtgtccaatctgcaggagcaccataaaagggacagtgcggacatttctgtcc

SEQ ID NO: 257513 - DNA, 1812 bp, Artificial Sequence
  derived and/or modified sequence
atgaatatcgtcgaaaattccatttttctttcgaatctgatgaaatcggcaaacactttcgaattgaaatacgatctttcctgtgaattgtaccggatgtccacttactcgacttttcctgcaggtgtgccggtgtcggaaagaagcctcgccagagcaggattctactacaccggtgtcaatgataaagtgaagtgcttctgctgtggacttatgctggataattggaaaaggggagattcgccaaccgagaagcacaagaagctgtacccctcctgtaggtttgtgcaatcgctgaattcggtcaataacctggaggccacctcccaaccaactttcccgtctagcgtgacgaattcaacccactcgctgctgccaggtactgagaattcaggatatttcagaggttcgtactctaactcaccgtccaacccagtcaactcaagagctaatcaagatttttcggcgctcatgagatcctcgtaccactgcgctatgaacaatgagaacgcaagactcctcacttttcagacttggcccctgacttttctgtcccctactgacttggcgaaggcagggttctactacattgggcctggagatcgtgtggcatgctttgcatgtggcggtaagctctctaactgggaacccaaggataatgcaatgtcggagcacctccggcactttccaaaatgcccctttattgagaatcaactccaggatacctcaaggtacacggtgtcgaacctgagcatgcaaacccatgccgccagatttaagaccttctttaactggccttcgtcggtgctggtcaacccagaacagcttgcatctgcgggattttactacgtgggaaactccgatgacgtgaagtgtttttgttgtgacggagggctgaggtgctgggaatcgggtgatgatccatgggtacagcatgccaagtggttcccgcggtgtgagtaccttattaggattaaaggccaggagttcattagacaggtgcaggcatcataccctcatttgcttgaacagcttctttcaacttctgattcgcctggtgacgagaacgcagaatcaagcattatacacttcgaaccaggagaagatcattccgaggacgcaattatgatgaacacccctgtgattaatgcagctgtggaaatggggttctctcgctccctcgtgaagcagaccgtgcaaagaaagatcctcgccactggtgaaaactacaggcttgtgaatgatcttgtgcttgatcttctgaacgcagaagatgagatcagggaagaagaacgcgaaagggccactgaggaaaaggagagcaacgacctgctgctgattcggaagaacagaatggcgttgtttcaacatcttacgtgtgtgatccctattctggactcccttttgacggcaggaatcataaacgagcaggagcatgatgtgattaagcaaaagactcaaaccagccttcaagcccgcgagctgatcgacaccatcctggtgaaggggaatatcgcagcaaccgtgtttagaaactcgctgcaggaagcagaagcagtgctgtatgaacacctgttcgttcagcaggacatcaagtacatcccaacggaagatgtgagcgatctcccagtggaggaacaactccgccgcctgcaagaggaacgtacgtgtaaggtgtgcatggataaagaagtgtcgattgttttcattccttgtggacatcttgtggtgtgtaaggactgtgctccttcgctgcggaagtgccccatctgccggtccactatcaaaggcactgtgagaactttcctgagc

SEQ ID NO: 257514 - DNA, 1812 bp, Artificial Sequence
  derived and/or modified sequence
atgaatattgttgaaaattctatttttttgtcaaatcttatgaaatcagctaatacatttgaattaaaatatgatttatcttgtgaattatatagaatgtctacttattcaacttttccagcaggagtgccagttagtgagagatcacttgctcgtgcaggattttattataccggagttaatgataaagttaaatgcttttgttgtggacttatgttagacaattggaaaagaggagattcaccaactgaaaaacataaaaagttgtacccatcttgtagatttgttcaaagtttaaattcagttaataatttagaagctacatcacaaccaacttttccatctagtgttactaattcaacacatagtttattaccaggaacagaaaattcaggttattttagagggtcttatagtaattctccatctaatccagtaaattcaagagcaaatcaagatttttctgcacttatgaggagttcatatcattgtgcaatgaataatgaaaatgcaagattattaacatttcaaacttggccattaactttcctttctccaacagatttagcaaaagcaggattttattatattggaccaggagatagagtagcttgctttgcttgtggaggaaaattatcaaattgggaacctaaagataatgcaatgagtgaacatttacgacatttccctaaatgtccttttatagaaaatcaattacaagatacaagtagatataccgtttctaatttatcaatgcaaacgcatgctgctagatttaaaactttttttaattggccatcaagtgttcttgttaacccagaacaactcgcttcagctggattttattatgttggtaattcagatgatgtaaaatgtttttgttgtgatgggggattaagatgttgggaatctggagatgatccttgggttcaacatgctaaatggtttccacgatgtgaatatttaattagaattaagggacaagaatttataagacaagtacaagcaagttatccacatcttttagaacaattacttagtacttcagattctcctggtgatgaaaacgcagaaagttctattattcactttgaacctggtgaagatcatagcgaggatgctattatgatgaacactccagttattaatgctgctgttgagatgggattttctcgttcacttgttaaacaaacagttcaaagaaaaattcttgctacaggagaaaattatcgtcttgttaatgatttggtactagatttacttaatgctgaagacgaaataagagaagaagaaagagaaagagcaacagaagaaaaagagagtaacgacttacttttaataagaaagaatcgtatggctttattccaacatttgacatgtgttattccaattttagattcattattaacagctggaattattaacgagcaagaacatgatgtaattaagcaaaaaacacaaacaagtcttcaggcaagagaattaatcgatacaattcttgttaaaggaaatattgcagcaacagtttttagaaattcacttcaagaagctgaagctgtattgtatgaacatctttttgttcaacaagatattaaatatattcctacagaagatgtttcagatttaccagttgaagaacaacttagaagacttcaagaagaaagaacttgtaaagtatgcatggataaagaagttagtattgtattcattccatgtggtcatttagttgtatgtaaagattgtgctccatctttaagaaaatgtccaatatgtagatctactattaagggaactgttagaactttccttagt

SEQ ID NO: 257515 - DNA, 1812 bp, Artificial Sequence
  derived and/or modified sequence
atgaatatagtggaaaactccatattcctttcaaacctgatgaaatccgctaatactttcgaactgaaatacgatctgtcgtgcgagctttacagaatgtcgacctactccacgttccctgcaggggtccccgtgagcgaacggtcgcttgctagggcagggttctactacactggtgtgaacgataaggtgaagtgtttttgctgtgggctcatgctcgacaactggaagaggggagacagccctaccgagaagcacaaaaaactctacccttcctgtcgattcgtgcagtcgcttaattccgtgaataaccttgaagcaacttcgcaacccaccttcccttcgagcgtgactaacagcacccatagcctgcttccgggaactgaaaactccggttacttcaggggttcatacagcaactcacctagtaacccagtgaacagcagagcaaaccaagacttcagcgcactgatgcggagcagctaccattgcgctatgaacaatgaaaatgcacgtctgctgactttccagacttggccactcacgttcttgagccccaccgacctcgcaaaggcaggtttttactacatcgggcccggtgatcgagtggcatgtttcgcatgtggcggtaagttgtcgaactgggagccgaaggataacgcgatgtcagaacatcttagacacttcccaaaatgcccttttatcgaaaatcagctccaagataccagccgatacaccgtgagcaacctttcgatgcagacccatgcggcacgcttcaagacttttttcaactggccaagctcagtcctcgtgaacccagaacagcttgcgtccgctggtttctactacgtgggcaattcggatgacgtgaagtgcttttgttgtgacggcgggctgcgctgctgggaatcgggagatgatccatgggtgcaacacgccaaatggtttcctcgatgtgaatacctgatccggattaaggggcaggagttcattagacaagtgcaagcatcgtacccccacctgctggagcaacttctgtcgacttcggacagccctggagacgaaaatgcagagtcctcaattatccattttgaacccggggaggatcattctgaagatgcaattatgatgaacaccccagtgattaacgccgcagtggaaatgggcttcagccgatcgcttgtgaagcaaaccgtgcaacgcaaaattctcgccactggagagaactacagattggtgaacgacctggtattggacctcctgaatgccgaagatgaaataagagaggaggaacgggagagggcaactgaagaaaaggaatcgaacgacctgcttctgattcgcaaaaaccgcatggccctgtttcaacatctgacctgcgtcattcccatactggattcgctgctgaccgccgggatcattaacgagcaagaacacgatgtgataaaacaaaagacgcaaacctccctgcaagcacgtgaactgattgataccattctggttaagggaaacatcgcagccactgtctttaggaattcgctgcaggaagcagaagcggtcctttatgagcatctctttgtgcagcaggatatcaagtacatacccactgaggacgtctcagaccttccagtggaggaacaacttcggagactgcaggaagaaaggacttgcaaggtctgtatggataaggaagtgtcaatagtgttcattccttgtggtcacctcgtggtgtgtaaggactgcgcgccttccctgagaaagtgcccgatctgtaggtcgaccattaaaggaaccgtgcgcacttttctgtcg

SEQ ID NO: 257516 - DNA, 1812 bp, Artificial Sequence
  derived and/or modified sequence
atgaacattgtcgaaaattcaattttcctgtcgaacttgatgaaatctgcaaacaccttcgaacttaagtacgatcttagctgtgagctgtataggatgtccacctacagcacgtttcctgcaggtgtgcccgtgtcggagcgttctctggccagggcagggttttactacactggggtcaatgataaggtgaagtgcttttgttgtgggcttatgctcgataattggaaacggggcgactcgccaaccgagaaacataagaagctgtacccatcatgtcgatttgttcagtcgcttaattcagtcaacaaccttgaggctacttcacaaccaaccttcccctcaagcgtgaccaattcaacccattcacttctgcctggaactgaaaactccggttacttcaggggctcatactccaactcgccgtccaaccctgtgaattcacgtgccaatcaagattttagcgcactgatgcgctccagctatcactgcgctatgaataatgaaaacgcacggctgcttaccttccaaacttggccgttgacctttctttcgcccaccgatctggcaaaggcaggattctactacatcggccctggggatagagtggcatgttttgcctgtggtggtaagttgtccaactgggagcctaaggacaacgctatgtcagaacatctgagacacttccctaaatgtcccttcatagagaaccaactgcaagacacctcccggtacacggtgagcaacctttccatgcaaactcacgcagctcggttcaagaccttctttaactggccttcatccgttctcgtgaacccagagcagctcgcctcggcgggattttactacgttggcaacagcgatgatgtcaaatgcttttgctgcgatggaggcttgaggtgttgggagagcggggatgacccatgggtgcagcacgccaagtggttccctcggtgcgaatacctgatccgaattaagggacaggaattcattagacaagtccaagcatcctacccacatctgctggagcagcttctttcgacttccgacagccctggagatgagaacgctgaaagctccatcatccattttgaaccaggtgaagatcattcagaggatgcaatcatgatgaataccccagtgattaatgcagcagtcgagatgggttttagccgctcgctcgtaaaacagactgtgcagaggaagattttggcgaccggggagaactaccggttggtgaacgatctggtgctggatcttctcaacgccgaagatgaaatccgggaggaagaaagagaaagggcgactgaagaaaaggaatcgaatgatctccttctgattaggaagaatcggatggcactctttcagcatctgacttgtgtgatccctattcttgattctctgcttactgcaggcatcattaacgagcaagaacatgatgtcattaagcaaaagactcagacttccctccaggcccgagaacttattgataccattctcgtcaagggcaatattgcagcaaccgtgtttcgcaactccctgcaggaagccgaggcggtgctgtacgaacatctgtttgtgcaacaagacatcaagtacattccgaccgaggacgtgtcagaccttccagtggaggaacagctgcgcaggctgcaggaagaacgcacctgtaaggtttgtatggataaagaagtgtcgattgtgttcattccttgcggacatctggtggtttgtaaggattgtgccccatcgctgcgcaagtgtcccatctgcaggtcgacgatcaagggcaccgtgcgcacgtttctttcc

SEQ ID NO: 257517 - DNA, 1812 bp, Artificial Sequence
  derived and/or modified sequence
atgaacattgtcgaaaattccatcttcctctccaaccttatgaagtccgcgaataccttcgagcttaagtacgatttgtcgtgcgaactgtatcgaatgtccacctactcgaccttcccggccggcgtgccggtgtcagaacggagcctggcaagagccggattctattacactggagtcaatgacaaggttaaatgcttttgttgcgggctcatgctggataactggaagcgcggcgactcccctaccgaaaagcacaaaaaactttaccccagctgcagatttgtgcagagcctgaactcggtgaacaacctggaagcaacttcccagccgaccttcccatcgagcgtcaccaactcaactcatagcctccttccaggaaccgagaatagcggatacttcagaggaagctactcgaactccccgagcaacccggtgaattcccgggctaatcaagacttctcggctctcatgcggtcgagctaccactgcgcaatgaacaatgaaaatgcccggctgctcaccttccagacttggccgttgactttcctttcgcctaccgacctcgcgaaggccggtttctactacattgggccaggcgatagagtcgcgtgcttcgcctgcgggggcaaactctcaaattgggaaccgaaggataatgcaatgtccgagcatctgcggcactttccgaagtgcccattcattgaaaaccaactgcaggacacttcacggtacaccgtgagcaatctgtcaatgcaaactcatgccgcgcggttcaagacgttcttcaactggccatcttccgtgctggtgaacccggaacaactggcctcagcgggcttctactacgtgggaaattcggacgacgtgaaatgcttttgctgtgacgggggcctgcggtgctgggaaagcggggatgacccgtgggtgcagcacgccaaatggttcccgcgctgcgaatacctcatccgcatcaaaggacaggagtttattcggcaggtgcaggcatcatacccccacctgctggagcagttgctctcgaccagcgactcaccgggagacgaaaatgcagaaagctcgatcattcacttcgagccgggagaagatcattcggaggacgccattatgatgaacactccggtgatcaatgcggccgtcgagatgggctttagccgctcgctggtcaagcaaaccgtgcagcgcaagatcctcgctaccggggagaactaccgcctcgtgaacgatctcgtgctcgatctgctgaacgccgaggacgagatccgcgaagaggagcgagagcgcgcgaccgaagagaaggagtcaaacgatttgctcttgatccggaagaacagaatggcgttgttccagcacctgacgtgcgtgatccccatactcgatagcctgctgactgcaggaattatcaatgaacaagagcatgacgtgatcaaacagaaaactcaaacctcactgcaggcacgggaactcatcgacactatcctggtcaagggaaatatcgccgccaccgtgttcaggaactcgctccaggaggcagaggcggtgctgtacgaacatctctttgtgcagcaggacatcaagtacatcccgaccgaggacgtctctgatctgcctgtggaggaacagttgcggcggctgcaagaagaacgcacttgcaaggtgtgtatggataaggaagtgtcgatcgtgttcatcccatgcggtcatctcgtggtctgcaaagactgcgctccgtccctccgcaaatgcccgatctgccgctcgaccatcaagggcactgtcagaactttcctctcc

SEQ ID NO: 257518 - DNA, 1812 bp, Artificial Sequence
  derived and/or modified sequence
atgaacatcgtggaaaactcaatcttcctgagtaacctgatgaagagcgctaacacttttgagttgaaatacgacctgtcctgcgagctgtacagaatgtctacttacagtacttttccagccggggttcccgtcagcgagcggagccttgcacgcgctggcttttattacacaggggtcaacgataaagtgaagtgcttttgctgcggactgatgttggataactggaaaaggggcgattctcccacggagaagcataaaaagctgtacccctcatgtcgcttcgtccagtcactcaatagcgtaaacaacttggaggctacatcacagcccacgttcccgtcttccgtgaccaacagcacacattccctgctgcccggcacagaaaacagcggatatttccgcggctcctatagcaattcacccagcaatcccgtaaactcacgggctaaccaggatttttccgccttgatgcgctcttcttaccactgtgcgatgaataatgaaaacgccagactcctgacattccagacctggcccctgactttcctgagcccaaccgacctcgccaaggctgggttttattatatcggtcccggtgacagagtggcctgttttgcgtgcggcggtaagctttccaattgggagccgaaagacaacgccatgagcgagcacctgcgacatttccctaagtgtccttttatcgagaaccagttgcaagacaccagcaggtacaccgtctccaatctcagtatgcagacgcatgctgccaggtttaagaccttctttaactggccatcatcagtcctggtgaatcccgaacagctcgcttccgcagggttttattatgtgggaaattccgatgacgtgaaatgtttctgctgcgacggaggactgagatgctgggaatccggcgacgatccatgggtgcaacacgccaaatggtttccacgatgtgaatatttgatacggattaaaggccaggagtttattcgccaggtgcaggctagttacccacacctgttggagcaactgctgagcacgtctgactccccaggcgacgagaatgcggagtcaagcatcatccacttcgagcccggagaagatcacagcgaggatgcaattatgatgaacacccctgtgattaatgccgccgtggaaatgggtttctcaagatcactcgttaagcagactgttcagcgaaagatacttgccacaggggagaactaccggctcgtcaatgacctggtgcttgacctcctgaatgccgaagacgaaattcgagaagaggagcgagagagggctacagaggagaaggaatccaatgatctgctcctgatacgaaagaataggatggcactgttccagcacctgacgtgtgtcatacctattctggactccctgttgacagcagggatcatcaatgaacaagagcatgacgttataaagcagaaaacccaaacctctctccaggctagggagctcattgacaccatactggtcaagggaaatattgccgctaccgtcttcaggaattctctgcaggaggcggaagcggtactgtatgaacacctctttgtgcagcaggacatcaaatacatacccactgaagatgtctctgacctcccagtcgaggagcaactgcggcggctccaggaagagaggacatgcaaagtgtgcatggacaaggaagtcagcatcgtgttcatcccctgtgggcacctcgtggtctgcaaggactgcgccccctcactgagaaagtgtcctatttgcagatctaccattaagggcactgtccgcactttcttgtca

SEQ ID NO: 257519 - DNA, 1812 bp, Artificial Sequence
  derived and/or modified sequence
atgaatatagtggaaaattcaattttcctctcgaaccttatgaagtccgctaacacttttgaactgaagtacgatttgtcctgcgaactttaccgtatgtccacttactcgacttttcctgctggagtgcctgtctccgaacgatcccttgcacgggcaggtttttactacaccggtgtgaacgataaggttaagtgcttttgttgcgggctcatgctggataactggaaaagaggtgactcacctactgaaaaacacaagaagctgtacccgtcttgccggttcgttcaatcgctgaactcggtgaacaatctcgaagcaacgagtcagccgacctttccctcgtccgttactaatagcacccacagccttctgcccggtaccgaaaactccggttacttccgaggttcgtattctaattcaccatcgaaccctgtgaactcccgcgctaatcaagatttttccgcacttatgaggtcatcgtatcactgtgccatgaacaatgagaacgcaagactgcttaccttccaaacttggcctctgacctttctgagcccgactgatcttgcaaaggcaggattttactacatcggtcccggcgatcgtgtggcctgttttgcatgtggaggtaagctgagcaactgggaacctaaggataatgcaatgtcggagcatcttcggcattttcctaaatgtccctttatcgagaatcaacttcaagatacttccagatacaccgtctcaaacttgtccatgcaaactcatgctgcccggttcaagacctttttcaattggccaagcagcgtgctggtcaaccctgagcaacttgcaagcgccggtttctactacgtgggtaacagcgatgatgtgaaatgtttctgttgcgatggcggtttgcgctgttgggaatcaggagacgacccttgggtccaacacgccaagtggttcccaagatgtgaatacctgattagaattaaggggcaagagtttatccgacaggtccaggcctcatacccacaccttttggaacagcttctctccacttccgattcccctggagatgaaaacgcggaatcaagcattatccatttcgagccgggggaagatcatagtgaagatgcaataatgatgaatacccccgtcattaacgcagcagtcgaaatgggtttctcgagaagcctcgtcaagcagaccgtccaacgaaagattcttgcaaccggagagaattatcggctcgtgaacgatctcgtgcttgacttgctcaacgcggaggatgaaattcgtgaagaggaaagagagagggcaactgaggaaaaggaatcgaatgatctcctgctgatcaggaagaatcgtatggccctcttccagcaccttacttgtgtcattcctattctggattcccttctcacggccggaatcataaacgaacaggaacacgacgttatcaagcaaaagactcagacttcgcttcaagcacgggaattgatagacaccattcttgtgaaggggaacatcgcagcaactgtgttcagaaacagcctgcaggaggcagaagcagtgctttacgagcatctgttcgtgcagcaagatatcaagtacattcccactgaagatgtctccgatcttccagtggaggaacaactgcgccgcctccaggaagaacggacctgcaaagtgtgtatggacaaggaagttagcattgtgttcattccatgcggacatcttgtggtttgtaaggactgcgcaccctccttgcgaaagtgtcctatctgtagatcgaccataaagggaaccgtgagaacttttctgagc

SEQ ID NO: 257520 - DNA, 1812 bp, Artificial Sequence
  derived and/or modified sequence
atgaacatagtggagaattccatcttcctatccaacttgatgaagagtgccaacaccttcgagctcaagtatgacctgtcctgcgagctttaccgcatgtccacctattcaacgttccccgctggcgtcccggtgagtgaaagatctctggccagagctggcttctattacactggagtgaacgataaggtgaagtgtttttgctgcggcctgatgctggacaactggaagaggggagattcccccacagagaaacacaagaaactgtacccatcctgtagatttgtccagtccctcaattcagttaataacctggaggccacttcccaaccaacctttcctagcagtgtgactaattccactcattcccttctgcctggcactgaaaacagcggttatttccggggaagctactccaactccccctctaatcctgtcaactcacgggctaaccaggatttttccgccctgatgcggtcttcctatcactgtgctatgaacaacgagaatgcccgtctgttaacctttcaaacttggccactgacattcctgtcccccacagacctagccaaggccggattttattatatcggtcctggcgatagggtcgcctgctttgcctgtgggggtaaactctctaactgggaaccgaaggacaatgctatgagcgagcatcttcgccacttccccaaatgccccttcatcgaaaatcagctgcaagatacatcccgctacaccgtatcaaacctttctatgcaaacacatgctgcccgattcaaaacatttttcaactggccctccagtgtcctagtcaatcctgagcagttagcatctgcagggttttactacgtgggcaattctgatgatgtaaagtgtttttgttgtgatggcggactgcgctgttgggagtccggcgacgatccctgggtgcagcatgcaaagtggtttccccgttgtgaatacctgatccggataaagggccaggaattcatccggcaggtgcaagctagttatccacacctactggagcagttgttgtcaacgtccgactcacctggggatgaaaacgcggaaagttcaatcattcattttgaaccaggcgaggatcactcagaagatgctattatgatgaacaccccagtgatcaacgcagctgtcgaaatgggtttttccagatccttggtaaagcagaccgtgcagcggaaaatcctcgccacaggtgaaaactatcgcctcgtgaatgacttggtgctggacctcctcaatgcagaggacgaaattcgggaggaagagagggagcgcgctaccgaagagaaggagtcgaacgatctcctgctgatcaggaagaatagaatggcccttttccaacatctcacgtgcgtcatccccatcctcgactctcttctgacagccggcataattaatgaacaagaacatgacgtgattaagcagaagacccagactagtctccaggcgcgggagctgatcgataccatcctggtgaagggaaatatcgcagccaccgtgttccgtaactcccttcaagaagctgaagctgtgctgtatgaacaccttttcgtacagcaggacatcaagtacatcccaactgaagatgtctccgatctgcccgtcgaggaacaactgcgaaggctgcaggaggaacgtacctgtaaggtgtgtatggataaggaggttagcattgtgttcattccatgcggccacttggtggtgtgtaaggactgcgcaccatctttgaggaagtgccccatttgccgatccaccatcaagggcacagtgagaactttcctaagc

SEQ ID NO: 257521 - DNA, 1812 bp, Artificial Sequence
  derived and/or modified sequence
atgaatatcgtggagaattcaatcttcctctctaacctcatgaaatccgcgaacaccttcgagttgaagtacgacctgtcgtgcgagctctaccggatgtcgacctacagcactttcccagcaggagtcccggtgtcggagcggtcgctggctcgcgcgggattctattacacgggagtcaatgacaaggtgaagtgcttctgctgtggactgatgcttgacaactggaagagaggtgattccccgactgaaaagcataagaagctgtacccttcctgccgcttcgtgcaatcactgaactcagtgaacaatctggaagcaacctcgcagcccaccttcccgtccagcgtgacgaattctactcatagcctcctgccgggaactgaaaacagcgggtacttcagaggctcctactctaattccccgtccaacccagtgaattcaagagccaaccaggatttctcggccctgatgagatcgtcctaccactgcgcgatgaacaacgaaaatgccaggctgctcactttccagacttggcctctgaccttcctttcccccaccgaccttgccaaagcgggattttactacatcggtcctggcgatagagtcgcctgcttcgcatgcggaggtaagctgtccaactgggaacctaaagacaatgccatgtccgagcatctgagacatttcccaaaatgtccctttatcgagaaccagctgcaagacacgtcgcgctacactgtctcgaaccttagcatgcagacccacgccgctaggttcaagactttcttcaactggccatcatcggtgctggtgaacccggagcagctggccagcgccgggttttactacgtcggaaatagcgacgatgtcaagtgtttctgctgtgacggaggtctgcggtgctgggaatcaggggatgatccgtgggtgcagcacgccaagtggttcccgcggtgtgagtatttgatccgcattaaagggcaagagttcatcagacaggtgcaagccagctacccgcatcttctggaacaacttctgagcacctcggacagcccgggagacgagaacgcagagtcatccatcatccattttgaaccaggagaggaccattccgaagatgccatcatgatgaataccccggtgatcaacgccgctgtggagatgggattttccagatcgctggtcaagcagaccgtgcaacgtaagattctggcgacgggagaaaactacaggctggtgaatgaccttgtcctcgatctcctcaatgcggaggacgagatccgggaagaagagagggaacgcgcaactgaggaaaaggagagcaatgacctcttgctcataaggaaaaaccgcatggcgctgttccaacacctgacttgcgtcatccctatcctggactcgctgctcaccgccggtatcatcaacgagcaggagcacgacgtgatcaagcagaaaacgcagacctcacttcaggcgcgcgagctcatcgatacgattctggtcaagggaaacattgccgcgactgtctttcggaactcgctgcaggaggcggaagctgtgttgtacgagcatctgttcgtgcagcaagatatcaaatacatccctaccgaagatgtcagcgacctgcccgtcgaagaacagctgcgcaggctccaggaagaacgcacttgtaaggtgtgcatggataaggaagtttccattgtgttcatcccctgcggccatttggtggtgtgcaaggattgcgctccgagcctgcgcaagtgtccaatttgtcggagcactatcaaagggaccgtgaggactttcctgtca

SEQ ID NO: 257522 - DNA, 1812 bp, Artificial Sequence
  derived and/or modified sequence
atgaacattgtggagaatagcattttcctgtctaatctgatgaagtccgccaacaccttcgagctaaaatatgacctgtcgtgcgaactttaccgtatgagcacctattccacgttcccggccggcgtgccagtaagtgagcggagtctcgcccgcgccggtttttattatactggcgtcaatgataaggtaaagtgcttttgctgtggcttgatgctggataattggaaaaggggagactcgccgacagaaaagcataagaagctatatccttcgtgccgatttgtgcagagtctgaatagtgtgaataacctggaggcgacttcgcagcccacctttccgtctagtgtaaccaactcgacgcacagcctgttgcccggcaccgagaattccggctatttccgaggctcgtattcgaactcgccatcgaaccctgtgaactcccgggcgaatcaggatttcagcgccctgatgcggtcttcttatcattgcgctatgaacaatgagaacgcgcgtctgctgacgttccagacttggccattgacttttctgagtcccacggatctcgccaaggctggtttctactacatcggcccaggcgatcgtgtagcatgcttcgcttgcggaggtaaactgagtaactgggaaccgaaggacaacgccatgtcggagcacttgcggcactttcccaagtgtccgtttatcgaaaaccaactgcaggacactagcagatacactgtctcgaatctgtcgatgcagacccatgccgcacgttttaagactttctttaactggccctcgagtgtgctagtgaacccagagcagttggcaagcgcgggattctactacgtcgggaactcggatgatgttaagtgcttctgctgtgacggaggtctccggtgttgggagagcggcgacgacccgtgggtgcaacacgcaaagtggtttccccgctgcgaatatcttatcaggataaaaggtcaggagtttatccgtcaagtccaagccagttacccgcatcttctggaacagctgctgagtacgagcgacagccctggcgatgagaacgccgagtcgagcatcatccatttcgagcctggagaagaccatagcgaggacgccattatgatgaatacaccagtgatcaatgccgccgtcgaaatgggattcagccgatccttggtgaaacagactgtacagcgcaaaatcctagctactggtgaaaactaccgccttgttaacgatctagtgctggacttacttaacgcagaggatgagatacgggaggaggagcgcgagagggctactgaggaaaaggagtctaacgatctgcttctcatccgtaaaaaccgcatggctctgttccagcatttgacctgcgtgatccccatcctcgactcactcctgactgcaggaattataaatgagcaagagcatgacgtaattaaacagaagacccagacctcgctgcaagcccgcgagctgatcgacaccatcctggtcaagggtaacattgctgccaccgtgtttcgcaacagtctccaggaggccgaggccgtcctatatgagcatttgttcgtgcagcaggatataaagtacatacctacggaggacgtgagtgatttgcccgtcgaagagcagctcagacggctgcaagaagagcgcacttgtaaggtgtgcatggacaaggaagtgagtatagtgtttatcccgtgcggccacctggtggtgtgcaaagattgcgcgcctagcctcagaaagtgcccaatctgtagatcgacgatcaagggcaccgtacggacgttcttgagt

SEQ ID NO: 257523 - DNA, 1812 bp, Artificial Sequence
  derived and/or modified sequence
atgaacatcgtggaaaactctattttcctgtctaacttgatgaagtcagcaaacaccttcgaactaaagtacgacctgtcatgcgagttatacagaatgtcaacttatagcaccttccccgctggagttcccgtgagcgagagaagtcttgctcgcgccggtttctactacaccggagttaatgacaaggtgaaatgcttctgctgcggcctaatgctagacaactggaaacgaggggattcgcccacagagaaacataaaaaactgtacccgagctgcaggtttgttcagagtctgaatagcgtgaacaatctggaagccacgagccagccaacatttcctagttctgtgaccaactccactcacagtcttctgcctgggaccgagaactctgggtacttccgaggatcttactcaaacagccctagcaaccccgttaactcaagagcaaatcaggacttttctgcactgatgcgtagtagctaccactgcgccatgaacaacgaaaacgcccgcctgttgacttttcaaacttggccattgacgttcctaagcccaactgatctggctaaagcaggcttctactatataggccctggtgatcgggttgcgtgtttcgcgtgcggtggtaagctcagcaattgggagccaaaagacaacgcaatgtctgaacacctccggcatttccccaagtgtcccttcatcgagaaccaactccaggataccagcagatacacggtctcgaatctttctatgcaaacccatgctgccagattcaaaacgttttttaactggcccagtagcgtgcttgtcaatccagagcaactagcttccgctggcttctactatgtcggcaatagcgatgacgtcaagtgtttttgctgtgatggcggcttacggtgctgggagagtggggatgatccttgggtccagcacgccaagtggtttccacgctgtgaatatctaattcgtatcaaggggcaggagtttatcagacaggtgcaggcttcctatccacacttgcttgagcagctcttatccacatcagactctcctggagacgagaatgccgaatctagcatcatacacttcgagcccggagaggaccactcggaggacgccataatgatgaacactcccgtaatcaatgctgcagtggagatgggatttagccgctcactggtaaagcaaacagtgcagagaaagatccttgcaaccggagagaattatcgcctagttaacgatctggtgttggacctgctcaacgcagaggacgagattcgggaggaagaaagggagcgcgctacagaggagaaagaaagcaacgaccttcttctcattagaaagaatcgcatggcacttttccagcacctcacttgtgtaattccaatcctagactccctgctaactgccgggattatcaacgagcaggagcacgacgtgatcaagcaaaaaacacagacaagcctgcaggctcgggaactgatagatacaatcctcgtgaagggaaacatcgccgcaactgtgttccggaattctttgcaagaagcggaggccgtcttgtatgaacacctttttgtgcagcaggacatcaaatatattcctactgaagatgtttcagaccttcccgtagaggaacagctgcgaaggctccaggaggagcgtacttgtaaggtgtgcatggataaagaagtcagcatagtgttcataccttgcgggcacctcgttgtttgcaaagactgcgctccctcccttcggaagtgtcctatttgccgatcaacaattaagggtacagtgaggacattcctctcc

SEQ ID NO: 257524 - DNA, 1812 bp, Artificial Sequence
  derived and/or modified sequence
atgaacattgtcgaaaatagtatatttctgtctaatctgatgaagtcagccaatactttcgaacttaaatacgacctgtcatgcgagctgtaccgcatgagcacttactccaccttccccgcgggagtgccagtgagcgagagaagcctggctcgggccggcttctactacacgggtgttaacgacaaagtgaaatgcttctgttgtggcctcatgttagataattggaaaaggggcgactccccaacagagaagcataagaaactatacccctcctgccggttcgtgcagtctttgaattctgtcaataacctggaagctacctcccagccaacctttccttcttctgtaacaaacagcacgcattctctcctccctggaactgagaactccggttacttccgtgggtcctactcaaattcaccctctaatccagtgaatagtagggccaaccaagacttttccgcgctgatgaggagctcataccactgcgctatgaataacgagaatgctaggcttctcacattccagacgtggccactcacctttctgtccccgaccgatctcgctaaagctgggttctactacatcgggcctggcgaccgcgtagcctgcttcgcatgtggggggaaattgtctaactgggagccaaaggacaatgccatgtcagagcatttaagacatttcccaaagtgtcctttcatcgaaaatcaacttcaagacacaagcaggtacacggtttccaatctgtctatgcagacccacgcagcccgcttcaaaacattctttaactggccatcgtctgtcctcgtgaacccggagcagctggccagcgctggcttctactatgttggtaactcagatgatgtgaagtgtttttgctgtgacgggggactgcgctgttgggaatcaggggatgatccttgggtgcagcacgctaagtggttccctcggtgtgagtacctcatccgcatcaagggccaggagtttatccgccaagtgcaggcatcctatccacacctccttgaacagttgctgtccacaagcgactctcctggtgacgagaatgccgaatctagtatcatccatttcgaaccgggggaagatcattccgaagacgccattatgatgaatactcccgtgatcaatgcggccgtggagatggggttttctaggtccctggtgaaacagaccgtccagagaaaaatacttgctaccggcgaaaactacaggttggtcaacgatttggtgctggatcttctaaacgctgaagatgagattagagaagaagagcgggagagagctacagaagaaaaagaaagcaatgatctgctgctgatcaggaagaacaggatggcacttttccaacacttgacatgtgtgattccaatccttgatagcctgctgacagcaggaatcatcaacgagcaggagcatgacgttattaaacagaagactcagaccagcttacaggctcgagagctgatcgataccatcctggtcaaaggaaatatcgcggccaccgtctttaggaatagcctgcaggaggccgaggcggtcctttatgagcatttgttcgtgcaacaagatattaaatatatcccgaccgaagacgtgagcgacctgccagtcgaggaacagcttaggagactccaggaggagagaacctgcaaagtgtgcatggacaaagaagtgtctatagtttttatcccctgcggtcacctcgtagtgtgcaaagattgtgctcccagcctgagaaagtgccctatctgccgctcgacaataaagggtactgtgaggacatttctgagc

SEQ ID NO: 257525 - DNA, 1812 bp, Artificial Sequence
  derived and/or modified sequence
atgaatatcgtggaaaactcgatctttctgtccaatcttatgaagagcgccaacaccttcgaactcaaatacgacctcagctgtgaactgtacagaatgagcacctactcgaccttccctgccggcgttcccgtttcagagagatccctcgcacgagcgggtttctactacactggtgtgaacgacaaggtgaaatgtttctgttgcgggctgatgctggacaattggaagcgcggcgattcccctaccgaaaagcataagaaactgtacccttcttgtcgatttgttcaatcactgaactctgtgaacaacctcgaagccacttcgcagccaaccttcccttcttccgtgacgaattccacgcattcgctgttgcccggcactgaaaacagcggctattttcggggctcgtactccaactccccgagcaaccccgtcaactcccgcgctaaccaggacttttcggcactcatgcggtcctcctaccattgtgcgatgaataatgaaaacgcaaggctgctgaccttccaaacctggccacttactttcctgtccccaactgatcttgcaaaagcaggcttttactacattggaccaggagatcgggtggcttgtttcgcctgcggaggaaagctctccaactgggaaccgaaagataatgcaatgtcggaacatctgcgacatttcccaaaatgtccctttatcgaaaaccaactgcaagatacctcccgctacaccgtgtccaatctgagcatgcagactcatgcggccaggtttaagacctttttcaattggccatcctcagtgcttgtgaaccctgaacagctggcatcggcaggtttttactacgtcgggaactccgatgacgtgaagtgcttctgctgcgatggagggctcagatgctgggaatctggagacgatccatgggtgcagcacgccaagtggttcccaaggtgcgaatatctgataagaatcaaaggccaggagtttattcggcaggtgcaggcttcgtaccctcatctgctggaacaactccttagcaccagcgattcacccggcgatgaaaatgcagaatcgtcgattatccattttgaaccgggtgaagatcatagcgaggatgcgattatgatgaacactcctgtcatcaacgccgcagtcgaaatgggttttagccgttcacttgtgaagcaaaccgtgcaacggaaaattctggcaaccggtgaaaactacaggcttgtgaacgatctggtgcttgaccttcttaacgcagaggacgaaatacgagaagaagagagggaacgagcgactgaggagaaggaatcgaacgacctccttctcattagaaagaatcgcatggccctttttcaacatctgacctgtgtgatcccaattcttgactcgctgctgaccgcaggtattatcaatgaacaagagcatgatgtcatcaagcaaaaaactcagacttccctgcaggcacgtgaacttatagataccatcctggtcaaggggaacattgccgccacggtgttccgcaactcattgcaggaagcagaagcggtgttgtacgaacacctgtttgtgcagcaagatatcaagtacattcctaccgaggatgttagcgacctccctgtggaagagcagctgcgtagactccaggaagaaagaacttgtaaagtgtgcatggataaagaggtgtcaattgtgttcattccctgtggacatctcgttgtgtgtaaagactgcgcaccctcccttaggaaatgtcctatctgtcggtcgaccatcaaaggtaccgtgcggaccttcctttcg

SEQ ID NO: 257526 - DNA, 1812 bp, Artificial Sequence
  derived and/or modified sequence
atgaatatcgtggaaaattccatcttcctctcgaacctcatgaagtcagccaatacgttcgagctcaaatatgacctgtcttgcgaattgtaccgcatgtcgacctatagcacgttcccggcaggagtgccagtttcagagcgatcgttggctagagccggcttttactacactggcgtgaacgataaagtcaaatgtttctgctgcggactgatgctggataattggaagcggggagactcaccaacggaaaagcataagaagctgtacccgagctgcaggttcgttcagtcactcaactctgtgaacaatctcgaagcaactagccaaccgaccttcccgtcgtccgtcaccaattcaactcactcgttgctcccgggaaccgaaaattcgggatacttccgggggtcgtacagcaacagcccttcgaacccggtgaactcccgcgcgaaccaggatttcagcgccctgatgcgctcatcttaccattgtgccatgaacaatgaaaacgcccggctgctgaccttccaaacttggccgctcactttcctgagcccgactgatctggccaaagccggcttctattacatcggacccggagatcgggtggcgtgtttcgcctgcggaggtaaactcagcaactgggagccaaaggacaatgcgatgtccgaacacctgaggcatttcccaaagtgtccgttcatcgaaaatcagctgcaagacacctcacgatacactgtcagcaatttgtccatgcagacccatgccgccaggttcaagacgttcttcaactggccatcgtccgtgctggtgaatcctgaacagctcgccagcgccgggttctactatgtgggtaattcggacgacgtgaagtgcttctgctgcgacggggggctgcggtgctgggaatccggcgacgatccatgggtccaacacgccaaatggttccccagatgcgagtacctcatcagaatcaagggacaggagtttatacgccaggtgcaggcgtcgtacccgcaccttctggaacagctcctgagcactagcgattccccaggagacgaaaatgccgaatcctccattatccatttcgaaccaggagaggaccatagcgaagatgctattatgatgaacacccctgtgatcaacgccgcggtggaaatggggtttagccggagcctcgtgaagcaaactgtccagcggaagatcctggccactggcgagaactatcgcctggtgaatgacctcgtccttgacctgctcaatgctgaggacgagatcagagaggaagaacgcgagcgcgcaactgaggaaaaggaatcaaacgatctcctgctgatccgcaagaaccgcatggcgctgttccagcacctgacctgcgtgatcccgatcttggactcgctgctgacggcgggaatcattaatgaacaagaacacgacgtgatcaagcaaaagactcagacttccctgcaggcgcgcgaacttattgatactatcctcgtcaagggcaacatcgcggcaaccgtgttcagaaattccctgcaggaggccgaggccgttctgtacgaacaccttttcgtgcaacaagatatcaagtacatccccactgaggacgtctcagacttgccagtcgaagaacagctgagacggctgcaggaagaacgcacttgcaaggtgtgcatggacaaggaggtgtctatcgtgttcatcccgtgcggacatctggtggtgtgtaaggattgtgcgccgagcctccggaagtgtccgatctgtcggtcaactatcaaaggaaccgtgcggaccttcctctcg

SEQ ID NO: 257527 - DNA, 1812 bp, Artificial Sequence
  derived and/or modified sequence
atgaatattgtcgaaaactcgatcttcttatcgaatctcatgaaatctgccaacactttcgaactcaagtacgacctctcgtgcgaactttatcgtatgtccacctacagcaccttccctgctggtgttccggtctctgagagatcattggcaagggcgggcttctactacacaggtgtcaacgataaggtgaagtgtttctgttgcgggctcatgctagataattggaagaggggcgattcccccactgaaaagcacaagaagctctacccatcatgcagattcgtccagtcactaaactctgtcaacaatctggaagcgacctcccaaccgaccttcccgtctagtgttaccaacagcacccattctctcttgccagggactgaaaactcgggctacttccgaggttcctattcaaacagtcccagcaaccctgtgaactcgagagctaaccaagatttttccgctctaatgcgtagctcttaccattgtgcaatgaataacgaaaatgccaggcttctcacgttccagacctggcctcttacctttctgtccccaacagacctcgcaaaagctggtttttactatattggtcccggagacagagtcgcatgtttcgcttgtggaggcaagttgagtaattgggagcccaaggacaatgcgatgagcgagcatcttcgacacttccctaaatgtccgttcatcgagaaccagttgcaagacacctctaggtacacagtgtcgaacctttcaatgcaaacgcacgccgctcgattcaagacctttttcaactggccctcttctgtgttggtaaatccagagcaacttgccagcgcgggtttttattacgttgggaactccgatgatgttaaatgcttctgctgtgacggcgggctcaggtgctgggagtcgggcgatgatccttgggtccagcacgcaaagtggttcccacgttgtgagtatctgatcaggataaaggggcaagagttcatacgccaagtccaagcttcctatccccacctgcttgagcaactgctctcgacctccgattcgcccggagatgagaacgcagaatcatctatcatacattttgagccaggcgaagatcactcagaggatgctatcatgatgaacacaccggttatcaatgccgcagtggagatgggcttctcacgttcccttgttaagcaaacagttcagcgtaagatcttggctaccggtgagaattatcgattagtaaatgatctcgtcttagatctgttgaacgcagaggatgagatcagagaggaggagcgtgaacgggcgacagaggagaaggaatcgaacgatctactcttgattaggaaaaaccgcatggctttgttccaacatcttacttgtgtcatcccgatcctcgactcgttgctaacggccggcatcatcaatgaacaggaacatgacgtgatcaaacagaagacgcaaacgagtctgcaagctcgtgagttgatagataccattctagttaaaggaaatatagcagcaaccgttttccgaaacagcctacaagaagccgaagcggtcttgtacgaacacctttttgtacagcaagatatcaaatatataccgacagaggacgtaagcgatctccccgtggaagagcagctcaggcgtttacaggaggaacgtacatgtaaggtgtgcatggacaaggaggttagtattgtgttcattccgtgcggacatttagtagtctgcaaagactgcgccccctcactgcgaaagtgcccgatctgtaggagcaccataaagggaacggtccgtacctttctgtca

SEQ ID NO: 257528 - DNA, 1812 bp, Artificial Sequence
  derived and/or modified sequence
atgaacatcgtcgaaaactccatcttcctctcaaatctgatgaagtcggcgaatacgttcgaactcaagtacgacctgtcctgcgagctgtaccggatgagcacttactccacgtttccggccggcgtgccggtcagcgagagatcacttgcacgcgctggcttctactacacgggagttaatgataaggtgaagtgtttctgctgtggactgatgctcgataattggaagcgcggcgacagcccgaccgaaaaacacaaaaaactgtacccatcatgcaggttcgtccaatctctgaactcagtgaataacctcgaagcaacttcccagcctacttttccaagcagcgtcacgaactctacccactcgctgctgccaggcactgaaaattcaggctattttcgaggatcgtactccaactccccgtcgaatcccgtgaactcgagagctaaccaagatttctccgccctcatgcggagcagctaccactgcgcaatgaacaacgagaacgcccgcttgctcaccttccagacctggccgctgacgttcctctcccccaccgacttggccaaggctggcttttactacatcggacccggcgaccgcgtggcctgcttcgcctgcggcggaaaactgtccaactgggagccaaaggacaacgccatgagcgaacacctgagacacttccccaagtgccccttcattgaaaatcaactccaggacacttccagatacaccgtgagcaacctctcaatgcagactcatgcagccagatttaagaccttctttaactggccgtcctcagtcctggtgaaccctgaacaactggcctcggcgggattttactacgtcggtaactcggatgacgttaagtgcttttgctgtgatggtggacttcggtgctgggagtcgggagacgatccgtgggtgcaacacgccaaatggttcccgaggtgtgagtacctgatccgcatcaaaggccaggaattcatccgccaggtccaagcctcgtacccacacctgctggaacagctgctgtccaccagcgattcccctggagacgaaaatgccgaatcatcaatcatacatttcgaaccaggagaagatcatagcgaggatgcaatcatgatgaacaccccggtcatcaacgcggctgtggaaatgggattttcccgcagcctggtcaagcagaccgtgcaacggaagatcctcgccaccggagaaaactaccgcctggtgaacgacctggtgttggatctcctcaatgccgaggatgagatccgcgaggaggagcgtgaacgggcaaccgaagagaaggagtcgaatgacctgctgctgatcagaaagaaccgcatggcccttttccagcatctgacctgcgtcatccctattttggactcattgctgaccgctggtattatcaacgagcaggagcacgacgtcattaaacaaaaaacccagaccagtttgcaggcgcgggaactcatcgatacgatcctggttaagggtaatatcgctgcgactgtattcaggaatagcctgcaggaagccgaggcggtcctctacgaacatctctttgtgcaacaggatatcaagtacatcccgaccgaggacgtcagcgacctgccggtggaggagcagttgcggcgcctgcaggaggagcgcacctgcaaagtgtgtatggataaagaagtatcaatcgtgttcatcccttgtggccaccttgtggtctgtaaggactgtgccccgtcactgcggaaatgcccgatctgccgctccaccattaaggggaccgtgaggaccttcctgtcg

SEQ ID NO: 257529 - DNA, 1812 bp, Artificial Sequence
  derived and/or modified sequence
atgaacattgtggaaaactccatattcctttccaatctgatgaagagcgctaacacattcgagctcaagtacgacctcagctgcgagctgtataggatgagtacttacagtactttccctgcaggagtgcccgtgtccgaaaggagcttagctagagcagggttctactacacaggagtaaacgacaaggtaaagtgcttctgttgtggtctgatgttggacaactggaaaagaggtgattccccgaccgaaaagcataaaaagctctacccatcttgccggtttgtccaatctcttaacagcgtaaacaatctcgaggctaccagccagcccacttttccctcttccgttacaaatagtacacattccctcctgcctggcaccgaaaactccggctacttccgcgggtcctatagtaactcgccctcgaatcccgtcaacagtagagctaaccaggatttcagtgccttaatgaggtctagctatcactgcgcaatgaataacgagaatgcgagattactcacttttcagacttggccactcacattcctaagtccaacggatttggccaaggccgggttttattacatagggcccggcgatcgtgtcgcttgctttgcgtgcggcggcaaactctcaaattgggagccgaaagacaatgccatgtcggaacaccttaggcatttccccaaatgcccattcatcgaaaaccaactgcaagacacctcacgatacacagtgtctaacctcagtatgcaaacgcacgccgctcgattcaaaacgttttttaattggccctccagcgtgctggttaaccccgagcagttggcctccgccggcttttattacgtgggcaatagtgacgatgtgaaatgtttctgttgcgacggggggctccgatgttgggaatccggcgacgacccctgggttcagcacgctaagtggtttccgcggtgcgagtatcttattcgcattaaaggccaggagttcattaggcaggttcaggcctcatacccccatctgctagagcagctcctttcgaccagcgattcgcctggcgacgaaaacgccgagagcagtataatccatttcgagcccggggaggaccacagtgaggatgctattatgatgaacacgcctgtgattaatgcagcagtggaaatggggttctccagatcccttgtcaagcaaactgtgcagcgaaagattctggccacaggagagaattatcgattggttaacgacctcgtcctcgatctgctgaacgctgaggatgagatccgggaggaggaacgggaacgggctactgaggagaaggagagcaatgacctgttgcttatcaggaagaatagaatggctttattccaacatttaacatgtgtgatccccattctggacagtctactgaccgcaggtattatcaatgaacaggagcatgatgtcatcaaacagaagacccagacttctctgcaggctcgggagcttatcgatactatattagtcaagggcaacattgccgccaccgtttttaggaattcactacaggaagccgaggccgtgctctacgagcacctcttcgtacagcaggacatcaagtacatacccaccgaggatgtcagcgatctgcctgtagaggagcagctaaggaggttgcaagaggaacgaacatgcaaagtgtgtatggataaagaggtctctattgttttcataccatgcggtcatttggtagtctgtaaagattgcgccccttctttacgaaagtgcccaatttgcagatccaccattaaagggaccgtgaggacctttctgtcc

SEQ ID NO: 257530 - DNA, 1812 bp, Artificial Sequence
  derived and/or modified sequence
atgaatatcgtggaaaactcaatctttttgagcaatctgatgaagtcggccaacaccttcgaactgaagtacgacctgtcatgcgagctttataggatgtcgacttactcgacctttccggcaggagtccctgtcagcgagcggagcctggcgcgcgccggcttttactacactggagtgaacgacaaggtgaaatgcttttgttgtggattgatgctcgataactggaagcggggcgattcccccacggagaagcataagaaactctacccgtcgtgcagattcgtgcagtcgctgaactcagtcaataacctcgaggccacctctcaaccaaccttcccgtcatcggtgactaactccactcactcactgctccccggcaccgaaaacagcgggtacttcagggggagctactcgaactcgccgtctaaccctgtcaattccagggcgaaccaggatttctcagccctgatgcgctcctcgtaccactgcgctatgaataacgaaaatgctcgcctgctgaccttccagacctggccactgacttttctctcaccgactgatctggccaaggctggattctactacatcggaccgggcgaccgcgtggcttgctttgcgtgtgggggcaagctctctaactgggagccgaaggacaacgcgatgtcagaacacttgcgccatttcccaaagtgtccgttcatcgagaaccaactgcaggatactagccggtataccgtgtccaacctgtcgatgcagacccacgcggccagattcaagaccttcttcaactggccgtcgtccgttctggtgaatccggaacagcttgcctccgcgggattctattacgtgggaaatagcgatgacgtgaagtgcttctgctgtgacgggggactgcgctgctgggagtcaggggatgacccttgggtccaacatgcgaagtggttcccacgctgcgaatacctcatccgcattaaaggccaggagttcatcagacaggtccaggcatcatatccacatctcctggagcaactcctctccacgtccgactcccccggcgatgagaacgcggaatcaagcattatccacttcgaaccgggcgaagatcactcggaagatgccattatgatgaacaccccggtgataaacgcagcagtggagatgggattttcgcgctcactcgtcaagcaaaccgttcaacgcaaaatccttgctaccggagaaaactaccgccttgtcaatgatcttgtcctggacctgctgaacgctgaggatgaaatcagagaggaagagcgggagagagcaacggaagagaaggagagcaacgacctgctgctcatccgcaagaaccggatggcactgttccaacacctcacttgcgtgatcccaatccttgactccctgctcaccgccggaatcatcaacgaacaggagcatgacgtgatcaagcagaaaacgcaaacgtcactccaagctcgggagctcatcgacaccattttggtcaagggaaatatcgccgccaccgtctttcgcaactctctgcaagaagccgaagccgtgctgtacgaacacctgttcgttcagcaagatatcaagtacatcccaactgaggacgtctccgatctgccagtggaagaacaactgcggcggctccaagaggaacggacttgtaaagtctgtatggataaagaagtgagcatcgtgttcatcccctgcggccatctggtggtgtgcaaagactgcgccccgtcactgaggaaatgcccgatttgccggagcaccatcaaggggactgttcggacttttctgtcg

SEQ ID NO: 257531 - DNA, 1812 bp, Artificial Sequence
  derived and/or modified sequence
atgaatatagtggagaattccatcttcctcagtaatcttatgaagagtgccaatacatttgaactcaagtatgacctgtcttgtgaattgtaccgcatgagcacgtatagcacgttccccgctggagtgccggtctcggagaggtctctggcgagggcaggcttctattacaccggggtgaacgataaagtgaaatgcttctgctgtgggttaatgctcgacaactggaagcgcggcgacagtcccaccgagaagcacaaaaagctctatccctcttgccgattcgttcaatctttaaatagcgtcaataacctcgaggccacaagtcagccgacctttcccagttctgtaaccaacagtactcactctctgctgccaggaacggaaaatagtggctattttcggggatcttacagcaattccccttctaacccagtgaacagccgcgcgaaccaggacttctcagctctgatgaggtcctcataccattgcgccatgaacaacgagaacgcaagactgttgacttttcagacctggccactgaccttcctctctcccactgacttggcaaaagctggcttctactacattgggccaggcgaccgcgttgcatgcttcgcgtgcggcggaaaattgagtaattgggaacctaaagataatgccatgtccgagcatttgagacacttccctaagtgtcccttcatagagaaccagctccaagacactagccgttatacagtcagcaatctgtctatgcaaactcacgccgcgcgttttaagactttttttaactggcccagtagcgttcttgtgaaccccgagcagctcgcctctgccggattctactacgtgggtaacagtgacgatgtaaagtgcttttgctgtgatggtggcctccggtgttgggaatccggcgatgatccgtgggtacagcacgccaagtggttcccacgttgcgaatatctgattaggatcaagggacaggaattcattcgccaggtgcaagcctcctacccccatctgctagaacagttgctgtctacgtccgattcccctggcgatgagaacgccgaatcgtccatcattcatttcgaacctggggaggatcattccgaagatgccattatgatgaacactccagtgattaatgccgcagtggagatgggtttcagccggtctttggtcaagcaaaccgtgcagcgaaagattctggcaacgggcgaaaactataggctcgtgaatgatctggtgcttgacctactcaatgccgaagacgagatcagggaggaagaacgggaacgagctaccgaggagaaagagtctaatgatctcctgctgatccggaagaaccgtatggccttattccagcaccttacttgtgtgattcctatcttggattccctcttgactgccggcatcataaacgagcaagagcatgatgtaatcaagcaaaagacacagactagcctgcaggcccgggaactcattgacactatcctcgtcaaaggaaatatcgcagcaaccgtcttccgcaattccctgcaggaggctgaagcggtgctttatgagcatttgttcgttcaacaggatatcaagtacatcccaactgaagatgtgtccgatctgccagtcgaggagcagttacgacggctccaagaggaacggacttgtaaggtgtgcatggacaaggaggtctcaatagtattcataccgtgtggccacttggtggtgtgtaaggactgtgctccttcattgagaaagtgcccgatttgccgcagcacaattaaggggaccgtcaggaccttcctgtcc

SEQ ID NO: 257532 - DNA, 1812 bp, Artificial Sequence
  derived and/or modified sequence
atgaacatcgtggagaattccatctttctctctaatctgatgaagagtgccaacacctttgaactgaaatacgacctgtcttgcgaactgtacaggatgagcacttactccacatttcctgccggcgtgcccgtgagcgagcggagtctggcacgggctggcttttactataccggcgtgaatgataaggtcaaatgcttttgctgtggacttatgctggacaactggaaacgcggagatagcccaacggagaagcacaagaagctgtatccatcctgccggttcgtgcagtctcttaacagcgtaaataacctggaagccactagtcaacccacgttcccgtccagtgtaacgaatagcacacactcgctgctgcccggtactgagaatagtggctattttcggggatcatacagcaattctccttctaatcccgtgaacagtcgcgccaaccaagacttctccgctttgatgcgatcgtcttatcactgtgccatgaacaatgaaaacgcgcgcttgttgacctttcaaacgtggcccttaacctttttgtctccgactgacctggcaaaggctggattctactacataggacccggggacagggtagcttgctttgcatgcggcggcaaattgtcaaattgggagccaaaagacaacgctatgtccgaacatttacggcactttcctaagtgcccttttatcgagaaccaactccaggacacatccaggtacacagtgagcaacctcagcatgcagacacatgccgccagattcaagacattcttcaattggccttcttctgtcctcgtgaatcccgagcaactcgcgagcgccgggttctattatgttggtaattcagacgatgtgaagtgtttctgctgcgacggcggccttcgatgctgggaatccggagatgacccttgggtgcagcacgctaagtggtttcccagatgtgagtatctgattcgaatcaagggccaggagtttatcaggcaagtgcaggcttcctatccacacctccttgagcagctgctgtctacaagtgactcaccaggcgatgagaacgccgaatcttccataatccacttcgagcccggagaggatcactctgaggatgctatcatgatgaacacccctgtgataaatgctgcagtagagatgggcttctcccgctcgttagttaagcaaacggtccaacgcaaaatcctggcgactggcgaaaactatcgtttagtgaatgaccttgttcttgacctgcttaatgctgaagacgagatacgggaagaagagagggagagagctacggaagaaaaagaatcgaatgatctgcttctgatcagaaaaaatcgaatggccctttttcagcacctgacttgcgtcattccaatactggatagccttcttacagccggcatcattaatgagcaagaacacgacgtaattaaacagaagactcagacatctttgcaggcccgcgagctaatcgacacaatccttgtcaaaggcaacatcgctgccaccgtgttccggaattccctccaggaagcggaggcagtgctttatgagcatctatttgtgcaacaggacatcaaatacatccctaccgaagatgtaagtgatctgcctgttgaagagcaactcaggaggctacaggaagaacggacatgcaaggtttgcatggacaaagaagtttccattgtgttcattccctgcgggcaccttgtggtatgtaaagactgcgctccctccctgcggaaatgccctatctgtcggtccacgattaaagggaccgtccgcaccttcctgagc

SEQ ID NO: 257533 - DNA, 1812 bp, Artificial Sequence
  derived and/or modified sequence
atgaatatagtagaaaattcgatatttctatcgaatttaatgaaatcggcgaatacgtttgaactaaaatatgatttatcgtgtgaactatatcgaatgtcgacgtattcgacgtttccggcgggtgttccggtttcggaacgttcgctagcgcgtgcgggtttttattatacgggtgttaatgataaagtaaaatgtttttgttgtggtctaatgctagataattggaaacgtggtgattcgccgacggaaaaacataaaaaattatatccgtcgtgtcgttttgtacaatcgttaaattcggtaaataatttagaagcgacgtcgcaaccgacgtttccgtcgtcggtaacgaattcgacgcattcgttactaccgggtacggaaaattcgggttattttcgtggttcgtattcgaattcgccgtcgaatccggtaaattcgcgagcgaatcaagatttttcggcgctaatgcgttcgtcgtatcattgtgcgatgaataatgaaaatgcgcgtctactaacgtttcaaacgtggccgctaacgtttttatcgccgacggatctagcgaaagcgggtttttattatataggtccgggtgatcgagttgcgtgttttgcgtgtggtggtaaactatcgaattgggaaccgaaagataatgcgatgtcggaacatttacgacattttccgaaatgtccgtttatagaaaatcaattacaagatacgtcgcgatatacggtatcgaatttatcgatgcaaacgcatgcggcgcgatttaaaacgttttttaattggccgtcgtcggtattagtaaatccggaacaattagcgtcggcgggtttttattatgtaggtaattcggatgatgttaaatgtttttgttgtgatggtggtctacgatgttgggaatcgggtgatgatccgtgggttcaacatgcgaaatggtttccgcgatgtgaatatctaatacgtataaaaggtcaagaatttatacgacaagtacaagcgtcgtatccgcatttattagaacaactattatcgacgtcggattcgccgggtgatgaaaatgcggaatcgtcgataatacattttgaaccgggtgaagatcattcggaagatgcgataatgatgaatacgccggtaataaatgcggcggtagaaatgggtttttcgcgttcgttagtaaaacaaacggttcaacgtaaaatactagcgacgggtgaaaattatcgattagtaaatgatctagttctagatttactaaatgcggaagatgaaatacgtgaagaagaacgagaacgagcgacggaagaaaaagaatcgaatgatttattattaatacgaaaaaatcgaatggcgctatttcaacatctaacgtgtgtaataccgatattagattcgttactaacggcgggtataataaatgaacaagaacatgatgtaataaaacaaaaaacgcaaacgtcgttacaagcgcgagaactaatagatacgatattagttaaaggtaatatagcggcgacggtttttcgtaattcgttacaagaagcggaagcggttttatatgaacatttatttgtacaacaagatataaaatatataccgacggaagatgtatcggatttaccggtagaagaacaactacgtcgtttacaagaagaacgaacgtgtaaagtttgtatggataaagaagtatcgatagtttttataccgtgtggtcatctagtagtttgtaaagattgtgcgccgtcgctacgtaaatgtccgatatgtcgttcgacgataaaaggtacggttcgaacgtttttatcg

SEQ ID NO: 257534 - DNA, 1812 bp, Artificial Sequence
  derived and/or modified sequence
atgaacatcgtggagaactctattttcttgtcaaatctcatgaagtccgctaacacgttcgagctcaagtacgacctctcatgcgagctctatcggatgagcacctactcgaccttcccggctggagtcccagtgtcagagcgaagtctggcccgggcgggtttctactacaccggagtgaacgacaaggtgaagtgtttctgctgcggtctgatgctggataactggaagagaggggactccccaactgaaaagcacaaaaagctgtacccgagctgccggttcgtgcagtccctgaattcagtgaataacctggaagccacctcgcaacctactttcccatcgtctgtgaccaattcgacccactcgcttctgcccggtaccgaaaactccggctacttccgtggatcctacagcaattcgccatccaacccggtgaactccagggctaatcaagacttttcagctttgatgcggtcatcctaccactgcgccatgaacaacgagaacgcccggcttcttactttccagacctggcctctcactttcctctccccgaccgacctcgcaaaagcaggattctactacatcggaccaggggaccgggtggcttgtttcgcttgcgggggaaaactgtccaattgggagccgaaggataatgccatgtccgagcacctccgtcatttccctaagtgtccattcatcgaaaaccagctccaagacacttctcgctacacggtgagcaacctgtcgatgcaaacccacgccgctagattcaagacctttttcaattggccgtcgtcagtgctcgtgaaccccgagcaactggctagcgcgggcttttactacgtgggaaacagcgatgacgtgaaatgcttctgttgtgatggcggattgcgctgctgggagtcgggggatgatccctgggttcagcacgcgaaatggtttccccgttgtgagtacctgattcggatcaaagggcaggaattcattcggcaagtgcaagcctcgtacccacacctgctcgaacagctgctttccacgtccgatagcccgggggatgaaaatgcggagagctcgatcatccatttcgagccgggagaggaccattccgaagatgccatcatgatgaacactcccgtgattaacgccgccgtggagatgggattctccagatcgcttgtgaaacaaactgtccaaaggaagattctggcgaccggagagaattacagactggtcaacgacctcgtgctggacctgcttaatgccgaggacgaaatccgcgaggaagagcgcgagagagcgaccgaagaaaaagaatcgaacgatctgctgctgattagaaagaaccggatggccctgttccagcacctcacttgcgtcatcccaatactcgactcacttctgactgccggaatcatcaatgaacaggaacacgatgtgattaaacaaaagacccaaacctcgctgcaagcgcgtgaactgatcgacactatcctggtcaagggcaatatcgctgcgaccgttttcagaaacagcttgcaggaagcagaagcagtcttgtacgaacatttgtttgtgcagcaggacatcaagtacatcccgaccgaagatgtgtccgacctcccggtcgaggagcaactgcgcagactgcaggaagaacgcacctgcaaggtgtgcatggacaaggaagtatcgatcgtgttcattccgtgcggacatctggttgtgtgcaaggactgcgcccctagcctgcggaaatgcccaatctgccgcagcaccatcaagggcaccgtgaggacctttctgtcg

SEQ ID NO: 257535 - DNA, 1812 bp, Artificial Sequence
  derived and/or modified sequence
atgaacatcgtggagaactccatcttcctgagtaatcttatgaagagtgctaatacctttgagctgaagtacgatctctcttgcgagctttacagaatgagcacgtatagtactttcccagctggtgtaccggtgtccgagcgttccctggcccgcgctggcttttactacactggagtgaacgacaaggtgaaatgcttttgctgtggtttgatgctggataactggaagcgcggggatagtcccaccgaaaagcacaagaaactctacccaagctgccgcttcgttcaatctctcaacagcgttaataatttggaagcgaccagccaacccacctttccctcttctgtgacaaactcgacccattctttattgccaggcaccgagaactctggatattttagaggaagctattcaaactcaccaagcaatccagtgaattctcgcgctaaccaggattttagtgccctcatgagaagctcttaccattgcgctatgaataacgagaacgcccggcttctgacttttcagacatggccacttactttcctttccccaacagatcttgcaaaggcgggtttctactatattggacccggcgatagggtggcatgttttgcttgtgggggcaaactgagtaactgggagcctaaagacaatgcaatgtccgagcacctgagacacttccctaaatgcccgttcatcgagaaccagttgcaggacacttctaggtacacggtcagtaacctgtctatgcaaacacatgccgccagatttaaaaccttcttcaactggccttctagtgtgctcgttaaccctgagcaacttgcaagtgcaggcttttactatgtgggtaactccgacgacgttaagtgtttctgctgtgacgggggtctgcgctgctgggagtccggagacgatccttgggtgcaacacgcgaaatggttccccaggtgtgagtacctgatacggatcaaaggccaagagttcatcagacaggtgcaagcgtcttacccacatctccttgagcagctgctgtctacatctgattcccccggcgatgaaaacgcggagtcgtcaatcattcattttgagcctggagaggatcatagtgaggatgctattatgatgaacaccccagtcatcaacgcggccgtggagatgggattctctcggagtctagtcaagcaaaccgtgcaaagaaaaatcctcgctaccggagagaactaccgtctcgtaaacgatctggtgctggacctgctgaatgctgaggacgagatcagagaggaagaaagagagagggcgaccgaggaaaaggagtctaacgatcttctgctcatccgcaagaatcggatggccctcttccagcatctgacatgcgtgatccccatcctggattccttgctgactgccggaattataaacgagcaagaacacgacgtgattaaacagaagactcagacatctctccaggccagagaactgattgacacaatactggtcaaaggcaacatagccgctaccgtgttccgcaattctctccaggaagcagaggctgtgctgtacgaacatttgtttgtgcagcaagacatcaagtacatccccaccgaggatgttagtgacctgccggtggaggagcagttacgtaggcttcaagaagaacgaacatgtaaggtctgcatggacaaggaagttagtatagtcttcattccctgcggccaccttgttgtttgtaaagactgtgcaccatcactgagaaagtgtcccatatgccgcagcactataaaagggactgtgaggacatttctgtca

SEQ ID NO: 257536 - DNA, 1812 bp, Artificial Sequence
  derived and/or modified sequence
atgaatatagtggaaaactccatcttcctatccaaccttatgaagtctgctaacactttcgaactcaaatatgacttgtcatgtgaactgtatcgcatgagcacatatagcacgttccccgcgggagtccctgtgtccgaaaggagcctcgcccgagctgggttctactacaccggtgtgaacgataaggtgaagtgcttctgttgtggtctcatgctggataattggaaaagaggggactcccccaccgagaagcataaaaagctgtacccttcatgccgatttgttcagtccctcaactccgtgaataatttggaagcaacatcacagccgacttttcctagctctgttactaacagcacccactccctccttcccggcaccgaaaattctggttactttcgggggtcttactctaactccccctccaacccagtgaactcgagggcgaaccaagatttctcagcactcatgcgaagcagttaccactgcgccatgaacaatgaaaacgccaggctgcttacctttcaaacttggcctttgaccttcctgagccccacagacctcgccaaggccggcttttattatattgggccaggagatcgcgtagcgtgcttcgcatgtggtgggaagctcagcaactgggaaccaaaggacaatgccatgagcgaacatctgagacattttcccaagtgtccctttattgagaaccagctgcaggatacatctagatacactgtgtccaacctgtcaatgcagacacacgctgcgagatttaaaacgttctttaactggcctagcagcgtgctggtgaatccagaacagctggcgtcagctggattttactacgtcggtaattcagacgacgttaaatgtttctgctgtgacgggggccttaggtgttgggagtccggtgacgatccttgggtgcagcacgcgaaatggttcccaagatgcgaatacctcatccgaattaagggacaggagttcatcaggcaggtacaggcttcctatccccatctccttgaacagttactgagtacttcagacagccccggcgacgaaaatgctgaatccagtattatccatttcgagccaggtgaagaccactcagaggatgccatcatgatgaatactccagtcatcaacgctgccgtggagatgggtttcagccgaagcctggtgaaacagactgtccaacgaaagatcttggccactggcgagaattaccgcctggtgaacgacctcgtgttggatctgttgaatgctgaagatgaaatcagggaggaggaaagggaacgagcaactgaagaaaaggaatcaaacgacctgttgctgattcgcaaaaacagaatggcactctttcagcacctgacttgtgtgataccaatcctggactcgctgcttactgcagggattattaatgaacaggagcacgatgttatcaaacagaaaacacagaccagtctccaggctagagagttgattgacaccatcctagtcaaaggtaacattgccgccaccgtgttcaggaactccctacaggaagccgaagcggtgctctacgaacacctgttcgtgcaacaagacattaaatacataccaaccgaagacgtttcagacttgcctgtagaagaacagctgaggaggcttcaggaagagcgcacctgtaaggtgtgtatggacaaagaagtaagcattgtttttataccgtgcgggcacctggtggtctgcaaggactgcgctccctccctcagaaagtgcccaatatgtagatccaccatcaagggcactgttagaacctttctgtca

SEQ ID NO: 257537 - DNA, 1812 bp, Artificial Sequence
  derived and/or modified sequence
atgaacattgtggagaactcgatttttctgtcgaacctgatgaagtcagcgaatacctttgagttgaaatatgatctttcgtgcgaactgtaccgcatgagcacctactccacttttcctgcaggtgtgccagtgtcggaacgctccctggcacgagcaggattctattacactggagtgaacgataaagtgaagtgcttttgttgtggccttatgcttgataactggaagagaggtgactcgcctactgagaagcacaaaaaactgtacccttcctgtcgcttcgtccagtccctcaactcggttaacaaccttgaggcgacttcgcagccaacctttccatcatcggtgactaattcgactcacagcctcctgcccggaaccgaaaactcggggtactttaggggttcctactccaactctccgtcgaatcctgtgaactcacgggcaaaccaagatttttccgcactgatgaggtcatcgtaccactgtgccatgaataacgagaacgcaaggcttctgaccttccagacctggccactgacctttttgtccccgactgatctggcgaaagctggattctactacattggtccaggagatagggtcgcatgctttgcatgtggaggaaagctgtctaactgggaaccaaaagataacgccatgtcagagcatttgagacactttcccaaatgtccattcattgaaaaccaactgcaggatacttcgaggtatactgtgtccaacctctcaatgcagacccatgcggcacgctttaagaccttctttaactggccatcctcggtccttgtcaatccagaacagctggcaagcgctggcttttactacgtgggcaatagcgatgatgtgaagtgtttttgctgtgatggcggacttcgctgttgggaatctggtgatgacccttgggtccaacatgccaagtggtttccgcggtgcgagtacctgatccgcataaagggacaagaattcattcgtcaggtgcaagcctcatacccccacctgctggagcagctccttagcacttcggattcaccaggagatgaaaatgcagagtcgtccataattcatttcgaacctggagaggatcactcagaggacgccattatgatgaataccccagtgatcaacgccgcagtggaaatggggttttcacgatcacttgtgaagcaaactgtgcagagaaagatccttgccactggtgagaattaccgtcttgtgaacgacctggtgctcgacctgcttaatgccgaagatgaaattcgggaagaagaacgtgaacgtgccaccgaagaaaaggaatccaacgatctcctgttgattagaaagaaccgcatggcgttgtttcagcaccttacttgtgtgatcccaatccttgactcgctccttacggccggtatcattaacgagcaagaacatgatgtcataaagcagaaaacccagacctctctccaggcaagggaacttatcgacaccatcctcgtgaaaggtaacatcgctgccactgtctttcgcaactccctgcaggaagcggaagcggtcctttacgagcatctgtttgtgcagcaggacattaagtatatacctaccgaagatgtctcagatcttcccgtcgaggaacaacttcgcagactccaggaggagaggacctgtaaggtgtgtatggacaaggaagtcagcatagtgtttattccatgcggtcatctggtcgtgtgtaaggattgcgcaccttcgctgcggaagtgtcccatctgtcggtcgaccatcaaggggactgttaggacctttctctca

SEQ ID NO: 257538 - DNA, 1812 bp, Artificial Sequence
  derived and/or modified sequence
atgaacattgtggaaaatagcatattcctttcgaacctgatgaagtccgcaaatactttcgagctgaaatacgacctgagctgtgaactgtacagaatgtcgacctactcaacttttcccgccggggttccagtgtcggaaagatcgctggcacgtgcagggttctactacaccggagtgaacgataaggtgaagtgcttctgctgtggtctgatgctggacaactggaagcggggagattccccgaccgagaagcacaaaaaactttacccgtcgtgtagatttgtccaatcccttaattcggttaacaacctcgaagcaaccagccaaccaacgtttccctcctcagtgactaactccacccattcgcttcttccaggtactgaaaactccggctacttccgagggtcttactctaacagcccctcgaatccagtgaattcgcgcgccaaccaagattttagcgccctgatgagaagcagctaccactgtgctatgaacaatgaaaacgcccgtttgctgacttttcaaacttggccattgacttttctctcccccaccgatctggccaaggcaggcttttactacatcgggcctggcgatcgggttgcctgttttgcatgtggggggaagttgtcgaattgggaaccaaaagacaacgcaatgtcggagcacctcagacatttcccaaaatgcccttttatcgaaaaccagctgcaggatacctcccgttacactgtgtcaaatctttccatgcagactcatgcagcaaggttcaaaacctttttcaattggccgtcctccgtccttgtgaatcccgaacaactggccagcgcaggtttttactacgtgggcaacagcgacgacgtgaaatgtttttgttgtgacggaggactccgatgttgggagtcgggtgatgatccctgggtccagcatgccaagtggtttccacgctgtgagtaccttattagaatcaagggccaagaattcattaggcaagtgcaagcatcatacccacatctgctggaacaactgctttcgacgtcggattcacctggtgacgaaaatgcagagtcatccatcatccatttcgaacctggagaggaccattctgaagatgcaataatgatgaatacgcctgtgattaatgcagcggtggaaatgggattttccagaagcctggtcaagcagaccgtgcaaagaaagatccttgccactggcgagaactacaggctcgtcaatgatctggtgctggacctgctgaatgcagaagatgaaattagagaggaagagcgggagcgggccaccgaagaaaaggagtcgaatgatctgctgcttattagaaagaaccggatggcacttttccagcacctgacttgcgtgattcccattctggactccctgttgaccgcggggattatcaatgaacaagagcatgatgtcatcaagcagaaaacgcaaacctcgctgcaagcacgggaactcattgacaccattttggtgaaaggcaatattgcggcaaccgtctttcgcaacagcctgcaagaggctgaagctgtcctctacgagcaccttttcgtgcagcaagacattaagtacatcccaacggaagatgtgtccgacctgccggtggaagaacaactgcggcgcctgcaggaagaaaggacttgcaaggtttgtatggataaggaagtctcaattgtctttattccttgtggccatctcgtcgtctgcaaggactgcgcacctagcttgcgaaagtgtcccatttgtcgctcgactatcaaaggaactgtgcggacttttctgagc

SEQ ID NO: 257539 - DNA, 1812 bp, Artificial Sequence
  derived and/or modified sequence
atgaacatagtggaaaacagcatctttttgagcaacctgatgaagtctgcgaatactttcgagctcaagtacgatctgagctgcgagctatacagaatgtctacctacagtacgttccccgccggcgttcccgtcagtgagcgctctctggcccgagctggcttctattataccggggtgaacgataaggtcaagtgcttctgctgtggcctgatgctcgacaactggaaaaggggtgattctccaaccgaaaaacacaagaagttgtacccctcttgccgatttgttcagtccctgaactcggttaacaacctcgaggcaacctctcaacctaccttcccaagcagtgtgactaactcaacccatagcctgcttcctgggacagaaaattcaggttacttcagaggtagttactcaaacagcccaagcaaccccgtgaacagtcgggcgaaccaggacttttcagctctgatgaggagtagttatcactgtgctatgaataacgagaacgcccggctactgaccttccagacgtggccactgacattcttaagcccgacagaccttgcaaaggccggcttctattatataggccccggagatagagtcgcttgtttcgcttgcggcggaaaattgagcaattgggagccgaaagataatgctatgagtgaacacttacgtcactttccaaaatgtccatttattgaaaaccagttacaagacacctctcgctacaccgtcagcaacctgtcaatgcagacccacgccgcaagatttaagacattcttcaactggccgtccagcgtgctggttaatccagaacagctggcctccgctggattctattatgttggcaatagtgatgatgtaaagtgcttttgttgcgacggcggcttgcgatgttgggagtctggcgatgacccctgggtgcaacacgccaagtggtttcctcggtgcgagtacctgataaggattaaaggtcaggaattcattcgccaggtacaggcttcttatcctcatcttctggagcaactgctcagcacctccgacagtcccggcgatgagaatgcagagtcttcgattatacactttgagcctggagaggaccacagcgaggacgccattatgatgaacacgcctgtgattaatgccgccgtcgagatggggtttagccggagccttgtcaagcagacggtgcagcgcaagatattagcaaccggtgagaattatcgactggttaacgatctcgtcttggacttacttaacgccgaagatgagatccgtgaggaggaaagggaacgcgccacggaggagaaagagagtaatgaccttctgcttattaggaagaatcgcatggccctatttcagcacctgacatgtgtgattcccatccttgactccctgctgacggctggtatcataaatgaacaggaacacgacgtcattaagcaaaagacccaaacttccctgcaggcacgggaactgatagatactatcctggtaaaggggaacattgccgctactgtgttcaggaatagcttgcaggaagctgaggccgtcctctacgaacatctgtttgttcagcaagatatcaagtacatacccacggaagacgtgtctgacctaccagtggaggagcagctcaggcgcctgcaggaagaaaggacttgcaaagtatgcatggataaggaagtgtctatagtgtttatcccgtgcggtcatctggttgtctgcaaagactgcgctccctcactccggaagtgccccatttgtaggagcaccattaaggggaccgttcggacgtttttatca

SEQ ID NO: 257540 - DNA, 1812 bp, Artificial Sequence
  derived and/or modified sequence
atgaacattgtggagaactcgatcttcctgtcaaacttaatgaagtcagcgaacacattcgaacttaaatatgatctttcctgcgagctgtatcgcatgtccacatatagcacctttcccgccggggtgcccgtcagtgagcggagcctggcgagagcaggattttattatactggtgttaacgataaggtcaagtgcttttgctgcggtcttatgcttgacaactggaagcgtggagacagccccactgagaaacacaagaagttatacccttcctgcagatttgtgcagtcccttaatagcgtgaacaacctcgaggctactagccagcccacattccccagttcggtgaccaactcaacgcattccctgttgcccgggactgagaatagcggttattttagggggagctattccaactccccttctaatccagttaattcccgtgccaatcaggatttttccgctctgatgcgttcgtcttatcactgcgccatgaacaacgaaaacgcccgccttctgacttttcagacatggccactgaccttcctgtcccccactgacctggccaaggccgggttttactatattggaccaggtgaccgggtcgcctgtttcgcgtgcggaggcaaacttagcaattgggaaccaaaagataacgctatgtctgagcacttaaggcacttcccaaagtgcccttttattgagaaccagctacaggatacctctcgttacaccgtttccaatctgagcatgcagacgcatgccgcccgctttaagacgttctttaactggccttcatctgtgcttgtgaatcctgagcaactggcgtctgccggcttctattatgtcggtaattccgacgacgtgaaatgcttctgctgcgacggggggctccgttgctgggagtctggagacgacccctgggtgcagcacgccaaatggtttcctcggtgcgagtatctgatcagaattaagggccaagaattcatcaggcaagtgcaggcctcctatcctcatctgctggagcaactcctgtctacctctgattccccgggcgatgaaaacgcggagagttccattatccactttgagcccggcgaagatcactcagaagacgcaattatgatgaatacacccgtaattaacgctgccgtcgagatggggttcagtcggtcgctcgtgaagcagactgttcagcgtaagatcctggccactggggaaaactatcgcctggtgaatgaccttgtcctagatctgctcaatgcagaagatgagatccgggaggaagaacgcgaaagagcgaccgaggaaaaagaatctaacgatctcttgctgatcaggaaaaaccggatggctctgttccagcacctcacttgcgtgattccgatacttgacagtctgttaaccgcaggaataataaacgagcaggagcacgatgtgataaaacagaaaacccagacatccctccaggctcgtgaactgattgataccatactggtgaagggcaacatcgctgccactgtctttaggaacagcctgcaggaggccgaagccgttctttatgaacatctcttcgtgcaacaggacatcaaatacataccaaccgaggatgtaagcgatctgcccgtagaggaacagcttagacgcctgcaagaggaacggacctgtaaggtttgcatggacaaggaagtttccatagtcttcatcccctgtggccacctggtggtgtgcaaggattgcgctccgagcctgcgtaagtgccccatttgtcgcagcaccataaaaggaacggttcgcacattcttgtca

SEQ ID NO: 257541 - DNA, 1812 bp, Artificial Sequence
  derived and/or modified sequence
atgaacatcgtcgagaattccatctttctttctaacttgatgaagtctgctaacacatttgagctgaagtatgatctttcttgtgaactgtacaggatgtccacctattcaacctttcccgccggggtccctgtgagcgagcggtctctggcccgggctggcttctactacacgggggtgaacgacaaggttaagtgcttctgttgcgggcttatgctggataactggaagagaggcgatagcccaacagagaagcacaaaaaactctacccgtcttgtcggttcgtccagtctctgaattcggtcaacaatttggaggctactagtcagcctacatttcccagctctgtgaccaatagcacacactcccttctgccaggaacagagaatagcgggtactttagaggcagttactcaaacagccctagcaacccggttaactctagagctaatcaggacttttccgccctgatgcggtctagctatcactgcgctatgaacaacgaaaacgcccggctgctgacgttccaaacatggccactcacattcttgtcaccaacggatcttgcaaaggccggcttctattatatcggcccaggggacagagtggcatgcttcgcctgtgggggcaaactctccaattgggagcccaaggacaatgctatgagcgagcatctgcggcactttcccaaatgcccattcatcgagaatcagctacaggacaccagccgctataccgttagtaacctgagtatgcagacccatgccgctcggtttaaaacgttctttaattggccttcatccgtgctcgtaaatcccgagcagctggcaagcgcggggttttattacgtcgggaactccgacgatgtgaaatgcttctgttgcgatggggggttgcggtgttgggagtccggagacgatccgtgggtacagcacgctaagtggttcccccgttgcgaatacctcattcgaatcaagggccaggagttcatcagacaggtgcaggcctcttacccccatttattagagcagctgctatccaccagcgattcgcccggggacgagaatgctgagtcgtcgatcattcacttcgaacctggggaagatcatagcgaagacgccatcatgatgaacacacccgtgattaacgctgctgtggagatgggcttttctcgttctctcgttaaacagaccgtgcaaagaaagatcctggctaccggcgagaactatcggctggtgaacgatctggtgcttgacctcctcaatgccgaggacgagatcagggaagaggaacgggaaagagccaccgaagagaaagagtctaacgacctgctgttgatccgcaagaatcgcatggcactgttccagcacctgacctgtgtgattccaattctggattccctcctgactgcaggtattatcaatgaacaggaacacgacgttatcaagcagaagacccagacaagcctccaggcgagagaattgatcgatacgatcctggtaaaagggaacatcgccgccaccgtgttccgcaatagcctgcaggaggcggaagcagttctgtatgagcacctgttcgtacaacaggatatcaagtacatccctacagaggacgtgagcgacctgccggttgaagagcagctgagacggttgcaggaagagcggacttgcaaggtctgtatggataaagaagtttcaatcgtgtttataccctgtggccacttagtggtatgcaaggactgcgctccatcgttaagaaaatgccccatatgtaggtctaccattaaggggacagtccgcaccttcctctct

SEQ ID NO: 257542 - DNA, 1812 bp, Artificial Sequence
  derived and/or modified sequence
atgaacattgtggagaactcgatctttctctccaaccttatgaaatcggcgaacactttcgaactcaagtacgacctgtcttgcgagttgtacagaatgagcacgtattccactttcccagcaggtgtgcctgtgagcgaacgcagcctcgcgagagcaggattttactacactggagttaacgacaaggttaagtgcttctgctgcggcctgatgctggacaattggaagcgcggagattccccaaccgagaaacacaaaaagctgtacccgtcctgccggttcgtgcagagcctgaactccgtcaacaatctcgaggcaacctcccagccgaccttcccttcgtcggttaccaacagcacccactccctgcttccaggcaccgaaaattccggctattttcgggggtcatactcaaatagcccgtccaaccctgtcaactcacgggccaatcaggacttctcggcccttatgcggtcgtcgtaccactgcgcgatgaacaatgaaaatgctcggcttctcaccttccaaacctggccgctgacttttctttcaccaactgaccttgcgaaggccggattctattacattgggccaggggatcgcgtggcctgttttgcctgcgggggcaaactgtcgaattgggagcctaaggacaacgccatgtcagaacacctccgccacttcccgaagtgccctttcatcgaaaaccagctccaagatacctcacgctacacggtatcgaatctgtccatgcagacccatgccgcacgtttcaagacctttttcaattggccgtcatcagtccttgtgaatcctgagcagctggcctcagcgggattctactatgtgggtaattccgatgacgtcaagtgtttttgttgtgacggaggactgcgctgttgggaatcgggcgacgacccgtgggtgcagcatgccaagtggttcccacggtgcgaatacctgattcggatcaagggccaggaattcatccggcaagtccaagcatcgtacccacatctgctcgaacaattgcttagcaccagcgacagcccgggggacgagaacgctgaatccagcatcatccacttcgagccgggcgaggaccattcagaggatgcgattatgatgaacaccccggtgatcaacgcggccgtggagatgggtttctcaagaagtctcgtgaagcagactgtgcagaggaaaatactggctaccggagagaactaccgcttggtgaatgacctcgtgctggatttgttgaatgccgaagatgaaatccgcgaagaggaacgggaacgtgccaccgaagaaaaggaatccaacgatctgctcctgatcagaaagaaccgaatggcgctgttccagcacctgacctgcgtgatccctatcctcgattctcttctgacggccgggatcataaacgaacaggagcacgacgtaatcaagcaaaaaactcagacgtcgctgcaagctcgggagctgatcgatacgatcctggtgaaaggcaacattgccgccacggtgtttcgcaattcgcttcaagaggccgaggcagtgctgtacgaacatttgttcgtgcaacaagacattaagtacatccccactgaggacgtctccgacctgccggtggaggaacagctgcgcagattgcaggaagagagaacctgcaaggtgtgcatggataaggaagtttccatcgtgttcatcccctgcggacatcttgtcgtgtgcaaagattgcgcgccttcactgcggaaatgtccaatctgtagatcgactatcaagggaaccgtccggacttttctgtcg

SEQ ID NO: 257543 - DNA, 1812 bp, Artificial Sequence
  derived and/or modified sequence
atgaacatcgtagaaaactccatctttctgagcaatcttatgaaaagtgccaacacctttgagttgaaatatgacttgtcatgtgaactctaccgcatgagtacatattccacattccctgctggcgtgcccgtgtctgagaggtccttggctagggcaggcttttactacacgggagtgaacgacaaggttaagtgcttctgctgcggcctgatgctcgataactggaaacggggcgatagccccactgaaaaacataaaaagctctacccttcatgcagattcgtgcagagtctgaatagtgtaaataacctggaggctacatctcagccaaccttcccatcctctgtgaccaactcaacccattccctgctccccggcacggagaacagcggttatttccggggctcctactctaacagcccaagcaatccagtgaatagtagggcaaaccaggattttagcgctttgatgaggtcatcttatcactgcgcaatgaacaatgaaaacgctcgactgctgacatttcaaacttggcccctcacattcctgtcaccaaccgatctggcaaaagccggattctattatatcgggccaggagatagggttgcctgcttcgcatgtggggggaagctttccaactgggagcctaaggacaacgctatgtctgagcacctgagacacttccctaagtgtcctttcatcgaaaaccagctgcaagacacttctaggtacacggtatctaacctgtccatgcagactcatgccgccagattcaagaccttctttaactggcctagctcagtgctggtcaacccggagcaactggccagcgccggtttttattatgtaggtaacagcgacgacgtcaagtgtttctgctgcgacggaggattgcggtgttgggagagcggcgacgacccctgggtgcagcacgcaaaatggtttccacgatgcgaatacctgattaggattaaggggcaggagttcattcgccaggtgcaggcgagctatccgcatctgctggagcagctcctcagcacgtcagattctcccggggatgagaacgccgagtcctccataatacacttcgaacccggtgaggatcacagcgaggacgcgatcatgatgaatacccccgtgatcaacgctgccgttgaaatgggcttttcaagaagcctggtgaagcagacagtgcaaagaaagattctggccacaggcgagaactacagactggtcaacgacctggtgttggacctcctcaacgctgaggatgagatcagagaggaggaacgagagagggcaacagaagagaaggaatcaaacgatcttctgctgatcaggaagaatcggatggctctgtttcagcacctcacctgtgtgatcccgattctggacagtctgttgacggctgggataataaacgagcaagaacatgacgtcatcaaacagaaaacgcagacatcacttcaggccagggagctcattgacacgattctggtaaaagggaatatcgctgcaacagtgttccgcaactccctgcaggaggccgaggccgtgttgtacgagcatttgttcgtgcagcaggacatcaagtacatcccaacggaggatgtgtcagatctcccagtggaggaacagttgaggaggctgcaggaggagagaacatgcaaagtttgcatggacaaggaggtctcaattgtgttcattccctgcggccaccttgtcgtgtgcaaagattgtgccccatccctccgaaagtgcccaatctgtcggtctacaatcaaagggacagtgcggacattcctctcc

SEQ ID NO: 257544 - DNA, 1812 bp, Artificial Sequence
  derived and/or modified sequence
atgaatatcgttgagaacagcatctttctttcaaatctaatgaaatctgccaatactttcgagctgaaatatgatctctcttgtgaactgtatagaatgagcacttacagtacatttcctgctggggtaccagtgtctgagcgatctctcgccagggccggattctactacacgggggtgaacgacaaggtcaaatgcttttgctgtggcctcatgctcgacaattggaaaaggggtgatagcccaacagagaagcacaaaaagctctacccaagctgcagattcgtccagtcgctgaatagtgtgaacaatctggaagcaacttcccagcccacatttcccagctcagtaacaaactcgacccacagcttattgccaggaacagaaaactctggctatttccggggctcatactcaaacagccccagtaatccagtcaacagcagagctaatcaggattttagcgctttgatgcgctcctcttaccactgtgctatgaacaatgagaatgcacgactcctgacattccagacatggccacttacattccttagccctaccgatctcgcaaaagccggattttactacatcggcccaggcgaccgcgtggcttgctttgcctgtggggggaagttgtcaaattgggagccaaaggataatgccatgtccgagcacctcagacacttcccaaagtgtcccttcatcgagaatcagctccaggatacgtcccgctatacagtctccaacctctcgatgcagacacacgctgctagattcaagacattttttaattggcccagctccgtactggtaaaccccgaacagttagcttccgccggtttctattatgttgggaattcagacgacgtcaagtgtttttgctgcgacgggggcctgaggtgttgggaatctggagacgacccatgggtacaacatgcgaaatggtttcctagatgcgagtacctcattcgcataaagggccaggagtttataaggcaggtgcaagccagctatccgcatctcctggaacaattgctgtcaacatccgattcccccggcgacgaaaatgccgagagctccattatacatttcgagccaggcgaagatcactccgaggatgccatcatgatgaatacacccgttataaatgccgctgtcgaaatgggttttagccgttctcttgttaagcagactgtgcagaggaagattctggccaccggagagaattaccggcttgtcaacgatttggtgcttgacctgctaaacgcagaggacgagataagggaggaagagcgggagcgtgctacggaagagaaggagagtaatgatctgctgctgatacggaagaacagaatggcattgttccaacacctcacctgcgtgatcccaatcctcgacagcctgctcaccgcaggcattattaacgaacaggagcatgatgtgattaagcaaaaaacccagacatcactacaagcccgcgaactgattgataccattctcgtgaaaggcaacatagccgccacagtgttccgcaacagccttcaagaagccgaagccgtcttgtacgagcacctatttgtgcaacaggatataaagtacatacccactgaagatgtgagcgatctgccagtcgaggaacagctccggagactgcaggaggagaggacctgcaaggtctgcatggacaaggaagtatccatcgtgttcataccctgcgggcatttagtcgtgtgtaaggattgcgctcctagcctccggaaatgccccatatgcaggtcgacaataaaagggactgttcgcactttcttatcc

SEQ ID NO: 257545 - DNA, 1812 bp, Artificial Sequence
  derived and/or modified sequence
atgaatatcgtggaaaatagcatcttcctgtcgaacctcatgaagtccgcaaacaccttcgaactgaagtacgatctgtcgtgcgagctgtaccggatgtccacttacagcaccttcccagccggagtgcctgtctccgagcggagcctcgcccgtgcaggattttactatactggagtgaacgataaggtgaaatgcttttgttgcggtctgatgctggataactggaagcgcggagacagcccgacggaaaagcataagaaactttatcccagctgccgtttcgtccagagcctcaattcagtaaacaaccttgaagcgacctcgcagcctaccttcccgtcgtccgtgactaactcgactcactctcttcttccgggcactgagaactctggatacttccgcgggagctactcgaacagcccaagcaacccagtgaattcgagagccaatcaagatttctccgccctcatgagatcctcctaccactgcgccatgaacaacgagaatgcccgcttgctcactttccaaacttggccactcacttttctgagcccgaccgatctcgcgaaagcaggcttctactacatcggacctggagatcgcgtcgcgtgttttgcatgcggagggaagctgtcgaactgggaaccgaaagacaacgccatgtccgagcatcttcggcactttccgaagtgcccatttatcgaaaatcagttgcaggacaccagcagatacactgtgagcaacctgtccatgcaaacccatgctgctcggtttaagactttcttcaactggccttcaagcgtgctggttaaccccgagcagctcgcttccgccggattctactatgtgggcaactcagacgatgtgaagtgcttctgctgtgacggcgggcttaggtgctgggaatcaggtgatgacccctgggtgcaacacgcgaagtggttcccgcggtgcgaataccttatccggatcaaaggccaggaattcatacgccaagttcaggcctcttatccgcacttgcttgaacagcttctgtcgacttccgactccccgggagatgaaaacgcggaaagctccatcatccactttgagccaggagaggatcactcagaggacgcaattatgatgaacaccccggtgatcaatgccgccgtcgaaatgggcttctcacgaagtctggtgaagcagacggtgcagaggaaaatcctggcgacgggtgagaactaccgcctggtgaacgatttggtccttgacctgctgaatgccgaggacgagatccgggaagaagaaagagaacgggcaactgaggagaaagaatccaatgaccttctgctgatccgaaagaatagaatggctttgttccagcaccttacctgcgtcatccccatcctcgactccctgctcaccgctggcatcataaatgaacaagaacatgacgtgattaagcaaaagacccagacctccctgcaagctcgcgaactgatcgatactatcctggtgaagggtaatatcgcggccaccgtgtttcgcaatagcctgcaggaagccgaagccgtcctgtacgagcaccttttcgtccagcaggatatcaaatacattcctaccgaggatgtgtcggacttgccagtcgaggaacaactgcgcaggctccaggaggagcggacctgtaaggtctgtatggacaaggaagtctctatcgtgttcatcccttgtggacatctggtagtgtgcaaggactgcgctccgtcgctgagaaagtgcccgatttgccggtcgacgatcaaaggtaccgtgcgcactttcctgtcg

SEQ ID NO: 257546 - DNA, 1812 bp, Artificial Sequence
  derived and/or modified sequence
atgaacattgtcgagaattccatttttctctcgaatcttatgaagtccgcaaacaccttcgaactcaaatacgacctgtcgtgtgaactttataggatgagcacctattcgaccttcccagcaggggtccccgtgtccgagagatcccttgcaagagccggcttttactacaccggagtgaacgataaagtgaaatgtttttgttgcggtctgatgttggataactggaagagaggagatagccctactgaaaaacacaagaagctctacccaagctgccggtttgtccagtccctcaactcagtcaacaatcttgaagcaacttcgcaacccacgttcccttccagcgtgactaattccacccatagcctgctccctggtaccgaaaattccggatacttcaggggtagctactctaactcgccgtccaaccctgtgaacagccgcgctaatcaggatttttcggcactgatgaggagctcataccattgcgccatgaataacgaaaacgctagacttctgaccttccagacttggccactgacctttctttcgcctacggatctggctaaggcaggcttctactacatcggacctggtgatcgggtcgcgtgttttgcatgtggtggaaagctgtcaaactgggaaccgaaggacaacgcaatgtcggagcatcttagacattttcccaagtgtccgtttatagagaatcagctgcaagacacctcgcggtacacggtgtcgaacttgtccatgcagacgcatgccgcacgttttaagacctttttcaattggccctcatcggtcttggtcaacccagaacaactggcaagcgcagggttctattacgtggggaacagcgatgatgtcaagtgtttctgttgcgacggtggcctgaggtgctgggaaagtggtgatgacccttgggtgcagcatgcaaagtggtttcctcgctgcgagtacctgattcgaattaagggtcaagagtttattcgtcaggtccaagcatcatacccgcatctgcttgaacagctgctcagcacctcggacagccctggtgatgaaaacgcagagagctcgataattcattttgaaccaggcgaagatcactccgaggacgcgatcatgatgaatactcctgtgattaatgcagctgtggaaatgggcttttcacgaagcctggtgaagcaaaccgtccaaaggaagattctggccaccggggagaattacagacttgttaacgaccttgtcttggatcttctcaatgccgaggacgagatccgggaggaagaacgcgaaagagccaccgaagagaaagagtccaacgatctgctcctgataaggaagaacaggatggcactcttccagcatctgacctgtgtgatacctatcctggactcccttcttaccgcagggatcataaacgaacaagaacacgatgtgattaagcaaaagacccaaacttcccttcaagcccgggagctgattgatactattctggtcaaggggaatatagcagcgaccgtctttcgcaattcgttgcaagaagcagaggcggtgctctacgagcatctgttcgtccagcaagacattaagtacattccgaccgaggacgtgagcgatcttcctgtggaggagcaactgagacgtctccaagaggagaggacctgtaaggtgtgcatggataaggaggtgagcattgttttcatcccatgtgggcatctggtggtgtgtaaggactgtgcaccttcgctgaggaagtgtccaatttgtcggtccaccatcaagggaactgtgcgcacttttttgtcg

SEQ ID NO: 257547 - DNA, 1812 bp, Artificial Sequence
  derived and/or modified sequence
atgaatatcgtggagaactccatcttcttgtcgaatctcatgaagagcgccaataccttcgaactgaaatacgatctcagctgcgaactctaccgcatgtcgacgtattcgacctttccagctggtgtgcccgtgagcgagcggtccctggcgcgcgcaggtttctactacactggcgtgaacgacaaggtgaagtgtttctgctgcggactgatgcttgacaactggaagcggggagacagcccaactgaaaaacacaagaagctgtacccatcatgcaggttcgttcagtcccttaactcggtaaacaacctcgaagctacctcacaaccgactttccctagctcagtgactaattcgactcactccctgctcccagggaccgagaactcgggatactttcggggaagctactctaattcccctagcaacccagtgaactcccgggcgaaccaagacttctcagcgctcatgaggtcgtcctaccactgtgctatgaataacgagaacgctcgccttctcacctttcagacttggcctctgaccttcctgtccccgaccgacctggccaaggcgggattctactacattggaccgggagatagagtggcttgcttcgcctgcggcggtaaactgtccaattgggaaccgaaggataacgcgatgtcagagcacctgaggcacttcccgaagtgtccgttcatcgaaaaccaacttcaagacacctcccgctacactgtctccaatctctcaatgcaaacccatgccgcgcgctttaagactttcttcaactggccgagctcagtgctggtgaaccccgaacagttggcgtcagcaggattttactacgtgggcaactcagacgatgtgaagtgcttctgctgcgatggggggcttcgctgctgggagtccggcgacgacccttgggtgcaacatgcaaaatggttcccgcgctgtgagtacttgattagaatcaaaggacaggaattcatcagacaagtccaggccagctacccgcacctgctggagcagctcctgtctacttcggacagccctggcgatgaaaatgcagaaagctcgatcatccacttcgagcctggagaggatcactccgaggacgccattatgatgaacactccagtcatcaacgcagcggtcgaaatgggattttcgcgctccctcgtgaagcagaccgtgcagcgcaagatcctggcgactggggagaattaccggctcgtgaatgacctcgtgctcgacctcctgaatgcagaagatgaaatccgggaagaggaacgggaaagagctaccgaggaaaaggagtccaatgacctgctgctgatcaggaaaaatcggatggctctgttccagcacctgacttgcgtgatccctatcctcgacagcttgcttactgcggggatcattaacgaacaggaacatgatgttatcaagcagaaaactcagacctccctgcaggcacgcgagctgattgacactatccttgtgaagggaaacattgcggccactgtctttcgcaactcactgcaggaagcggaagcagtgctgtacgaacacctgtttgtccagcaagatatcaaatacatcccaactgaagatgtttcagatctccccgtggaagaacaactgagacgactgcaggaggagcggacctgcaaggtctgcatggacaaggaagtgagcatcgtctttatcccgtgcggacatctggtcgtctgtaaggattgcgcaccgtccctgaggaagtgtcctatctgtcgctcgacgatcaagggaaccgtgagaaccttcctgtca

SEQ ID NO: 257548 - DNA, 1812 bp, Artificial Sequence
  derived and/or modified sequence
atgaatatagttgagaattctatctttttgtccaatcttatgaaatctgccaacactttcgagcttaaatatgacctctcatgtgagctatatcgcatgagtacatattcgacttttcccgctggggtgcccgtatcagaacggtcactcgctagggcaggattttattatactggggtgaacgacaaagtgaaatgcttctgttgcgggttaatgctcgataattggaaacggggggactctcctacagagaagcataaaaaattgtatccctcttgtcggtttgtgcagtcactcaatagtgtgaacaaccttgaggccacatctcagcccacatttccctcatccgttacgaattccacacatagtcttctgcctggaactgaaaactccgggtatttcagggggtcttattctaactctccctctaaccctgtgaactcgcgggcaaatcaggatttctcagctctcatgagaagtagttatcattgtgcaatgaataatgaaaatgcgcggctcttaactttccagacatggccactcacattcctgtcccccacagatctagcaaaagccggattctactacattgggcccggggatagagtagcctgttttgcttgtgggggaaaactctcaaactgggagcctaaagataatgctatgagtgaacacctccggcattttcccaagtgtccttttatagagaaccaattgcaggacacatcacggtacacagtatcgaatttgtccatgcagactcacgctgcaaggtttaaaacattctttaattggccttcaagtgtcctcgtgaatcctgagcagctagccagtgccggattttattacgtgggaaattctgatgatgtgaagtgcttctgttgcgacgggggactccgatgctgggagtccggagatgacccttgggtgcagcatgccaaatggttccccagatgcgaatacctcattagaatcaaagggcaggagttcataagacaggttcaggcatcttatccacatctattagaacagttactttccacaagtgattcacctggggacgagaacgcagaatcttccatcatacattttgaacctggagaagatcatagtgaggacgccatcatgatgaatacacctgtgattaacgccgccgtggaaatgggattcagtcggtccttggttaaacaaactgtacaacggaagatccttgccacaggagaaaactaccgactcgttaacgatctagttctagatcttctgaatgccgaggacgaaataagggaagaagaaagagagagagcaacagaagaaaaagagagtaacgatctcttgcttataagaaaaaatcggatggctctcttccaacatctaacttgcgtgatccctatcctagattccctgctgacagccggaataattaatgaacaagaacacgatgtgattaaacagaaaacacagacttctttacaggctagagaactaatcgacactatccttgtgaaagggaacattgctgccactgtctttaggaattccttacaggaggcagaagctgtcctctatgaacacctgttcgtccagcaagatattaaatatatccccactgaggatgtcagtgatctaccagttgaagagcagctcagaaggctgcaggaagagcgcacttgtaaagtgtgtatggacaaagaagtctctatagtcttcataccctgcgggcacctcgttgtgtgtaaagattgtgctcctagtcttaggaaatgccctatttgtcggtccacaataaaagggactgtgcgcacttttctctct

SEQ ID NO: 257549 - DNA, 1812 bp, Artificial Sequence
  derived and/or modified sequence
atgaatatcgtcgagaactcgatctttctcagtaaccttatgaaatcagccaataccttcgaactgaagtacgacctttcgtgcgagctgtacaggatgtccacgtactccacctttccagccggagtgcccgtgtcggaacggtccctggctcgcgcgggcttttactacactggagtgaacgataaagtcaagtgcttctgttgtggcctcatgctcgacaactggaagcggggtgactcacccactgagaaacacaagaagctctacccgagctgccggttcgtgcagagcctgaattctgtgaataacctggaggccacttcacagccgacgttcccatcaagcgtaactaattctactcactcactgcttcctggaacggaaaactccggatatttccggggatcgtacagcaacagcccatcgaaccctgtgaattcgcgggcgaaccaagacttttccgcactgatgaggtcgtcctatcattgtgccatgaacaacgaaaacgcacgcctgctgactttccagacttggcctctcaccttcctcagcccgaccgacctggcaaaggctggattttactacatcggtccgggggaccgcgtagcttgcttcgcgtgcggcggtaagctgtccaactgggaaccgaaggacaacgccatgtcagagcatttgcgccacttccctaaatgcccctttatagagaatcaactgcaggacacttcgcggtacaccgtgtccaatctcagcatgcagacccacgcagcacgcttcaagaccttcttcaattggccttcatcggtcctggtgaacccagaacaactggcgtccgcaggcttctactacgtcgggaactcagacgatgtgaagtgcttctgctgcgacggaggtttgagatgttgggaaagcggagacgatccgtgggtccaacacgctaagtggttcccgcgctgcgaataccttatccgcattaaaggccaggagttcattaggcaagtgcaagcgtcgtacccacatctcctggaacaactgctctccacctctgactcaccaggcgacgagaacgctgaatcatcaatcatccatttcgagccgggagaggatcactcggaggacgctatcatgatgaatacgccggttatcaatgcggccgtggaaatgggattctcccgctccctcgttaagcaaaccgtccaaagaaaaatcctggcaacgggcgaaaactacagactcgtgaatgatcttgtgcttgacctcctgaatgccgaagatgagatacgcgaggaggaacgggagcgggcgaccgaagaaaaggaatctaacgacctgcttctcattcgcaaaaaccggatggcgctgttccagcatctgacctgcgtgatccccattctggactcgctgttgaccgcaggaatcatcaacgagcaggaacacgatgtgatcaagcagaaaacccagacctcactccaggcaagagaactgatcgacaccatcctcgtgaagggaaacatcgccgcaactgtctttcgaaattctctgcaggaggccgaagccgttttgtacgaacatctcttcgtccagcaggatatcaaatacattccgaccgaagatgtgagcgatctgccagtcgaggagcagctgaggcgtctgcaggaagaacgcacctgcaaggtgtgcatggataaggaggtgtcgatcgtgtttattccttgcggccacctcgtagtctgtaaggattgtgccccgagccttagaaagtgcccgatctgtagatcgactatcaaggggaccgttcgtacgttcctgtct

SEQ ID NO: 257550 - DNA, 1812 bp, Artificial Sequence
  derived and/or modified sequence
atgaacattgtggagaacagcattttcttatctaatctaatgaagagcgccaatacttttgaactgaagtacgacttgtcgtgtgagttgtaccgtatgagtacgtactcaacttttcctgcgggggtgccggtatcggagaggtctctggcaagggcaggtttctactacactggtgtcaacgacaaggtgaaatgcttctgctgcggtctgatgctggataactggaaacgcggtgatagccctacggagaagcacaagaagctgtacccttcttgtagatttgtgcaaagcctgaacagcgtgaataacttggaagcaacctcacaaccaacctttccttccagcgtcactaatagcactcactctctgctgcccggtactgagaactccggttacttccgggggtcttattccaatagcccttccaatcctgtcaacagccgcgcgaaccaggattttagcgcgctgatgagatcctcttaccactgtgccatgaataacgaaaatgcgcgcctgttaacttttcaaacgtggcccctcaccttcctgagcccaaccgacctggccaaggccgggttctattacattgggcctggcgatagagtcgcatgtttcgcgtgtggaggtaaactgtccaactgggagccgaaggataatgctatgagcgagcatctgcggcatttcccaaagtgcccattcattgagaaccagttacaggacacgagcaggtatactgtcagcaacctgtctatgcagacccacgccgctcgctttaaaacgttctttaattggcccagctctgttctggttaacccagagcagttggcaagtgctgggttttactacgttggtaattcagacgacgtcaagtgtttctgttgtgacggaggtctgagatgctgggaaagcggagacgacccgtgggtgcagcatgctaaatggttcccacgctgcgaatatctgattaggatcaagggtcaagaattcattcgccaggttcaagcgagctacccgcacctcctggagcagctgctgagtacgtccgacagccctggcgacgagaatgcggagtcctcaattatccactttgaacctggggaggatcactccgaagacgccattatgatgaatactccagtgataaacgcggcggtcgaaatgggtttcagtcggagtctcgtgaaacagaccgtgcaacgcaagattctggcaacgggcgaaaattatcgcctggtgaatgatctagtgctggatctgttgaacgctgaggacgagattcgtgaggaggagcgcgaacgcgctaccgaagagaaggaaagcaatgacctgttgctgatccgaaaaaataggatggccctgtttcagcacctgacgtgtgtcatccccatcctggatagcctgctgacggcgggtattatcaatgagcaagaacacgatgtgatcaaacagaaaacgcagactagcctgcaagcacgcgagctgatcgacaccattctagtcaaaggtaacattgctgccacggtctttcggaatagcctgcaggaagccgaggccgtgctctacgaacatctgttcgtgcagcaggacattaaatatattccgacggaggacgttagcgatctgcctgtcgaggagcagttgagacgcctgcaagaggaacgaacctgtaaggtctgcatggacaaggaagtatctatagtgtttatcccatgcgggcatctggttgtttgtaaggattgtgcaccgagcttgcgtaaatgcccaatctgccgatccacaatcaaaggcaccgtgcgcacattcctgagt

SEQ ID NO: 257551 - DNA, 1812 bp, Artificial Sequence
  derived and/or modified sequence
atgaacatcgtggaaaactcaatcttcctctccaacctcatgaaaagcgctaacaccttcgaactgaagtacgacctttcctgcgaactgtacagaatgtcgacttactccactttccccgcaggtgtcccagtctccgaacgctcgttggcccgcgccgggttctattacacgggcgtaaacgacaaggtgaagtgtttttgttgcggactgatgttggacaactggaagcggggtgacagccctactgaaaaacataaaaagttgtacccatcctgccggttcgtgcagtccctgaactcagtgaataacctggaagctacctcacagccgaccttcccgtcgtcagtcacgaattccactcactcactgctcccgggaactgagaattcgggatacttccgcggatcatactccaatagccctagcaacccggtgaactcacgggcaaaccaggatttctccgccctgatgaggagctcctaccactgcgccatgaacaacgaaaatgccaggctgctcactttccagacctggcccttgacttttctgtcccctaccgatctggcgaaggctgggttttactacatcggaccaggagatcgcgtggcctgcttcgcgtgtgggggaaagctgagcaactgggagccgaaggacaatgccatgagcgagcatctgaggcatttcccgaagtgtccttttatcgagaatcaactgcaagatacgtcacgttacactgtgtcgaacctctcgatgcaaacgcatgctgcccgctttaagacgttcttcaattggccgtcatcggtcctcgtgaatccagagcagcttgcatcggctggattctattacgtcggtaattcggatgacgtcaagtgtttctgctgcgatggtggactgaggtgctgggaatctggagacgatccatgggtgcagcatgcaaagtggttcccaagatgcgagtacctgatcagaattaaaggacaggaattcattcgccaagtgcaggcctcgtaccctcatcttttggaacagctgctctccacttccgactcgcccggagacgaaaacgcagaaagctcgatcatccactttgaaccgggagaagaccactccgaagatgcgattatgatgaacactccagttatcaatgcagcggtggaaatgggattcagccgttccttggtcaaacagaccgtgcaaagaaaaatactggccactggagaaaattaccggctggtgaatgacctcgtgctggatctgctgaacgcagaagatgaaatacgcgaagaagagagagaacgcgctaccgaagaaaaagagagcaacgatctgcttctgatccggaagaataggatggctctcttccaacatcttacctgcgtgatcccaattctggactccttgctgaccgccgggatcatcaatgagcaagagcacgatgtgatcaaacagaagactcagacttcgctgcaggcccgcgagctgattgacaccattctcgtgaagggaaatatcgccgctaccgtcttccgcaactccctgcaggaggccgaagctgtgttgtatgaacacctgtttgttcagcaagacattaagtacattccgaccgaggacgtgtcagacctgccggtcgaggagcagctgcgcagactgcaagaggagagaacttgcaaggtgtgtatggataaagaggtgtctattgtgttcatcccgtgcggacacctcgtcgtgtgcaaggactgcgcaccgtcactccgtaaatgccctatctgtagatccactatcaagggtaccgtccggactttcctttcc

SEQ ID NO: 257552 - DNA, 1812 bp, Artificial Sequence
  derived and/or modified sequence
atgaacattgtcgaaaactcgatcttccttagcaaccttatgaagtcggcaaacacttttgaacttaagtacgacctttcgtgtgaactctacagaatgtcaacgtattcaacctttccggcaggtgttcctgtcagcgagcggtcgctggcccgtgcaggtttttactacactggtgttaacgataaagtgaagtgcttttgttgtgggcttatgcttgataattggaaaaggggagacagcccaacggaaaagcacaagaagctgtacccgtcgtgccgattcgtccagagcttgaattctgtgaataacctcgaggcaacttcccagccgaccttcccgagcagcgtcactaactccacgcactcacttctccctggtactgagaattcaggatatttcagaggatcatactcaaactcgccctctaatcccgtgaactcaagagccaaccaagatttctccgccttgatgagatcctcataccattgcgccatgaataacgaaaacgcccgcctgcttacttttcaaacctggcctctgacctttctgtcgcccaccgaccttgcaaaagccggattctattacatcggaccaggagatagagtggcatgcttcgcttgtgggggaaaattgtcgaactgggagccaaaggataacgctatgagcgagcatcttcgtcattttcctaagtgtccctttatcgagaatcaactgcaagacacttcccggtacaccgtgtccaacctctccatgcagacccacgcggcccgtttcaagacgtttttcaattggcctagctccgtgctcgtgaaccccgaacaacttgcatcggcaggattttactacgtgggaaattcagacgacgtgaaatgtttctgttgtgacggcggcttgcgctgttgggaatcaggcgacgatccttgggtgcaacatgcaaagtggtttcctagatgtgaataccttataagaattaagggacaagagtttatccggcaggtgcaagcctcttaccctcacctcttggaacaactccttagcacctctgatagccctggcgatgaaaatgcggagtccagcattatacatttcgaacctggtgaggaccactcggaagatgccattatgatgaacactcccgtgattaacgccgcagtggaaatgggtttttcacggtcgcttgtgaaacagaccgtgcagcgaaagatactcgcaacgggagaaaactacagacttgtgaatgaccttgtgcttgacctgctgaatgcagaagatgagatccgtgaagaagagcgcgagagagcaactgaagagaaggaatctaacgatcttcttcttattcgcaagaataggatggcgctgtttcagcatctgacctgtgtcattcctatccttgattcgctgctgaccgcggggatcattaatgagcaagaacatgatgtgatcaaacagaaaactcagacctcccttcaagctagggagctgattgataccattctggtgaagggtaacattgcagcaaccgtgtttagaaactcgttgcaagaagcagaagcagtcctttacgagcatctttttgtgcagcaggatatcaagtatatccccactgaggatgtgagcgacctgccagtggaagagcagctcaggaggctccaagaggaaagaacttgcaaagtctgtatggacaaggaagtgtcgatcgtgttcatcccttgcggccaccttgtggtgtgcaaggattgtgcaccctctctgcggaaatgccctatctgtcggtccactattaagggtactgtgcgaacttttctctcc

SEQ ID NO: 257553 - DNA, 1812 bp, Artificial Sequence
  derived and/or modified sequence
atgaatatcgtcgagaattcgatctttcttagcaacctcatgaagtccgccaacaccttcgaactgaagtacgatttgtcgtgtgagctgtaccgcatgtctacttactcgacctttcctgcgggagtgccagtctcagagcggtcccttgcacgggcaggtttttactacaccggtgtcaatgataaggtcaagtgtttctgctgcggactgatgctcgataactggaagaggggagatagcccaaccgaaaagcacaagaagctctatccgagttgcagattcgtccagtcccttaactccgtgaataacctggaggccacctcgcagccgaccttcccgagttccgtgaccaactctacccattcactgctcccgggcaccgagaactcaggttatttccggggcagttacagcaactcaccaagcaacccggtgaattctcgggccaatcaagacttttcggctctcatgcgctcgtcgtatcactgtgctatgaacaacgaaaatgcccgcctgctgacctttcagacctggcctctgacttttctctcccccacggaccttgctaaggctggcttctactacatcggcccgggagatcgcgtggcctgttttgcatgtgggggaaagctctcgaactgggagccgaaggataatgcgatgtcggagcacttgcggcactttcctaagtgtccgttcatcgagaaccagctccaagacacctcaagatacaccgtgagcaatctgtccatgcagactcatgcagcaaggtttaagacctttttcaattggccctccagcgtgctggtgaaccctgagcaactggccagcgcaggattctactacgtgggaaatagcgacgacgtgaaatgcttctgttgcgacggaggattgcgctgttgggagtcaggagacgacccatgggtgcaacacgctaagtggttcccccggtgcgagtacctgatcagaatcaagggccaggaattcatccggcaagtgcaagcctcctacccacatctgcttgagcagctgctgtcaacttcggattctcccggggacgagaatgccgaatcgtcaatcatccactttgaaccgggagaagatcattcggaagatgcaatcatgatgaacactccagtgattaacgccgctgtggagatgggtttcagccgctcgcttgttaaacagactgtgcaaagaaagatactggctacgggcgagaactaccgcttggtgaacgatcttgtgctggacctgctgaacgccgaggacgaaatcagagaggaagaacgcgaacgggccactgaagaaaaggaatccaacgacttgttgctcatccggaaaaacaggatggcgctgttccagcaccttacctgtgtgataccgattctcgactcgttgctcaccgccggcatcatcaatgaacaggaacacgacgtgatcaaacaaaagacccaaacctcgcttcaggcgcgggagctgatcgacactatcctggtgaaggggaatatcgccgccaccgtttttcggaactcactgcaggaagctgaggcggtgctgtacgaacacctcttcgtccagcaggacattaagtacatccctactgaagatgtgtccgatctcccggtggaagaacagctcagacggttgcaagaggagcgtacttgcaaagtgtgtatggataaagaagtctcgatcgtgttcatcccatgcggacatcttgtcgtgtgcaaggattgcgcgccgtctctgcggaaatgcccgatttgccgcagcaccatcaagggtactgtccgcacgttcctgagc

SEQ ID NO: 257554 - DNA, 1812 bp, Artificial Sequence
  derived and/or modified sequence
atgaacatcgtggagaacagcatctttttgagcaatctgatgaagagcgctaacactttcgaattgaaatacgacctctcgtgcgagctgtaccggatgtcgacttactccacctttccggcaggagtgcccgtcagcgagcgctctctggcacgcgcaggtttctattacaccggagtgaatgacaaagtgaagtgcttctgttgtggactgatgctcgacaattggaagcgcggagattcacctaccgagaagcacaagaagttgtatcctagctgtcggttcgtccagtcactgaatagcgtgaacaacctggaagcgactagccagccgaccttcccctcttccgtaaccaactcaacccactcgctgctgccgggcactgaaaactcagggtatttccggggatcctactccaattcgccttcgaacccggtcaactctcgggcaaaccaagatttctccgccttgatgcgcagctcgtaccactgcgctatgaacaacgaaaacgcgcgcctgcttacgttccaaacgtggccgctgacttttcttagcccgactgatctcgccaaagcgggtttctactacattggtcctggggaccgggtcgcttgcttcgcctgcggcggaaagctgagcaattgggaaccaaaggacaatgccatgtcagaacacctgcgccacttccctaaatgcccattcatcgagaaccagctccaggacacgtcgaggtacaccgtgtcgaatctttccatgcagactcatgctgcccggtttaagacttttttcaactggccatcatcggtgcttgtgaatccagaacagctcgcaagcgcgggattttactacgtcggaaatagcgacgatgttaagtgtttctgctgtgacggaggactgcggtgctgggaatcaggagatgatccctgggtccagcatgcaaagtggttcccaagatgcgagtacctgatccggattaagggacaggagttcatccgccaagtgcaagcgtcgtatccgcacctgctggaacaacttctctcgacctccgattccccgggtgacgagaacgcagaatcaagcatcatccattttgagcctggagaagatcatagcgaagatgcgatcatgatgaacactccagtgatcaatgctgcagttgaaatgggctttagcagatctctcgtcaagcagactgtgcagcgcaagattcttgctaccggggagaattatcgtctggtgaatgacctcgtcctcgatctgctgaacgcagaggacgagattagagaagaagagcgcgaacgggcaaccgaagaaaaagaatctaatgacctgctcctcattaggaagaacaggatggccctgtttcaacacctgacctgcgtgattccgattctcgactctctcctgaccgccgggattatcaatgagcaggaacacgacgtgatcaaacaaaagacccaaacttcacttcaagcgagagaactgatcgacactatcctcgtgaagggcaatatcgcagcgactgtctttagaaacagcctccaagaagccgaggcggtgctgtacgaacacctgttcgtgcagcaggatatcaaatacattcccactgaggatgtttccgatttgcccgtcgaagagcagctgcggcgccttcaagaggagcggacctgcaaggtgtgcatggacaaggaagtgtccattgtgttcatcccgtgcggccacctggtggtgtgcaaagattgtgcgccttccttgcgcaagtgcccgatctgccgttcgaccatcaagggaactgtgcgcacgttcctctcc

SEQ ID NO: 257555 - DNA, 1812 bp, Artificial Sequence
  derived and/or modified sequence
atgaatatcgtcgagaacagcatctttctttccaacctcatgaagtccgcgaacaccttcgaacttaagtacgacttgtcgtgcgaactgtaccggatgtcaacttattccaccttcccagccggtgtgcccgtgtccgaacgaagcctcgcgcgtgccggattttactacactggagtgaacgacaaggtgaaatgcttctgctgcgggctgatgctggacaactggaagagaggcgattcgcccactgaaaaacacaagaaactgtatccatcgtgtaggttcgtacaatcactcaactcggtcaacaatctggaggccacctcacagccaactttcccgtcgtcggtgacgaactcaacgcattcactcctgccgggaaccgagaactcaggatactttcgcggatcctactccaactcaccgtcgaatcccgtcaactcgagagctaaccaagatttcagcgcgctcatgcgctcttcctaccactgcgcgatgaataatgagaacgccagactcctgacctttcagacttggcctctgacgtttctctcgccaactgacctggcgaaggccggtttctactacatcggcccgggtgaccgcgtggcctgcttcgcctgcggagggaagctctcaaattgggagccaaaggacaatgcaatgtcggagcatctgagacacttccccaagtgccccttcatcgaaaatcagctccaggacacctcgagatacactgtttcgaatctgtcgatgcagactcacgcagccaggttcaagacgttcttcaactggccgagctcagtcctcgtgaacccagagcaactcgcttccgctggattctactacgtgggaaactccgatgatgtgaagtgcttctgttgtgacggaggcctgaggtgctgggaatctggcgacgacccttgggtgcagcacgctaagtggttcccgcgatgcgagtaccttatccgaataaagggtcaggagtttattcgccaagtgcaggcgtcgtacccccacctcctcgagcagctgttgagcacctcagattcaccaggagacgaaaacgccgaatccagtatcatccacttcgaaccaggagaagatcatagcgaggacgccattatgatgaatactcccgtgatcaacgcagcagtggaaatgggattcagcaggtcactggtgaagcagaccgtgcagcgcaagattcttgcgaccggcgagaattacagactcgtgaacgatctggtgctcgatttgctcaatgcggaagatgaaatccgggaagaggagcgggagcgtgctaccgaagagaaagagtcgaacgacctgctgctcatccggaaaaaccgcatggcgctgttccagcaccttacctgcgtcattccgatcctggatagtctcctgacggcaggaatcatcaacgaacaggaacacgacgtgatcaagcagaaaactcaaacctcgctccaagctagagagctgatcgataccatcctcgtgaaaggaaatatcgcagcgacggtgttccgcaattcattgcaggaggccgaagcagtgttgtacgagcacctcttcgtgcaacaagatatcaagtacatacctactgaggacgtgtcggatctgccggttgaggagcaacttcggagactgcaagaagaacggacttgcaaggtctgcatggacaaggaagtgagcatcgttttcatcccctgcggacacctggtcgtttgtaaggactgtgccccgagcctccggaagtgtccaatctgccgctcaactatcaaaggaaccgtgaggactttccttagc

SEQ ID NO: 257556 - DNA, 1812 bp, Artificial Sequence
  derived and/or modified sequence
atgaatattgtcgaaaattccatttttttgagcaatttaatgaagtctgcgaacaccttcgaactgaagtatgacctgagttgcgaattataccgtatgtcgacctacagcacgtttccggcgggcgtaccggtaagcgaacgttcactggcgcgggcaggtttttattataccggtgtgaatgataaagtaaagtgtttttgttgtggccttatgttagacaattggaagcggggggattcacctaccgaaaaacataaaaagctgtatccgtcctgtaggtttgtgcagagcttaaattcagtaaataatcttgaagccacatcacaaccaaccttcccatctagtgtaacaaatagtacacatagcctcttaccgggcacagaaaactcaggatactttcggggttcttattctaatagtccttcaaatccggtcaattccagggccaaccaggattttagtgccttaatgaggagctcctatcattgcgctatgaataatgaaaacgctcgcctccttacattccagacctggccgttaacttttttaagcccaacggacttagctaaagctggattctattatatcggacccggtgatagggttgcttgctttgcctgtgggggaaagttgagcaactgggaacctaaagataatgctatgtcggaacacttgcgtcactttccgaaatgcccttttattgagaatcaactccaagatacatctcgctatacggttagcaatctttccatgcagacgcacgctgcgcggtttaaaacgtttttcaactggccatcgtcagtgttagtcaatcccgagcagcttgcttctgctggcttttattatgtcgggaattcggatgatgtcaagtgtttttgttgcgatgggggcctgagatgctgggaatctggggatgatccgtgggttcagcatgcaaaatggtttccgcggtgtgaataccttatccggattaaaggccaggagttcatccgccaagttcaggcctcttatccgcacctgctcgaacagcttctgtcaacaagcgattctcctggcgatgaaaacgccgagtcatcaatcatacacttcgaacctggagaagatcattcggaagatgccataatgatgaatacaccggttataaatgctgcagtggagatgggatttagcaggtcattagtcaagcaaaccgtccaaaggaagatcttagccaccggagaaaattatagattagtcaatgatttagtactggatctgttgaatgcggaagacgagattcgagaagaagagcgtgaacgagcaacagaagaaaaagaaagcaacgatctactgcttattcgcaaaaaccgcatggccctgtttcagcatctgacatgcgtcatccctattctggattccctgctgacagcaggaattattaacgagcaagaacatgacgttataaaacaaaaaacacagacttctctgcaagcaagagaactgattgatactattcttgtaaaaggtaatattgcggcaacagtgtttcgaaattcattacaggaggccgaggcggtcttgtacgaacacctgttcgttcaacaggacataaaatatattccgacagaagacgtctcagacttaccggtcgaagaacagttgcgtagactccaagaagaaagaacgtgtaaagtttgcatggacaaagaggttagtatcgtatttatcccttgcggtcatttggtagtatgcaaagactgcgcaccatcgctgagaaaatgtcctatatgccgatcgacaatcaaagggaccgtgcgcactttcttgagc

SEQ ID NO: 257557 - DNA, 1812 bp, Artificial Sequence
  derived and/or modified sequence
atgaacattgtcgaaaactcgatttttctctccaatctgatgaagtccgctaataccttcgagctgaaatacgatctgagttgtgagctttatagaatgtccacctactcgacctttccagcaggtgtgccagtgtccgagagatccctcgcacgcgctggattctactacaccggagtcaatgacaaggtgaagtgcttctgctgcggactgatgcttgacaactggaagcgaggtgattcccctactgagaagcataagaaactttaccctagctgtagattcgtgcaaagcctgaattcggtgaataacctggaagctacctcccaacctactttcccaagctcggtgaccaacagcacgcacagcctgctgccaggtactgaaaattcaggttactttagaggatcgtacagcaatagcccgtcgaatcctgtaaacagtcgggcaaaccaagatttttccgcacttatgcgctcaagctaccattgcgccatgaacaacgaaaatgcccgccttctgaccttccaaacctggccccttacctttctctcgccgacggatcttgcaaaggcaggattctattacatcggcccaggagacagagtcgcctgttttgcatgcggaggtaaactttcgaattgggagcctaaggataatgccatgagcgaacatctcaggcactttcctaagtgcccatttatcgaaaaccaacttcaggatacttccaggtacaccgtgtcgaacctcagcatgcaaacccacgcagcgaggttcaagaccttctttaactggcccagcagcgtcctggttaatccagaacaactggcatccgcaggtttttactatgtcggtaatagcgatgatgtgaaatgtttttgctgtgatggcggacttcgatgttgggaatctggggatgatccatgggtgcagcacgcaaaatggttcccccgctgtgaataccttataaggattaaggggcaggagttcattcggcaggtccaagcatcgtaccctcatttgctcgagcagctgctgtccacttccgattcgcccggcgacgaaaacgcagaatcctccatcatccatttcgaaccaggagaggatcattcggaagatgcaattatgatgaatacccctgtgataaacgcagcggtggaaatgggtttttcgaggtcccttgtgaaacaaactgtgcagcgcaagattcttgccaccggagaaaactacagactggtgaacgatctggtcctggatcttcttaatgcagaagatgaaatacgagaagaagagcgagaacgggcaactgaagaaaaggagtcaaatgatcttctgctgattcgcaagaatcgcatggcactgtttcaacatctcacgtgcgtcattcctatccttgatagcctgcttactgcaggaatcattaacgagcaagaacatgacgtgattaagcagaaaacccagacttcactccaggcgagggaactgattgacactatcctggtcaaaggaaacattgcggccactgtgttcaggaacagcctgcaagaggcagaagctgtgctctacgaacatctcttcgtgcaacaggacataaagtacatcccaactgaagatgtctccgatctgcccgtggaagagcagcttagacggctgcaagaagaaaggacctgtaaggtgtgtatggataaggaagtgtcgatcgtgttcatcccttgcgggcacctggttgtgtgtaaggattgtgcaccaagcctccggaagtgtccaatttgtcgaagcacgatcaaggggaccgtgagaacctttcttagc

SEQ ID NO: 257558 - DNA, 1812 bp, Artificial Sequence
  derived and/or modified sequence
atgaacatagtggagaactctatctttttgtccaacctgatgaagtctgcgaacaccttcgaactcaaatacgatctctcatgtgaactctacaggatgtccacatactcaactttccccgccggcgtaccggtctccgagagatcactggcccgcgcaggattttactacacaggagtgaacgacaaagtcaagtgcttctgctgcggattgatgctggacaactggaagcgcggcgactctcccaccgaaaagcacaaaaaactctatccttcctgtcgcttcgttcagtccttgaactcagtgaataaccttgaggccacaagtcaacccaccttccccagcagcgtaactaactctacccatagcttgctgccaggtaccgaaaatagtggctattttagaggtagctacagtaattccccaagtaaccctgtgaacagcagggcaaaccaggacttcagcgcactgatgcgctccagctatcactgtgccatgaacaacgaaaacgccagattgctcactttccaaacctggcccctcacgtttctgtcaccgactgatctggccaaagccggtttttactatatcggcccaggcgatcgcgtggcgtgttttgcatgcggcggcaaattgtcaaattgggagcccaaggacaacgccatgagcgagcacctgaggcacttcccaaagtgtcccttcatagaaaatcaattgcaggacactagcaggtacactgtgagcaacttgtcaatgcagacacacgcggctcgcttcaagacttttttcaactggcccagttccgtcctcgtgaaccctgaacagttggccagcgctggtttctattatgttggaaactccgatgacgtgaaatgtttctgttgcgatggcggactgcgctgctgggaatccggagatgatccctgggtgcagcacgccaagtggttccccaggtgtgaatacctgatcaggattaagggccaggaatttatccgccaggtccaagcctcttacccccatcttctcgagcaactgctgagcacctcagattctccaggcgatgaaaatgctgaaagctccatcattcacttcgagcccggtgaggatcactctgaggacgccatcatgatgaacaccccagtgatcaacgcggccgtagagatgggctttagcaggtctcttgtcaagcaaacagtacaaaggaagattctggcgaccggcgaaaattatcgcctcgtgaacgatttggtcctggatctgttgaacgctgaggatgagattagagaagaagaacgcgaaagagccacagaagaaaaggagtctaatgacctgctgttgatccgcaagaacaggatggccctgtttcaacacctgacttgtgtgatcccaatccttgacagccttctcaccgcgggaatcataaacgaacaggaacatgatgtgatcaaacaaaagactcagaccagcttgcaggctagggaactgattgacacaatcctcgtgaagggaaatatcgctgcaacggtgtttagaaatagtctccaggaggcagaagcggtgctctatgagcatctgttcgttcaacaggatatcaaatacatccctacagaggatgtgagtgacttgccagtggaagagcaactgaggaggcttcaggaagagcgcacgtgcaaagtctgtatggacaaggaagtaagcatcgttttcatcccttgtggacacctcgttgtctgcaaagactgcgccccatcactcagaaaatgcccgatttgtcgcagcacaatcaagggcactgtgaggacgtttctgtca

SEQ ID NO: 257559 - DNA, 1812 bp, Artificial Sequence
  derived and/or modified sequence
atgaacattgtagagaactcaatatttttatccaaccttatgaaatcagcgaatacttttgagctgaaatatgatctttcttgcgaattgtataggatgagcacttattccactttccctgccggtgttcctgtgtccgagcgcagcctggcaagggctggtttctattacaccggtgttaacgataaggtcaaatgtttttgttgtgggcttatgctcgataactggaaacgaggggatagccctacagaaaagcacaaaaaactttacccatcatgcaggttcgtgcagagtttgaacagtgttaataatttggaggctacttcacaacctacctttccaagttcggtaactaatagcactcattctctattaccaggaacagaaaatagcgggtattttaggggaagttacagtaattcaccgtccaacccagttaatagtagggctaatcaagatttttctgcgttgatgcgttcatcctaccattgtgctatgaataacgagaacgcaaggctcttgacgttccaaacttggcctctcacctttctctcacctacagatctggccaaggccggtttttattacattggcccaggagatcgcgttgcatgttttgcttgtggtggtaagctcagcaattgggaacccaaggataatgctatgagtgaacaccttaggcactttcctaagtgtccatttatagaaaatcaactgcaagatacttcccgttataccgtgtcaaatcttagtatgcagactcatgccgccaggttcaaaacttttttcaactggccatcttccgttctggttaatccggagcaacttgctagcgcaggattctactacgtagggaattccgatgacgtcaagtgcttttgctgcgatggaggtctcaggtgctgggaaagcggtgatgacccttgggttcaacatgcaaagtggttcccacggtgcgagtatttgatccggattaagggacaggagttcattcgacaagttcaagcttcgtatccgcatctactcgagcaacttttatcaaccagtgactccccgggggatgaaaatgctgagtcctcaattattcatttcgaacccggggaggatcacagcgaagatgccataatgatgaatacacccgttatcaatgctgctgtagaaatgggattctcgaggtctcttgttaagcaaactgtgcagaggaagatccttgctacaggagaaaactacagactcgttaatgatcttgttttagacctgttgaatgcagaagatgagataagagaagaagaacgagaacgtgctactgaggaaaaggaatccaatgacttgcttcttataagaaagaatcgaatggcactatttcaacacttgacctgtgttattcctatattggactctcttctcacggctggtatcatcaacgaacaagagcatgacgtgattaaacaaaagactcaaacctcccttcaagctagggagctcattgatacgatccttgtgaaggggaacattgcagctaccgtgtttcgaaattccttgcaagaggctgaggctgtcttgtacgagcatctcttcgtccaacaggacatcaagtatattcctactgaggatgtgtctgatcttcctgtggaagaacagctcaggcggttgcaggaagagagaacctgtaaggtttgtatggataaagaagttagcattgtattcataccatgcggtcatcttgttgtttgtaaggattgtgctccaagtcttaggaagtgtccaatttgtagatctacaatcaaaggcactgtcaggactttcctttcg

SEQ ID NO: 257560 - DNA, 1812 bp, Artificial Sequence
  derived and/or modified sequence
atgaacattgtggaaaactcaatctttctctcgaatctgatgaaatcggcgaacaccttcgaactgaagtacgatctgtcctgcgagctctatcgcatgagcacctactcaacttttcctgccggggtgccggtgtctgaacggtccctcgcacgcgcaggattttactataccggagtgaacgacaaagtcaagtgcttttgttgtggtctgatgcttgataattggaaacggggcgattcgccaaccgaaaagcacaaaaagctctaccctagctgtagatttgtccagtcgctgaactcggtgaacaatttggaagcaacttcgcaacccactttcccatcgagcgtcaccaacagcacccattccttgctgccaggaactgagaattccggttactttcgtggcagctactcaaacagcccgtcaaatccagtgaattcaagggcaaatcaggactttagcgcccttatgagatcatcgtaccattgtgccatgaacaacgagaacgcacgccttctgacttttcagacctggcccttgaccttcctttcacctacggacctggcgaaggcaggtttttactacatagggccgggcgatagagtcgcatgctttgcatgtggagggaagctctcgaattgggaacctaaggataacgcaatgtcagaacatctgagacactttcccaagtgtccatttatcgagaaccaactgcaagatacctcgcggtacactgtgtcaaacctgagcatgcagactcatgcggcaagatttaagacctttttcaattggccttcgtctgtgctggtgaacccagagcagctggcctcagcaggcttttactacgtgggtaactcggacgacgtgaagtgtttctgttgtgatggaggccttcgatgttgggaatcaggtgacgacccatgggtgcaacatgctaagtggttccctagatgtgaatatcttataaggattaagggtcaagagtttatccgtcaagtccaggcatcatacccccatctgcttgagcaattgctgtcaacttcagattccccaggggatgaaaatgccgaatcatccataatacatttcgagcccggagaagatcactccgaagatgcgatcatgatgaacaccccagtgattaatgcggcagtcgaaatgggattttcgagatccctcgtgaagcagaccgtgcaaaggaagatcctggcaactggagagaattaccgcctggtgaatgaccttgtgctggaccttcttaacgcagaggatgaaattcgggaagaagaaagagaacgggcaactgaagaaaaggaaagcaacgaccttcttctcatccggaagaaccgtatggcactcttccagcatctgacttgtgtcattcccatcctcgattccctgctcaccgcaggaatcatcaatgaacaggaacatgacgttatcaaacaaaaaactcagactagcctgcaagcaagagagctgatagataccatccttgtcaagggaaatatcgccgcaactgtctttcggaactccctgcaagaagcagaagccgtgctttacgaacacctgttcgtgcaacaggacataaagtacattcctactgaggacgtctcagatctcccagtggaggaacaactcaggcgacttcaggaagaaagaacttgcaaggtgtgtatggataaagaagtctctattgtgtttataccttgtggtcatctcgtcgtgtgtaaagattgtgctccatccctgagaaaatgccccatttgcagatcaaccattaagggtaccgtgaggactttcctgtcg

SEQ ID NO: 257561 - DNA, 1812 bp, Artificial Sequence
  derived and/or modified sequence
atgaatattgttgagaatagtatttttctatcaaatctcatgaagtctgcaaacacattcgagctgaagtatgacttgtcttgtgagctctacagaatgtcgacatacagcacgttcccagcaggcgtgcctgtgtccgaacgaagcctcgctcgggccggattttactatactggtgttaacgataaagtgaaatgtttctgttgtgggctgatgctagataattggaagcggggcgactctccaaccgagaagcacaaaaagctgtatcccagttgtcggtttgtccagtctttgaattctgtgaacaacctggaggcgacctcccagccaacattccctagttcagtcactaactcgacgcacagcctccttcctgggaccgagaactccggctacttcaggggctcatattctaatagtccctccaatcccgtcaacagcagagccaatcaggatttctctgctttaatgcgatcaagttaccactgcgcaatgaataacgagaatgcacgtctgctgacctttcagacctggccactcacgttcctttctccaaccgacctcgctaaagctgggttttactatataggacccggagaccgcgtcgcgtgctttgcttgtggcggtaaactatcaaattgggagcctaaggacaacgcaatgtccgaacacctcaggcacttccccaaatgtcccttcatcgagaaccagctgcaggacacctcaaggtatactgtgagcaacctaagcatgcaaacacatgcagcacggtttaagacattttttaactggccctcttcagttctcgtgaatcctgaacagcttgccagcgcggggttctattatgtggggaatagtgacgacgttaaatgcttctgctgtgatggcgggctgcggtgttgggagagtggagacgacccttgggtgcaacacgccaaatggttccctcgctgtgaatacctcataagaatcaaaggacaggagtttataaggcaggttcaggccagttatcctcacttattggaacagcttctgagtactagtgatagccctggtgacgagaacgccgaatcctcgatcatacattttgagccaggcgaggaccactcagaggacgctatcatgatgaacactccagtcataaatgcggcagtggaaatgggattctccaggtccctcgttaaacagacggtgcagcgcaaaattctggccactggggagaattacagactggtgaacgatttagttttggatttactgaacgctgaagacgaaatcagagaagaggaacgagagcgtgctacagaggagaaggaatctaacgacctgctgcttatcaggaaaaatcgaatggccctctttcagcatctcacctgtgtaattccaattctggacagtttgctcactgcagggatcatcaacgagcaggagcacgatgtcatcaaacaaaaaacccaaacctctctgcaggctcgggaactgatcgatacgatcctcgttaaaggtaacatcgccgccacggtctttagaaacagcttacaggaagcggaggctgtgctgtacgaacacttgtttgtacagcaggacattaagtacatcccaacagaggacgtgtccgatttgccggtagaagagcagttgcggcgccttcaggaggaacgtacatgcaaagtgtgtatggataaagaagtctccattgtattcatcccatgtggccatctggtggtgtgcaaagactgtgctcccagtctacggaagtgccctatttgtcggtcgaccatcaaagggacggtgcgcactttcctcagc

SEQ ID NO: 257562 - DNA, 1812 bp, Artificial Sequence
  derived and/or modified sequence
atgaacatagtcgaaaattcgatattcctgtcaaacctgatgaagagcgctaatacatttgaattaaagtatgacctttcttgtgagctttacagaatgagcacatatagtacctttcctgcaggtgtccccgtatctgaacgcagcttagcgcgggcagggttctactacacaggggtgaacgataaagtgaagtgtttctgctgcggcctgatgctggataattggaaaagaggcgacagcccaacagaaaaacataagaaactttacccatcctgccgcttcgtgcaatctcttaattctgtaaataatctggaggcgacatcccaaccgacttttcccagctcagtcacaaattctacacactcactgttgccaggtaccgagaacagcggctatttccgtgggagctactcgaattctccatcgaatccggtaaacagccgggctaatcaggacttctccgccttgatgagaagcagctaccattgtgcgatgaacaatgagaatgctaggcttctcacctttcagacctggcccctgacttttttaagcccaaccgacctagctaaagcaggcttctactacatcggcccaggcgacagggtggcatgtttcgcgtgtggaggtaagctgtcaaactgggagcctaaagacaatgccatgagcgaacaccttaggcacttccccaagtgtccatttatcgaaaatcagttacaggatactagcaggtataccgtgagcaacctctcaatgcagacccacgccgcccgcttcaaaactttcttcaattggccttcctcagtattggtgaatccagaacaactcgccagtgccggattctactatgtgggaaattctgacgatgtgaagtgcttttgttgcgatggtggtctcagatgttgggagtcaggggatgatccatgggttcagcatgccaaatggttccctcgatgcgaatacctaatccgcattaaagggcaagaatttatccgccaggtgcaagcctcatatccacatcttctagagcagttactcagtacttctgacagccccggtgacgaaaatgccgaatcctcaatcatccactttgagcctggtgaggatcatagcgaagacgcaataatgatgaacaccccagtaataaacgcggcagtagaaatggggtttagtagatcattggtgaagcagacagtccaacgcaagatcctagctactggagagaactaccgtctcgtgaatgatttggtactagatctcctcaacgccgaggacgagattcgggaagaagagcgagagagggcaaccgaagaaaaggaatctaatgaccttcttttaatccgaaaaaatcgtatggccctctttcagcatctgacttgtgtaattcccattttagatagccttctgactgctggtattattaacgaacaggagcatgatgttattaagcagaaaacccagacttcccttcaagccagagaactaatcgatacgattctagtcaagggaaacatcgctgctacagttttcaggaatagcttgcaggaagccgaagccgtgctgtacgaacacttattcgtgcagcaagacatcaaatacatacctacggaagacgtttcagacctgccagtggaagagcaactgcggaggttgcaagaggagcggacctgtaaagtgtgcatggacaaggaagtatcaatcgtgtttatcccctgcggacatctggttgtctgtaaagactgcgccccatccttgaggaaatgcccaatctgcagaagcacaattaaaggtactgtgagaaccttcctgtct

SEQ ID NO: 257563 - DNA, 1812 bp, Artificial Sequence
  derived and/or modified sequence
atgaatatcgtggaaaatagcatattcctgtcaaacttgatgaagagcgctaacactttcgagcttaaatatgatttgagctgcgagctgtaccggatgtccacatactctactttccccgctggggtaccagtgagcgaacggtccctcgcccgggccggattttactacactggggtgaatgacaaagttaaatgcttctgctgcggcttaatgctcgacaactggaaaagaggggatagtcccaccgaaaagcacaaaaaattatatccatcttgccgttttgtacagagtctcaattctgtgaacaatctcgaagccacaagccaacccactttccctagcagcgtgacaaattctactcactcgttactgccaggcacggaaaattccggctacttccgcggatcctattccaactcgccctctaacccggtgaacagccgtgcgaaccaagatttctctgctttgatgcgctcgagctatcattgcgcaatgaacaacgagaacgccaggctgctcaccttccagacgtggcccttgacctttctgagccctactgacctggctaaagccgggttctactatatcggacctggtgatcgggtcgcttgttttgcctgcggaggaaaactgagtaattgggaacccaaggacaatgccatgtctgaacacctacgccatttccccaaatgtcccttcatcgaaaaccagctgcaggataccagccgctacaccgtgtcgaatctgtctatgcagacccacgcggcacgttttaaaaccttttttaactggcccagctctgtgctggtcaatccggagcagctcgccagtgcgggtttctattacgttgggaattcagacgacgtgaagtgcttctgctgcgatggagggttaagatgttgggaatctggagacgatccttgggttcagcacgccaagtggtttccccggtgcgagtatctgattcgcatcaaggggcaggagttcatcaggcaggtgcaggcatcttacccccatctgcttgaacagctgctcagtacgtccgacagcccaggcgacgagaatgctgagtcaagcatcatacatttcgagccgggggaagaccactcagaggatgctattatgatgaacacccccgtaattaatgcagccgtggagatggggttttcccgcagcctggtcaaacaaacagtccagagaaagatacttgcgacaggagaaaactatcggctggtgaacgatctagtgttagatctactgaacgctgaggacgagatccgggaagaggaaagggagcgtgcgaccgaggaaaaagagtcaaacgacctcctcctgattcgcaaaaatcgaatggcgctgttccagcatctcacctgcgtaataccaattttagacagcctgctcactgctgggatcatcaacgagcaagagcatgatgttattaagcagaaaacccaaacgtcgctgcaggcccgggaactgatagataccatactggtgaagggaaatatagccgcaaccgtttttcgcaactccctccaagaagctgaagcagtcctctatgaacatttgtttgtgcagcaggacatcaagtatataccgaccgaggacgtttcagatctgccagtcgaggagcaactcagaaggctccaggaagagcgcacttgcaaggtgtgtatggacaaggaggtgtccatcgtgttcattccatgcggccaccttgtggtgtgtaaggactgcgccccttctcttaggaagtgtccaatttgtcgatccactataaagggtactgtgagaacatttctgtca

SEQ ID NO: 257564 - DNA, 1812 bp, Artificial Sequence
  derived and/or modified sequence
atgaatatcgtcgaaaacagtattttcttaagcaatcttatgaaatccgctaacacattcgaacttaaatacgacctctcatgtgaactgtatagaatgtcgacatacagcacattcccagctggagtgcctgtgagcgagcgcagccttgccagagctgggttttactacaccggggtgaacgataaagttaagtgcttctgctgcggactgatgcttgacaactggaagcggggggacagtccaacagaaaagcacaaaaagctttacccgagctgcagatttgtgcagtcgttgaacagcgtgaacaaccttgaggcgacctctcaacctacatttccaagttctgttacaaacagcactcactcgttgctccctggaactgaaaactcaggctacttcagggggagctacagcaattcccctagcaaccctgtgaacagcagggcaaatcaggactttagcgctcttatgagaagctcctaccattgcgctatgaacaatgaaaatgcacgcctgctgacattccagacctggccactcacgtttctgagccccactgatctggccaaggccggattctactatatagggcctggggatagagttgcctgcttcgcttgcggaggaaaattaagcaactgggagcctaaagataacgctatgtccgaacacctgcgccactttcctaagtgtcctttcatagaaaaccagttacaagatacctcaagatatacagtgtccaacttgtcgatgcaaacacatgcagcccgcttcaaaaccttttttaattggccaagtagtgtccttgttaaccctgagcagctggccagtgctggcttctactatgtcggcaatagcgatgatgttaaatgcttttgttgcgatggcggcctgcgctgttgggaatctggcgatgacccatgggtgcagcatgccaaatggttcccgagatgtgagtatttaattagaatcaaaggccaggagtttatccgccaggtacaggcctcttacccacatctgcttgagcagttgctctcaacaagcgattctcccggagatgagaacgcagagtcttctatcattcattttgagcccggcgaggaccattccgaggacgccatcatgatgaacaccccggttatcaacgcagctgtggaaatgggcttcagccgcagcctggttaaacagaccgtgcagcgtaaaatcttggccacaggggagaattacagactggtgaatgatctcgtcttggacctgctgaatgccgaggatgaaatcagagaagaggaaagggagcgtgccaccgaggagaaggagagcaacgacctcctgctgatccggaagaacaggatggcactgtttcagcatttaacttgtgtgattcctatcctggattccttgctcaccgcagggataattaacgagcaagagcacgacgtgatcaagcaaaagacacaaacatcgctccaggccagagagttgatcgatacaattttggttaaaggaaatatagcagcaaccgtttttcggaatagtctccaggaagcagaggctgttctctatgagcatctttttgtccagcaggacatcaagtatattcccacggaagacgtgagcgatctgccggtggaagaacagctgaggagactgcaagaagaaagaacctgcaaggtttgtatggataaggaagtctcaatcgtatttataccttgcggccacctcgtcgtctgtaaggattgcgcaccctctctgaggaaatgtccaatctgcagaagcacaattaaaggtaccgttcggacttttctgtct

SEQ ID NO: 257565 - DNA, 5197 bp, Artificial Sequence
  derived and/or modified sequence
ggccaggcgacaggtgtcgcttgaaaagactgggcttgtccttgctggtgcatgcgtcgtcggcctctgggcagcaggtttacaaaggaggaaaacgacttcttctagatttttttttcagtttcttctataaatcaaaacatctcaaaatggagacctaaaatccttaaagggacttagtctaatctcgggaggtagttttgtgcatgggtaaacaaattaagtattaactggtgttttactatccaaagaatgctaattttataaacatgatcgagttatataaggtataccataatgagtttgattttgaatttgatttgtggaaataaaggaaaagtgattctagctggggcatattgttaaagcatttttttcagagttggccaggcagtctcctactggcacattctcccattatgtagaatagaaatagtacctgtgtttgggaaagattttaaaatgagtgacagttatttggaacaaagagctaataatcaatccactgcaaattaaagaaacatgcagatgaaagttttgacacattaaaatacttctacagtgacaaagaaaaatcaagaacaaagctttttgatatgtgcaacaaatttagaggaagtaaaaagataaatgtgatgattggtcaagaaattatccagttatttacaaggccactgatattttaaacgtccaaaagtttgtttaaatgggctgttaccgctgagaatgatgaggatgagaatgatggttgaaggttacattttaggaaatgaagaaacttagaaaattaatataaagacagtgatgaatacaaagaagatttttataacaatgtgtaaaatttttggccagggaaaggaatattgaagttagatacaattacttacctttgagggaaataattgttggtaatgagatgtgatgtttctcctgccacctggaaacaaagcattgaagtctgcagttgaaaagcccaacgtctgtgagatccaggaaaccatgcttgcaaaccactggtaaaaaaaaaaaaaaaaaaaaaaaaaagccacagtgacttgcttattggtcattgctagtattatcgactcagaacctctttactaatggctagtaaatcataattgagaaattctgaattttgacaaggtctctgctgttgaaatggtaaatttattattttttttgtcatgataaattctggttcaaggtatgctatccatgaaataatttctgaccaaaactaaattgatgcaatttgattatccatcttagcctacagatggcatctggtaacttttgactgttttaaaaaataaatccactatcagagtagatttgatgttggcttcagaaacatttagaaaaacaaaagttcaaaaatgttttcaggaggtgataagttgaataactctacaatgttagttctttgagggggacaaaaaatttaaaatctttgaaaggtcttattttacagccatatctaaattatcttaagaaaatttttaacaaagggaatgaaatatatatcatgattctgtttttccaaaagtaacctgaatatagcaatgaagttcagttttgttattggtagtttgggcagagtctctttttgcagcacctgttgtctaccataattacagaggacatttccatgttctagccaagtatactattagaataaaaaaacttaacattgagttgcttcaacagcatgaaactgagtccaaaagaccaaatgaacaaacacattaatctctgattatttattttaaatagaatatttaattgtgtaagatctaatagtatcattatacttaagcaatcatattcctgatgatctatgggaaataactattatttaattaatattgaaaccaggttttaagatgtgttagccagtcctgttactagtaaatctctttatttggagagaaattttagattgttttgttctccttattagaaggattgtagaaagaaaaaaatgactaattggagaaaaattggggatatatcatatttcactgaattcaaaatgtcttcagttgtaaatcttaccattattttacgtacctctaagaaataaaagtgcttctaattaaaatatgatgtcattaattatgaaatacttcttgataacagaagttttaaaatagccatcttagaatcagtgaaatatggtaatgtattattttcctcctttgagttaggtcttgtgcttttttttcctggccactaaatttcacaatttccaaaaagcaaaataaacatattctgaatatttttgctgtgaaacacttgacagcagagctttccaccatgaaaagaagcttcatgagtcacacattacatctttgggttgattgaatgccactgaaacattctagtagcctggagaagttgacctacctgtggagatgcctgccattaaatggcatcctgatggcttaatacacatcactcttctgtgaagggttttaattttcaacacagcttactctgtagcatcatgtttacattgtatgtataaagattatacaaaggtgcaattgtgtatttcttccttaaaatgtatcagtataggatttagaatctccatgttgaaactctaaatgcatagaaataaaaataataaaaaatttttcattttggcttttcagcctagtattaaaactgataaaagcaaagccatgcacaaaactacctccctagagaaaggctagtcccttttcttccccattcatttcattatgaacatagtagaaaacagcatattcttatcaaatttgatgaaaagcgccaacacgtttgaactgaaatacgacttgtcatgtgaactgtaccgaatgtctacgtattccacttttcctgctggggttcctgtctcagaaaggagtcttgctcgtgctggtttctattacactggtgtgaatgacaaggtcaaatgcttctgttgtggcctgatgctggataactggaaaagaggagacagtcctactgaaaagcataaaaagttgtatcctagctgcagattcgttcagagtctaaattccgttaacaacttggaagctacctctcagcctacttttccttcttcagtaacaaattccacacactcattacttccgggtacagaaaacagtggatatttccgtggctcttattcaaactctccatcaaatcctgtaaactccagagcaaatcaagatttttctgccttgatgagaagttcctaccactgtgcaatgaataacgaaaatgccagattacttacttttcagacatggccattgacttttctgtcgccaacagatctggcaaaagcaggcttttactacataggacctggagacagagtggcttgctttgcctgtggtggaaaattgagcaattgggaaccgaaggataatgctatgtcagaacacctgagacattttcccaaatgcccatttatagaaaatcagcttcaagacacttcaagatacacagtttctaatctgagcatgcagacacatgcagcccgctttaaaacattctttaactggccctctagtgttctagttaatcctgagcagcttgcaagtgcgggtttttattatgtgggtaacagtgatgatgtcaaatgcttttgctgtgatggtggactcaggtgttgggaatctggagatgatccatgggttcaacatgccaagtggtttccaaggtgtgagtacttgataagaattaaaggacaggagttcatccgtcaagttcaagccagttaccctcatctacttgaacagctgctatccacatcagacagcccaggagatgaaaatgcagagtcatcaattatccattttgaacctggagaagaccattcagaagatgcaatcatgatgaatactcctgtgattaatgctgccgtggaaatgggctttagtagaagcctggtaaaacagacagttcagagaaaaatcctagcaactggagagaattatagactagtcaatgatcttgtgttagacttactcaatgcagaagatgaaataagggaagaggagagagaaagagcaactgaggaaaaagaatcaaatgatttattattaatccggaagaatagaatggcactttttcaacatttgacttgtgtaattccaatcctggatagtctactaactgccggaattattaatgaacaagaacatgatgttattaaacagaagacacagacgtctttacaagcaagagaactgattgatacgattttagtaaaaggaaatattgcagccactgtattcagaaactctctgcaagaagctgaagctgtgttatatgagcatttatttgtgcaacaggacataaaatatattcccacagaagatgtttcagatctaccagtggaagaacaattgcggagactacaagaagaaagaacatgtaaagtgtgtatggacaaagaagtgtccatagtgtttattccttgtggtcatctagtagtatgcaaagattgtgctccttctttaagaaagtgtcctatttgtaggagtacaatcaagggtacagttcgtacatttctttcatgaagaagaaccaaaacatcgtctaaactttagaattaatttattaaatgtattataactttaacttttatcctaatttggtttccttaaaatttttatttatttacaactcaaaaaacattgttttgtgtaacatatttatatatgtatctaaaccatatgaacatatattttttagaaactaagagaatgataggcttttgttcttatgaacgaaaaagaggtagcactacaaacacaatattcaatcaaaatttcagcattattgaaattgtaagtgaagtaaaacttaagatatttgagttaacctttaagaattttaaatattttggcattgtactaataccgggaacatgaagccaggtgtggtggtatgtgcctgtagtcccaggctgaggcaagagaattacttgagcccaggagtttgaatccatcctgggcagcatactgagaccctgcctttaaaaacaaacagaacaaaaacaaaacaccagggacacatttctctgtcttttttgatcagtgtcctatacatcgaaggtgtgcatatatgttgaatgacattttagggacatggtgtttttataaagaattctgtgagaaaaaatttaataaagcaacaaaaattactctta

SEQ ID NO: 257566 - DNA, 4238 bp, Artificial Sequence
  derived and/or modified sequence
gggcagcaggtttacaaaggaggaaaacgacttcttctagatttttttttcagtttcttctataaatcaaaactacctccctagagaaaggctagtcccttttcttccccattcatttcattatgaacatagtagaaaacagcatattcttatcaaatttgatgaaaagcgccaacacgtttgaactgaaatacgacttgtcatgtgaactgtaccgaatgtctacgtattccacttttcctgctggggttcctgtctcagaaaggagtcttgctcgtgctggtttctattacactggtgtgaatgacaaggtcaaatgcttctgttgtggcctgatgctggataactggaaaagaggagacagtcctactgaaaagcataaaaagttgtatcctagctgcagattcgttcagagtctaaattccgttaacaacttggaagctacctctcagcctacttttccttcttcagtaacaaattccacacactcattacttccgggtacagaaaacagtggatatttccgtggctcttattcaaactctccatcaaatcctgtaaactccagagcaaatcaagatttttctgccttgatgagaagttcctaccactgtgcaatgaataacgaaaatgccagattacttacttttcagacatggccattgacttttctgtcgccaacagatctggcaaaagcaggcttttactacataggacctggagacagagtggcttgctttgcctgtggtggaaaattgagcaattgggaaccgaaggataatgctatgtcagaacacctgagacattttcccaaatgcccatttatagaaaatcagcttcaagacacttcaagatacacagtttctaatctgagcatgcagacacatgcagcccgctttaaaacattctttaactggccctctagtgttctagttaatcctgagcagcttgcaagtgcgggtttttattatgtgggtaacagtgatgatgtcaaatgcttttgctgtgatggtggactcaggtgttgggaatctggagatgatccatgggttcaacatgccaagtggtttccaaggtgtgagtacttgataagaattaaaggacaggagttcatccgtcaagttcaagccagttaccctcatctacttgaacagctgctatccacatcagacagcccaggagatgaaaatgcagagtcatcaattatccattttgaacctggagaagaccattcagaagatgcaatcatgatgaatactcctgtgattaatgctgccgtggaaatgggctttagtagaagcctggtaaaacagacagttcagagaaaaatcctagcaactggagagaattatagactagtcaatgatcttgtgttagacttactcaatgcagaagatgaaataagggaagaggagagagaaagagcaactgaggaaaaagaatcaaatgatttattattaatccggaagaatagaatggcactttttcaacatttgacttgtgtaattccaatcctggatagtctactaactgccggaattattaatgaacaagaacatgatgttattaaacagaagacacagacgtctttacaagcaagagaactgattgatacgattttagtaaaaggaaatattgcagccactgtattcagaaactctctgcaagaagctgaagctgtgttatatgagcatttatttgtgcaacaggacataaaatatattcccacagaagatgtttcagatctaccagtggaagaacaattgcggagactacaagaagaaagaacatgtaaagtgtgtatggacaaagaagtgtccatagtgtttattccttgtggtcatctagtagtatgcaaagattgtgctccttctttaagaaagtgtcctatttgtaggagtacaatcaagggtacagttcgtacatttctttcatgaagaagaaccaaaacatcgtctaaactttagaattaatttattaaatgtattataactttaacttttatcctaatttggtttccttaaaatttttatttatttacaactcaaaaaacattgttttgtgtaacatatttatatatgtatctaaaccatatgaacatatattttttagaaactaagagaatgataggcttttgttcttatgaacgaaaaagaggtagcactacaaacacaatattcaatcaaaatttcagcattattgaaattgtaagtgaagtaaaacttaagatatttgagttaacctttaagaattttaaatattttggcattgtactaataccgggaacatgaagccaggtgtggtggtatgtgcctgtagtcccaggctgaggcaagagaattacttgagcccaggagtttgaatccatcctgggcagcatactgagaccctgcctttaaaaacaaacagaacaaaaacaaaacaccagggacacatttctctgtcttttttgatcagtgtcctatacatcgaaggtgtgcatatatgttgaatgacattttagggacatggtgtttttataaagaattctgtgagaaaaaatttaataaagcaacaaaaattactcttattcttcattgctttatttcaatgacattggatagtttagtcactcccagactctttccataccttcttaaagcctctcaaatattgaactacagtttatactccttcccataagatgcttcttcattgacacttgtagaacacggggtcaacacatcataaaatctattatggaatgcctgagacaagaatcaaacagtccctttagtaagtttgtttattcacttctctattgattcattcaagaagtctcatgccagccccacctattggaagaaggtctgagttttattcttatctctttggtattaattctgaaacttagaaagtacactggttagcaatgcttgggaccaacaggttgttctggtaaataaatctgtttcatattgtcagtgcaacaaaatgtccccctctgcattatgttattggtactcaacacgtccgagtcataactctgtcctttgcttcttatagaggtattaggtcttcaagagcagaagtaagactgtaatagggaatactcaggggaaggcaggcaaaggctagtcatctaaaccagttctagatgtctgtataggggcagatggctctgtaagggcagaagggaaagaccccttcataagggtcacagctgacaatcctataacaaaagacaggttaacaagagaaaaacttaacaaatttatttaatcacagatttacatcaccggggagccttcgtaatgaagatccaaaattacaggggaaactgtgcatttttatgcttaggtttgataatgaatggacagccctgaagaatagtgattggaaaaaaaggatatgatctaatgggaatagacacaggttggggacccagcaaggcctgtctgttcagattattcttggtctctgtgcagcattccttcctcctggatatagggcagggcctgtatgggatggggatattataacctgctatcaagcaaggtaggtcagagaatttatttatggccagctcttacatagttaggtgaggaaagattagagtactatctttaagatgtaagtctggcattgtggaaagatggttccagtttctatgacctaccttggggaagaggaattcaagtttctgtggcttgccttcagggagaatgaggctgagacaggagggcaggataacatcagagaaaaactttgcttctgaggccttcactttgggttttctgagccccaacatctgctagtgttgtaaagagaacaattagggaccaagtgaggggaggaaagaatccatctctgcattctgatgctgggagacttatttccttgaaatgcaattgattttgcctctgctaagaggctctgctggctacccatgtactagccagtgtcctgcatgggtgctaggctgaattatttgtaattgtgcttaggtgatttgtaactcaggtatagggtatttaaatagtaggcaccctttttgcaccatgtgtttttttttttatctagttcttgtatactacagataatatttgaactttgtcatctcactgtaaaacttttgttcatttctcattatggtaataaatagctattataaccaacccatttattcaaatatgttatttccctaagtgttattttgacattttgttttggaaaaaataaatcaccatagataataa

SEQ ID NO: 257567 - DNA, 1812 bp, Artificial Sequence
  derived and/or modified sequence
atgaacatcgtggagaacagcatcttcctgagcaacctgatgaagagcgccaacaccttcgagctgaagtacgacctgagctgcgagctgtaccgcatgagcacctacagcaccttccccgccggcgtgcccgtgagcgagcgcagcctggcccgcgccggcttctactacaccggcgtgaacgacaaggtgaagtgcttctgctgcggcctgatgctggacaactggaagcgcggcgacagccccaccgagaagcacaagaagctgtaccccagctgccgcttcgtgcagagcctgaacagcgtgaacaacctggaggccaccagccagcccaccttccccagcagcgtgaccaacagcacccacagcctgctgcccggcaccgagaacagcggctacttccgcggcagctacagcaacagccccagcaaccccgtgaacagccgcgccaaccaggacttcagcgccctgatgcgcagcagctaccactgcgccatgaacaacgagaacgcccgcctgctgaccttccagacctggcccctgaccttcctgagccccaccgacctggccaaggccggcttctactacatcggccccggcgaccgcgtggcctgcttcgcctgcggcggcaagctgagcaactgggagcccaaggacaacgccatgagcgagcacctgcgccacttccccaagtgccccttcatcgagaaccagctgcaggacaccagccgctacaccgtgagcaacctgagcatgcagacccacgccgcccgcttcaagaccttcttcaactggcccagcagcgtgctggtgaaccccgagcagctggccagcgccggcttctactacgtgggcaacagcgacgacgtgaagtgcttctgctgcgacggcggcctgcgctgctgggagagcggcgacgacccctgggtgcagcacgccaagtggttcccccgctgcgagtacctgatccgcatcaagggccaggagttcatccgccaggtgcaggccagctacccccacctgctggagcagctgctgagcaccagcgacagccccggcgacgagaacgccgagagcagcatcatccacttcgagcccggcgaggaccacagcgaggacgccatcatgatgaacacccccgtgatcaacgccgccgtggagatgggcttcagccgcagcctggtgaagcagaccgtgcagcgcaagatcctggccaccggcgagaactaccgcctggtgaacgacctggtgctggacctgctgaacgccgaggacgagatccgcgaggaggagcgcgagcgcgccaccgaggagaaggagagcaacgacctgctgctgatccgcaagaaccgcatggccctgttccagcacctgacctgcgtgatccccatcctggacagcctgctgaccgccggcatcatcaacgagcaggagcacgacgtgatcaagcagaagacccagaccagcctgcaggcccgcgagctgatcgacaccatcctggtgaagggcaacatcgccgccaccgtgttccgcaacagcctgcaggaggccgaggccgtgctgtacgagcacctgttcgtgcagcaggacatcaagtacatccccaccgaggacgtgagcgacctgcccgtggaggagcagctgcgccgcctgcaggaggagcgcacctgcaaggtgtgcatggacaaggaggtgagcatcgtgttcatcccctgcggccacctggtggtgtgcaaggactgcgcccccagcctgcgcaagtgccccatctgccgcagcaccatcaagggcaccgtgcgcaccttcctgagc

SEQ ID NO: 257568 - DNA, 1815 bp, Artificial Sequence
  derived and/or modified sequence
atgaacatcgtggagaacagcatcttcctgagcaacctgatgaagagcgccaacaccttcgagctgaagtacgacctgagctgcgagctgtacagaatgagcacctacagcaccttccccgccggcgtgcccgtgagcgagagaagcctggccagagccggcttctactacaccggcgtgaacgacaaggtgaagtgcttctgctgcggcctgatgctggacaactggaagagaggcgacagccccaccgagaagcacaagaagctgtaccccagctgcagattcgtgcagagcctgaacagcgtgaacaacctggaggccaccagccagcccaccttccccagcagcgtgaccaacagcacccacagcctgctgcccggcaccgagaacagcggctacttcagaggcagctacagcaacagccccagcaaccccgtgaacagcagagccaaccaggacttcagcgccctgatgagaagcagctaccactgcgccatgaacaacgagaacgccagactgctgaccttccagacctggcccctgaccttcctgagccccaccgacctggccaaggccggcttctactacatcggccccggcgacagagtggcctgcttcgcctgcggcggcaagctgagcaactgggagcccaaggacaacgccatgagcgagcacctgagacacttccccaagtgccccttcatcgagaaccagctgcaggacaccagcagatacaccgtgagcaacctgagcatgcagacccacgccgccagattcaagaccttcttcaactggcccagcagcgtgctggtgaaccccgagcagctggccagcgccggcttctactacgtgggcaacagcgacgacgtgaagtgcttctgctgcgacggcggcctgagatgctgggagagcggcgacgacccctgggtgcagcacgccaagtggttccccagatgcgagtacctgatcagaatcaagggccaggagttcatcagacaggtgcaggccagctacccccacctgctggagcagctgctgagcaccagcgacagccccggcgacgagaacgccgagagcagcatcatccacttcgagcccggcgaggaccacagcgaggacgccatcatgatgaacacccccgtgatcaacgccgccgtggagatgggcttcagcagaagcctggtgaagcagaccgtgcagagaaagatcctggccaccggcgagaactacagactggtgaacgacctggtgctggacctgctgaacgccgaggacgagatcagagaggaggagagagagagagccaccgaggagaaggagagcaacgacctgctgctgatcagaaagaacagaatggccctgttccagcacctgacctgcgtgatccccatcctggacagcctgctgaccgccggcatcatcaacgagcaggagcacgacgtgatcaagcagaagacccagaccagcctgcaggccagagagctgatcgacaccatcctggtgaagggcaacatcgccgccaccgtgttcagaaacagcctgcaggaggccgaggccgtgctgtacgagcacctgttcgtgcagcaggacatcaagtacatccccaccgaggacgtgagcgacctgcccgtggaggagcagctgagaagactgcaggaggagagaacctgcaaggtgtgcatggacaaggaggtgagcatcgtgttcatcccctgcggccacctggtggtgtgcaaggactgcgcccccagcctgagaaagtgccccatctgcagaagcaccatcaagggcaccgtgagaaccttcctgagctag

SEQ ID NO: 257569 - DNA, 2001 bp, Artificial Sequence
  derived and/or modified sequence
taatacgactcactatagggaaataagagagaaaagaagagtaagaagaaatataagagccaccatgaacatagtagaaaacagcatattcttatcaaatttgatgaaaagcgccaacacgtttgaactgaaatacgacttgtcatgtgaactgtaccgaatgtctacgtattccacttttcctgctggggttcctgtctcagaaaggagtcttgctcgtgctggtttctattacactggtgtgaatgacaaggtcaaatgcttctgttgtggcctgatgctggataactggaaaagaggagacagtcctactgaaaagcataaaaagttgtatcctagctgcagattcgttcagagtctaaattccgttaacaacttggaagctacctctcagcctacttttccttcttcagtaacaaattccacacactcattacttccgggtacagaaaacagtggatatttccgtggctcttattcaaactctccatcaaatcctgtaaactccagagcaaatcaagatttttctgccttgatgagaagttcctaccactgtgcaatgaataacgaaaatgccagattacttacttttcagacatggccattgacttttctgtcgccaacagatctggcaaaagcaggcttttactacataggacctggagacagagtggcttgctttgcctgtggtggaaaattgagcaattgggaaccgaaggataatgctatgtcagaacacctgagacattttcccaaatgcccatttatagaaaatcagcttcaagacacttcaagatacacagtttctaatctgagcatgcagacacatgcagcccgctttaaaacattctttaactggccctctagtgttctagttaatcctgagcagcttgcaagtgcgggtttttattatgtgggtaacagtgatgatgtcaaatgcttttgctgtgatggtggactcaggtgttgggaatctggagatgatccatgggttcaacatgccaagtggtttccaaggtgtgagtacttgataagaattaaaggacaggagttcatccgtcaagttcaagccagttaccctcatctacttgaacagctgctatccacatcagacagcccaggagatgaaaatgcagagtcatcaattatccattttgaacctggagaagaccattcagaagatgcaatcatgatgaatactcctgtgattaatgctgccgtggaaatgggctttagtagaagcctggtaaaacagacagttcagagaaaaatcctagcaactggagagaattatagactagtcaatgatcttgtgttagacttactcaatgcagaagatgaaataagggaagaggagagagaaagagcaactgaggaaaaagaatcaaatgatttattattaatccggaagaatagaatggcactttttcaacatttgacttgtgtaattccaatcctggatagtctactaactgccggaattattaatgaacaagaacatgatgttattaaacagaagacacagacgtctttacaagcaagagaactgattgatacgattttagtaaaaggaaatattgcagccactgtattcagaaactctctgcaagaagctgaagctgtgttatatgagcatttatttgtgcaacaggacataaaatatattcccacagaagatgtttcagatctaccagtggaagaacaattgcggagactacaagaagaaagaacatgtaaagtgtgtatggacaaagaagtgtccatagtgtttattccttgtggtcatctagtagtatgcaaagattgtgctccttctttaagaaagtgtcctatttgtaggagtacaatcaagggtacagttcgtacatttctttcatgataataggctggagcctcggtggccatgcttcttgccccttgggcctccccccagcccctcctccccttcctgcacccgtacccccgtggtctttgaataaagtctgagtgggcggctctaga

SEQ ID NO: 257570 - protein, 2432 aa, Artificial Sequence
  derived and/or modified sequence
MPAILVASKMKSGLPKPVHSAAPILHVPPARAGPQPCYLKLGSKVEVSKTTYPSQIPLKSQVLQGLQEPAGEGLPLRKSGSVENGFDTQIYTDWANHYLAKSGHKRLIRDLQQDVTDGVLLAQIIQVVANEKIEDINGCPKNRSQMIENIDACLNFLAAKGINIQGLSAEEIRNGNLKAILGLFFSLSRYKQQQQQPQKQHLSSPLPPAVSQVAGAPSQCQAGTPQQQVPVTPQAPCQPHQPAPHQQSKAQAEMQSRLPGPTARVSAAGSEAKTRGGSTTANNRRSQSFNNYDKSKPVTSPPPPPSSHEKEPLASSASSHPGMSDNAPASLESGSSSTPTNCSTSSAIPQPGAATKPWRSKSLSVKHSATVSMLSVKPPGPEAPRPTPEAMKPAPNNQKSMLEKLKLFNSKGGSKAGEGPGSRDTSCERLETLPSFEESEELEAASRMLTTVGPASSSPKIALKGIAQRTFSRALTNKKSSLKGNEKEKEKQQREKDKEKSKDLAKRASVTERLDLKEEPKEDPSGAAVPEMPKKSSKIASFIPKGGKLNSAKKEPMAPSHSGIPKPGMKSMPGKSPSAPAPSKEGERSRSGKLSSGLPQQKPQLDGRHSSSSSSLASSEGKGPGGTTLNHSISSQTVSGSVGTTQTTGSNTVSVQLPQPQQQYNHPNTATVAPFLYRSQTDTEGNVTAESSSTGVSVEPSHFTKTGQPALEELTGEDPEARRLRTVKNIADLRQNLEETMSSLRGTQVTHSTLETTFDTNVTTEMSGRSILSLTGRPTPLSWRLGQSSPRLQAGDAPSMGNGYPPRANASRFINTESGRYVYSAPLRRQLASRGSSVCHVDVSDKAGDEMDLEGISMDAPGYMSDGDVLSKNIRTDDITSGYMTDGGLGLYTRRLNRLPDGMAVVRETLQRNTSLGLGDADSWDDSSSVSSGISDTIDNLSTDDINTSSSISSYANTPASSRKNLDVQTDAEKHSQVERNSLWSGDDVKKSDGGSDSGIKMEPGSKWRRNPSDVSDESDKSTSGKKNPVISQTGSWRRGMTAQVGITMPRTKPSAPAGALKTPGTGKTDDAKVSEKGRLSPKASQVKRSPSDAGRSSGDESKKPLPSSSRTPTANANSFGFKKQSGSAAGLAMITASGVTVTSRSATLGKIPKSSALVSRSAGRKSSMDGAQNQDDGYLALSSRTNLQYRSLPRPSKSNSRNGAGNRSSTSSIDSNISSKSAGLPVPKLREPSKTALGSSLPGLVNQTDKEKGISSDNESVASCNSVKVNPAAQPVSSPAQTSLQPGAKYPDVASPTLRRLFGGKPTKQVPIATAENMKNSVVISNPHATMTQQGNLDSPSGSGVLSSGSSSPLYSKNVDLNQSPLASSPSSAHSAPSNSLTWGTNASSSSAVSKDGLGFQSVSSLHTSCESIDISLSSGGVPSHNSSTGLIASSKDDSLTPFVRTNSVKTTLSESPLSSPAASPKFCRSTLPRKQDSDPHLDRNTLPKKGLRYTPTSQLRTQEDAKEWLRSHSAGGLQDTAANSPFSSGSSVTSPSGTRFNFSQLASPTTVTQMSLSNPTMLRTHSLSNADGQYDPYTDSRFRNSSMSLDEKSRTMSRSGSFRDGFEEVHGSSLSLVSSTSSVYSTPEEKCQSEIRKLRRELDASQEKVSALTTQLTANAHLVAAFEQSLGNMTIRLQSLTMTAEQKDSELNELRKTIELLKKQNAAAQAAINGVINTPELNCKGNGTAQSADLRIRRQHSSDSVSSINSATSHSSVGSNIESDSKKKKRKNWVNELRSSFKQAFGKKKSPKSASSHSDIEEMTDSSLPSSPKLPHNGSTGSTPLLRNSHSNSLISECMDSEAETVMQLRNELRDKEMKLTDIRLEALSSAHQLDQLREAMNRMQSEIEKLKAENDRLKSESQGSGCSRAPSQVSISASPRQSMGLSQHSLNLTESTSLDMLLDDTGECSARKEGGRHVKIVVSFQEEMKWKEDSRPHLFLIGCIGVSGKTKWDVLDGVVRRLFKEYIIHVDPVSQLGLNSDSVLGYSIGEIKRSNTSETPELLPCGYLVGENTTISVTVKGLAENSLDSLVFESLIPKPILQRYVSLLIEHRRIILSGPSGTGKTYLANRLSEYIVLREGRELTDGVIATFNVDHKSSKELRQYLSNLADQCNSENNAVDMPLVIILDNLHHVSSLGEIFNGLLNCKYHKCPYIIGTMNQATSSTPNLQLHHNFRWVLCANHTEPVKGFLGRFLRRKLMETEISGRVRNMELVKIIDWIPKVWHHLNRFLEAHSSSDVTIGPRLFLSCPIDVDGSRVWFTDLWNYSIIPYLLEAVREGLQLYGRRAPWEDPAKWVMDTYPWAASPQQHEWPPLLQLRPEDVGFDGYSMPREGSTSKQMPPSDAEGDPLMNMLMRLQEAANYSSPQSYDSDSNSNSHHDDILDSSLESTL

SEQ ID NO: 257571 - DNA, 7299 bp, Artificial Sequence
  derived and/or modified sequence
atgccagcgatcctagtagctagcaagatgaaatctggactccctaaacccgttcattcagcggctccgatcctccacgtgccaccagcaagagctggcccccagccctgttatctaaaactgggtagcaaagtcgaggtgtccaaaactacatatccttcccaaatcccactgaaatcccaggtgttgcagggactgcaggagccagctggtgaaggtctgccacttagaaaatccggttcagtggaaaatgggttcgatactcagatctacacagattgggccaaccattacctggccaagagcgggcataaacggttgatccgagatttgcagcaggatgtgactgacggggtgttgcttgcccagatcattcaggtagttgccaatgaaaaaatcgaagatatcaatggctgtcccaagaaccggtcccagatgattgaaaatatagacgcctgcctcaacttcctcgccgcaaaaggaataaacatccagggcctcagcgccgaggagatccgaaatggtaaccttaaggcgattctgggactgtttttttccctgtcccgatacaagcaacagcaacagcaacctcaaaagcagcacctctcttctcccttgccacctgcagtgtcacaggtggccggagcaccttcccagtgtcaggctggcactccacagcagcaggtccccgttactccacaggctccctgccagcctcatcagccagccccccaccagcagtcaaaggctcaagccgaaatgcaaagcagactcccgggccccaccgcaagagtgagcgcagctggctctgaggcaaaaacccgcggcggctccaccaccgccaacaatagaaggagtcagtcatttaataattacgacaaaagtaaaccggtgaccagtcctccacctccgccttcgtcccacgaaaaagagccactagcatcgtctgcctcttctcacccggggatgtctgataatgcccccgctagtctagagtctgggtccagctcaacaccgactaattgctccacatcctccgcaattcctcagcccggagctgctaccaagccttggaggtccaagagtttatccgtgaagcactccgctacggttagcatgctgtctgttaaacccccaggacccgaagccccgcggcctacccccgaggccatgaagccagcacccaacaatcagaaatctatgctggaaaagctcaaattgttcaactcaaagggagggagcaaggccggggaggggcccggatctagggacacctcttgtgagcgcctagagacattgccatccttcgaagaaagcgaagagctggaagcagcatcaagaatgctcactactgtaggccccgcctcctcatccccaaaaattgcactgaaagggatagcacagaggaccttttctcgggcgctgaccaacaaaaaatcctctctgaaggggaacgaaaaggagaaagaaaagcaacagcgagaaaaggataaggagaagtccaaggatcttgccaagagagccagcgttaccgaaagactcgatcttaaagaggagcccaaggaagatccctctggcgccgcggttccagaaatgccgaaaaagtccagcaaaattgccagtttcatccccaagggcggaaaactgaattctgcaaaaaaggagcccatggccccttcccactccgggattcccaagcccggcatgaaaagtatgccaggtaagtcaccgagcgcacccgccccgtctaaggagggggagcggtctaggagcggtaagttgtcttccgggttgccccagcaaaagccccaacttgacggccgtcactctagtagcagtagttcacttgccagttccgaaggcaaggggccaggaggcacgacactcaatcactcaattagcagccagactgtgtctggcagtgttgggaccacacaaacaactggatctaacactgtttcagtccaactcccacaaccccagcagcagtataatcatcctaacactgctacagttgcacccttcctctaccgcagccagaccgacactgagggaaatgtcacagcagaatcctcctctaccggcgtctctgtcgaaccgtcccatttcaccaaaactggccagcctgcactggaggagttgaccggagaagacccagaagccagaagactgagaaccgttaagaatatcgccgaccttaggcaaaacttagaggagacaatgagttcactaaggggcacacaagtcacacacagcaccctggagaccaccttcgacaccaatgtaactacagaaatgtctggacgcagtattctcagcctgactggacggccaacccccctgtcatggagactgggacaatccagtccaagactgcaagcgggcgacgcccccagcatggggaatggctatcccccccgtgcaaatgcttccagatttattaatacagaatccgggagatatgtctactctgcccccttgcggcgccagctggctagcaggggctctagcgtgtgccatgtggatgttagcgataaggctggcgacgaaatggatctcgagggcatctcaatggacgcccctgggtatatgagcgacggcgacgtcctcagcaaaaacatacgtacagatgacatcacgtcaggctatatgaccgacggaggacttggtctctacacgcgcagactgaaccgcctgccagacgggatggctgtggttagagagaccttgcagagaaatacgagcctgggcctcggcgacgcggactcatgggacgactcctcctctgtctcaagcggcatcagcgataccatcgataatcttagcaccgatgacatcaacacctccagctcaatcagcagctacgcaaacacacctgccagcagccggaaaaatctggacgtacagacggacgccgagaaacatagccaggtcgagcgcaattctttgtggagcggtgatgatgtaaaaaagagcgacggtggatctgactctgggattaaaatggagccagggtctaagtggagaagaaatccgagtgacgtttcagacgagtcagataaaagcacatccggcaagaaaaatccagtcatcagtcagaccggatcttggcgacgcggaatgaccgcccaagtcgggatcactatgcctcgtaccaagccaagcgcacctgcaggagcgctgaagacgcccggcactggtaagacagatgatgctaaggtgagcgagaagggccggctgtcccccaaagcatctcaggttaagcgcagtcccagcgatgctggacgctctagcggggatgagtctaagaagccgctcccctcatcctctcgcaccccaacagccaatgctaacagtttcgggtttaagaagcagtcaggaagtgccgccggtctggcgatgatcactgccagtggtgtgacagtaacgtctcggtccgcaactctaggcaaaatacctaagtcatcagcgctggttagccggtctgcaggtcgaaaatcaagcatggacggcgcccaaaatcaagacgatgggtatctcgccttatcgagccgaaccaacttgcagtatcgctcactgccacggccgtcaaagtccaactcacggaatggagctgggaatcggtccagcacctcttccattgatagcaacatctcttcaaaatcggccggcttacccgtacctaaactgcgtgagccgtctaagactgccttgggcagtagcctccccgggctggtgaatcagacggataaggagaagggaatttcctcagacaacgagagcgtggcgtcttgcaattctgtgaaagtcaatccagctgcccagcctgtcagttcgcctgcacaaacctcgctgcaacctggcgctaaatatcccgatgtggccagccccactctgcgaagacttttcgggggcaagcctacgaagcaggtgcctatcgcgacggcagagaatatgaaaaattccgtcgtcattagcaatcctcatgccacgatgacacagcagggtaacctcgactctccatccggctcaggcgtgctctcgagcgggtcctcaagcccgctgtactcaaaaaacgtggacttgaatcaaagccccttggcttcttcgcctagttccgcacactcagctcccagtaattcactgacgtgggggaccaatgcttcaagttcttcagcagtatctaaggatggtttgggatttcagtccgtcagttcgctgcacacttcttgtgagtcgatcgacatttcactctcctcgggaggcgtgccatcccataactccagtaccggcctgattgctagttctaaggacgacagtctgacaccgtttgtacgcacaaatagtgtgaagactacattaagcgaaagcccgttaagttctcccgctgccagtccgaagttttgcagaagtacgctccctagaaagcaggattcagacccacaccttgatcggaacacactgcctaagaagggcctgcgctacacccctacctctcagctccggacacaggaagacgccaaagaatggctgcggtcacattcggccggcggcttgcaagatactgccgcgaattcacccttctcttccggcagttctgttacctcgcccagcggcacccggtttaacttcagccagttggcaagtcctacaactgttacccagatgtcactgtccaatcctaccatgttgcgaacccacagcctgtctaacgcggacggccagtacgatccttatactgacagtagatttcggaactcatctatgagtctggatgaaaagtcgaggactatgtcaagaagtggctcctttcgcgacggatttgaggaagttcacgggtctagcctttccttagtttccagtaccagctctgtttactccacaccggaggagaagtgtcagtctgaaattcggaagcttcgcagagagctcgatgccagccaagagaaggtgagtgcattaactactcaactgacagctaatgctcacctcgttgccgcctttgagcagagtctgggcaacatgaccatcagattacagtctctgacaatgaccgcagagcagaaagactctgagttaaatgagcttagaaaaaccattgagttactcaagaagcaaaacgctgctgcgcaggccgccattaacggagtcattaatactcctgaactcaattgtaaaggtaacggcactgcccaatcggccgatctccgcattaggcggcagcatagtagcgacagtgtgtcgtccatcaacagtgccacaagccattctagcgttggaagtaatattgagagcgactctaagaagaagaaacggaaaaactgggtaaacgagctaaggtcttcattcaaacaggcttttgggaagaaaaagagccccaagtctgccagttcacatagcgacatagaggagatgaccgatagcagcctgccaagtagtccaaaattgccacataatggcagtactggatcaacacctctgttgcgtaattctcattccaatagtctgattagcgaatgtatggacagcgaagcagaaacagttatgcagctcagaaatgagttgcgtgacaaggaaatgaagctcacggacatacgccttgaagccttaagtagtgcccaccagttagatcaactccgggaggctatgaacagaatgcagagcgagatcgagaaacttaaggcagagaatgaccgacttaagtccgaaagccagggctctggctgctccagagcaccttcacaggtgagtatatcagcgtccccccggcaaagtatgggactctcacagcatagtctgaatttaaccgaaagcacctcgctcgacatgcttctcgatgatacaggggagtgctcggctcggaaggagggcgggcggcacgttaaaattgttgtatcctttcaagaggaaatgaagtggaaggaagatagtcgtccgcacctttttctcattggatgcattggcgtgtccggaaagaccaaatgggatgtgctggatggagtggtccggcggttgttcaaggaatatatcattcatgtagatccagtctcccagctgggactcaattcagacagcgtgctcggatacagcatcggggaaatcaagcgtagtaataccagcgagactcctgaacttttgccctgtggttacctggttggagaaaacacaaccataagtgtcaccgtcaaggggctggctgaaaattccctcgactcacttgtgtttgaatcactgataccaaaacctattctacagaggtacgtctccttgctcattgagcatcgccggatcatattgtctggaccctctggcaccggaaaaacatacttggccaaccgcctgtccgaatacatcgtactgcgggaagggcgtgaactgactgatggggtgattgcgacttttaacgtcgatcacaagtcctctaaagagctaaggcagtatctgagtaatctggccgatcagtgtaatagcgagaataatgcagtcgatatgccacttgtgattatcttggataatttacatcacgtatccagcctgggcgagatttttaatgggctgctgaactgtaagtaccacaaatgtccttacattattggcactatgaatcaggcaacgagctctaccccgaacctccagttgcaccacaatttccggtgggtactgtgtgccaaccacacagagcccgtgaaggggtttttgggccgtttcctgagaaggaagctaatggagaccgaaataagcggacgagtgcgcaacatggaattggtcaaaatcatcgattggatcccaaaggtctggcatcatcttaataggtttcttgaggcccattcttcttctgatgtgactatcggtccaagactgtttctgtcctgtccgattgatgtcgatggctctcgggtgtggttcaccgatctatggaattacagtataataccctatttgctagaagctgtgcgtgagggcctgcagctgtacggccgaagggcgccatgggaggatcctgccaaatgggttatggacacatatccctgggctgcatccccgcagcagcatgaatggcctcctctgctgcaactgcggccggaggatgtgggtttcgacggctactctatgccaagagagggtagtacttccaaacagatgccaccctcagatgcagaaggagacccactgatgaacatgcttatgaggcttcaagaggccgccaactactccagtccacagtcatatgatagcgatagcaattctaatagccaccacgatgacatactcgattcgagcctggaaagtacgctgtag

SEQ ID NO: 257572 - DNA, 7299 bp, Artificial Sequence
  derived and/or modified sequence
atgcctgccatcctggtggccagcaagatgaagagcggcctgcccaagcctgtgcacagcgctgcccccatcctgcacgtgcccccagcccgggccggcccccagccctgctacctgaagctgggcagcaaggtggaggtgtccaagaccacctaccccagccagatccccctgaagagccaggtgctgcagggcctgcaggagcctgctggggagggcctgcccctgaggaagagcggctctgtggagaatggatttgacacccagatctacacagactgggccaaccactacctggccaagagcggccacaagaggctcatccgggacctgcagcaggatgtgacagatggagtgctgctggcccagatcatccaggtggtggccaatgagaagattgaggacatcaatggctgccccaagaacagaagccagatgattgagaacattgatgcctgcctgaacttcctggccgccaagggcatcaacatccagggcctgtctgctgaggagatcagaaatggaaacctgaaggccatcctgggcctcttcttcagcctgagccgctacaagcagcagcagcagcagccccagaagcagcacctgagcagccccctgcccccagctgtgtcccaggtggccggggcccccagccagtgccaggccggcaccccccagcagcaggtgcctgtgaccccccaggccccctgccagccccaccagcctgccccccaccagcagagcaaggcccaggccgagatgcagagccggctgcccggccccacagcccgggtgtctgctgctggcagcgaggccaagacccggggcggcagcaccacagccaacaacagaagaagccagagcttcaacaactatgacaagagcaagcctgtgaccagccccccacctccacccagcagccatgagaaggagcccctggccagcagcgccagcagccaccctggcatgtctgacaatgccccagccagcctggagagcggcagcagcagcacccccaccaactgcagcaccagcagcgccatcccccagcctggagctgccaccaagccctggaggagcaagagcctgtctgtgaagcacagcgccaccgtgtccatgctgtctgtgaagcccccaggccctgaggccccccggcccaccccagaggccatgaagccagcccccaacaaccagaagtccatgctggagaagctgaagctgttcaacagcaaaggaggcagcaaggccggggagggccctggcagccgggacaccagctgtgagcggctggagaccctgcccagctttgaggagagcgaggagctggaggccgccagcaggatgctgaccaccgtgggccctgccagcagcagccccaagatcgccctgaagggcatcgcccagaggaccttcagccgggccctgaccaacaagaagagcagcctgaagggaaatgagaaggagaaggagaagcagcagcgggagaaggacaaggagaagagcaaggacctggccaagagggcctctgtgacagagcggctggacctgaaggaggagcccaaggaggaccccagcggggctgctgtgcctgagatgcccaagaagagcagcaagatcgccagcttcatccccaagggcggcaagctgaacagcgccaagaaggagcccatggcccccagccacagcggcatccccaagccaggcatgaagtccatgcctgggaagagccccagcgccccagcccccagcaaggagggggagaggagccgcagcggcaagctgagcagcggcctgccccagcagaagccccagctggatggccgccacagcagcagcagcagcagcctggccagcagcgagggcaagggccctgggggcaccaccctgaaccacagcatcagcagccagacagtgtctggctctgtgggcaccacccagaccaccggcagcaacacagtgtctgtgcagctgccccagccccagcagcagtacaaccaccccaacacagccaccgtggcccccttcctgtaccgcagccagacagacacagagggcaatgtgacagctgagagcagcagcactggagtgtctgtggagcccagccacttcaccaagacaggccagcctgccctggaggagctgactggagaagatcctgaggcccggcggctgaggacagtgaagaacattgctgacctgcggcagaacctggaggagaccatgagcagcctgcggggcacccaggtgacccacagcaccctggagaccacctttgacaccaacgtgaccacagagatgagcggccgcagcatcctgagcctgaccggccggcccacccccctgtcctggaggctgggccagagcagcccccggctgcaggccggagatgcccccagcatgggaaatggctacccaccccgggccaatgccagccgcttcatcaacacagagagcggccgctacgtgtacagcgcccccctgcggcggcagctggccagccggggcagctctgtgtgccacgtggatgtgtctgacaaggctggagatgagatggacctggagggcatctccatggatgcccctggctacatgtctgatggagatgtgctgagcaagaacatcagaacagatgacatcaccagcggctacatgacagatggcggcctgggcctgtacacccggcggctgaaccggctgcctgatggcatggctgtggtgcgggagaccctgcagaggaacaccagcctgggcctgggagatgctgacagctgggatgacagcagctctgtgagcagcggcatcagtgacaccatcgacaacctgagcacagatgacatcaacaccagcagcagcatcagcagctatgccaacaccccagccagcagcaggaagaacctggatgtgcagacagatgctgagaagcacagccaggtggagaggaacagcctgtggagcggagatgatgtgaagaagagtgatggcggcagtgacagcggcatcaagatggagcccggcagcaagtggaggaggaaccccagtgatgtgtctgatgaaagtgacaagagcaccagcggcaagaagaaccctgtgatcagccagacaggctcctggaggcggggcatgacagcccaggtgggcatcaccatgcccaggaccaagcccagcgccccagctggggccctgaagaccccaggcaccgggaagacagatgatgccaaggtgtctgagaagggccgcctgagccccaaggccagccaggtgaagaggagccccagtgatgctggccgcagcagtggagatgagagcaagaagcccctgcccagcagcagcaggacccccacagccaatgccaacagctttggcttcaagaagcagagcggcagcgctgctggcctggccatgatcacagccagcggcgtgacagtgaccagccgcagcgccaccctgggcaagatccccaagagcagcgccctggtgagccgctctgctggcaggaagagctccatggatggagcccagaaccaggatgatggctacctggccctgagcagcaggaccaacctgcagtaccgcagcctgccccggcccagcaagagcaacagcagaaatggagctggcaacagaagcagcaccagcagcattgacagcaacatcagcagcaagtctgctggcctgcctgtgcccaagctgcgggagcccagcaagacagccctgggcagcagcctgcccggcctggtgaaccagacagacaaggagaagggcatcagcagtgacaatgaatctgtggccagctgcaacagcgtgaaggtgaacccagctgcccagcctgtgagcagccctgcccagaccagcctgcagcccggggccaagtacccagatgtggccagccccaccctgcggcggctgtttggaggcaagcccaccaagcaggtgcccatcgccacagctgagaacatgaagaacagcgtggtgatcagcaacccccacgccaccatgacccagcagggcaacctggacagccccagcggcagcggcgtgctgagcagcggcagcagcagccccctgtacagcaagaatgtggacctgaaccagagccccctggccagcagccccagcagcgcccacagcgcccccagcaacagcctgacctggggcaccaatgccagcagcagcagcgctgtgtccaaggatggcctgggcttccagagcgtgagcagcctgcacaccagctgtgagagcattgacatcagcctgagcagcggcggcgtgcccagccacaacagcagcacaggcctgattgccagcagcaaggatgacagcctgaccccatttgtgaggaccaacagcgtgaagaccaccctgtctgagagccccctgagcagccctgctgccagccccaagttctgccgcagcaccctgcccaggaagcaggacagcgacccccacctggacaggaacaccctgcccaagaagggcctgcgctacacccccaccagccagctgcggacccaggaggatgccaaggagtggctgcggagccacagcgctgggggcctgcaggacacagctgccaacagccccttcagcagcggcagctctgtgaccagccccagcggcacccgcttcaacttcagccagctggccagccccaccaccgtgacccagatgagcctgagcaaccccaccatgctgcggacccacagcctgagcaatgctgatggccagtatgacccctacacagacagccgcttcaggaacagctccatgagcctggatgagaagagcaggaccatgagccgcagcggcagcttcagagatggctttgaggaggtgcacggcagcagcctgagcctggtgagcagcaccagctctgtgtacagcaccccagaggagaagtgccagagcgagatcaggaagctgcggcgggagctggatgccagccaggagaaggtgtctgccctgaccacccagctgacagccaatgcccacctggtggccgcctttgagcagagcctgggcaacatgaccatccggctgcagagcctgaccatgacagctgagcagaaggacagcgagctgaatgagctgaggaagaccatcgagctgctgaagaagcagaatgctgctgcccaggccgccatcaatggagtcatcaacaccccagagctgaactgcaagggaaatggaacagcccagagcgctgacctgcgcatccggcggcagcacagcagtgacagcgtgagcagcatcaacagcgccaccagccacagctctgtgggcagcaacattgaaagtgacagcaagaagaagaagaggaagaactgggtgaatgagctgcggagcagcttcaagcaggccttcggcaagaagaagagccccaagagcgccagcagccacagcgacatcgaggagatgacagacagcagcctgcccagcagccccaagctgccccacaacggcagcacaggcagcacccccctgctgaggaacagccacagcaacagcctcatcagcgagtgcatggattctgaggccgagaccgtgatgcagctgagaaatgagctgcgggacaaggagatgaagctgacagacatccggctggaggccctgagcagcgcccaccagctggaccagctgcgggaggccatgaacaggatgcagagcgagattgagaagctgaaggccgagaatgaccggctgaagtctgagagccagggcagcggctgcagccgggcccccagccaggtgtccatcagcgccagcccccggcagagcatgggcctgagccagcacagcctgaacctgacagagagcaccagcctggacatgctgctggatgacaccggggagtgcagcgccaggaaggagggcggccgccacgtgaagatcgtggtgtccttccaggaggagatgaagtggaaggaggacagccggccccacctgttcctgattggctgcattggagtgtctgggaagaccaagtgggatgtgctggatggagtggtgagaagactcttcaaggagtacatcatccacgtggaccctgtgtcccagctgggcctgaacagcgacagcgtgctgggctacagcattggagagatcaagaggagcaacaccagcgagaccccagagctgctgccctgtggctacctggtgggggagaacaccaccatctctgtgacagtgaagggcctggccgagaacagcctggacagcctggtgtttgagagcctcatccccaagcccatcctgcagagatatgtgtccctgctgattgagcaccggcgcatcatcctgagcggccccagcggcaccgggaagacctacctggccaaccggctgtctgagtacatcgtgctgcgggagggccgggagctgacagatggagtgattgccaccttcaacgtggaccacaagagcagcaaggagctgcggcagtacctgagcaacctggccgaccagtgcaacagcgagaacaatgctgtggacatgcccctggtgatcatcctggacaacctgcaccacgtgagcagcctgggggagatcttcaacggcctgctgaactgcaagtaccacaagtgcccctacatcatcggcaccatgaaccaggccaccagcagcacccccaacctgcagctgcaccacaacttccgctgggtgctgtgtgccaaccacacagagcctgtgaagggcttcctgggccgcttcctgcggaggaagctgatggagacagagatcagcggccgggtgaggaacatggagctggtgaagatcatcgactggatccccaaggtgtggcaccacctgaaccgcttcctggaggcccacagcagcagtgatgtgaccatcggccccaggctcttcctgagctgccccattgatgtggatggcagccgggtgtggttcacagacctgtggaactacagcatcatcccctacctgctggaggccgtgcgggagggcctgcagctgtatggaagaagagccccctgggaggaccctgccaagtgggtgatggacacctacccctgggccgccagcccccagcagcacgagtggccacccctgctgcagctgcggccagaagatgtgggctttgatggctacagcatgccccgggagggcagcaccagcaagcagatgccacccagtgatgctgagggggaccccctgatgaacatgctgatgaggctgcaggaggccgccaactacagcagcccccagagctatgacagcgacagcaacagcaacagccaccatgatgacatcctggacagcagcctggagagcaccctgtag

SEQ ID NO: 257573 - DNA, 7299 bp, Artificial Sequence
  derived and/or modified sequence
atgcccgccatcctggtggccagcaagatgaagagcggcctgcccaaacctgttcactccgctgcccccatcttacatgtgccccctgcacgggccggtccccagccttgctatttgaagctcggaagtaaagtagaagtgtctaagaccacatacccatcccagatccctctcaagagccaagtgcttcagggtctgcaggagcccgcaggtgaggggcttccactacggaaaagtgggagtgtcgaaaacggtttcgacacccaaatatacaccgactgggccaatcactaccttgccaaaagtgggcacaagagactgatccgtgacctccagcaagatgtgacggatggagtcctgctcgcccaaattattcaggtcgtggccaatgaaaaaattgaggacatcaatgggtgcccaaagaacagaagccaaatgatcgaaaacatagatgcttgcctgaactttctcgccgccaaggggattaatatccagggcttgagtgcagaggagataaggaatgggaatctcaaagctattctgggactctttttctcactgagtcgatacaaacagcaacagcagcagccccaaaaacagcatctctccagcccactgcctccagccgtttctcaggtggctggggctccaagtcaatgtcaagctgggacgccacaacagcaggtcccggttacgcctcaggctccctgccaacctcaccaacctgcgcctcaccaacagtctaaagcgcaggccgagatgcagagccggctgcctggcccaaccgctagagtgagtgctgcagggagtgaggccaaaacccgggggggctctactaccgccaacaataggcgaagtcagtccttcaataactatgataagtccaagccagtgacaagtccccctccccccccttctagtcacgaaaaagagccactcgcgtccagcgcatcctcccaccctgggatgtccgacaatgccccggcctccttggaaagcggttcctctagcacccccacgaattgttccactagttcggctataccgcaacccggtgctgcaacaaaaccttggaggagtaaatccctctctgtgaagcactcagcaacagtctcaatgctatcagtgaagccccccggccctgaagctccacgccccaccccagaggccatgaaaccggccccaaacaaccagaagagtatgcttgagaagctgaaattattcaatagcaaggggggatcaaaggccggcgaaggtccaggcagcagagacactagttgtgagaggctggaaacgctcccctcttttgaagagagcgaggaactggaggctgcttcacgaatgctgacaaccgtcggacccgctagctccagccccaagatagccctaaaaggcattgcccagcgaacgttctctagagccctgaccaacaagaagtcaagcctcaaggggaatgagaaggaaaaagagaagcagcagcgggaaaaggataaggaaaagtccaaggatctcgcaaaaagagcctccgtgacagagaggctcgacttgaaagaggaacctaaggaggaccctagcggggccgccgtgccagaaatgcccaagaaaagtagcaaaatcgcatctttcattccaaaaggcggcaagttaaactccgctaagaaggaacctatggcccctagccacagtggaatccctaagcctggaatgaaatcaatgcctgggaaaagcccctccgcccctgcacctagcaaggagggggagagatcccgctctggcaaactttcatccggtctgcctcaacagaagccccagcttgatgggcggcacagtagttcatcatcatcactggcttccagcgaagggaagggacctggtggcactaccctgaatcactctatcagcagccagacagtgagcggctcggtgggcacaacccaaactaccggctccaacactgtctctgttcagttgcctcagccccagcagcaatacaaccaccctaatacagcaacagtggccccctttctgtatcggtcccagactgacaccgagggcaatgtgactgctgagagcagctctaccggcgtctctgtcgagcctagccattttacaaaaaccggacagccggcacttgaggaactcaccggagaggatccggaagctcgtaggctgaggaccgttaagaacatcgccgatctgaggcagaacttggaggagaccatgtctagcttgcggggaacacaggtaacgcactccacactggaaaccacctttgacaccaacgtaacaacggaaatgagtggcaggagtattctctcactgaccggtcggcctacacccttgtcttggcgcctgggtcagagcagtccgcgtttgcaagccggagacgcgccttccatgggtaatggttacccaccacgcgccaacgcgtcgcggttcataaataccgaatccgggcgttacgtctattctgcacctctccggagacagctggcgagcagagggtcatcagtgtgtcatgtcgatgtgagtgacaaggctggggatgagatggatctcgaggggatcagcatggatgccccaggttacatgtcagatggcgatgtcctgagcaaaaacatccggacagatgatatcacaagtggctatatgacagacgggggcttggggttatacacacggcggctgaataggctaccagatggcatggccgtagtacgtgaaactttgcagaggaacacatccctcggtttaggcgacgcagacagttgggacgatagttcgtccgtctcaagcgggatttccgacaccatcgacaacctgtccacagatgatattaacacgtctagttcaatttcatcctacgccaatactcccgcctctagccgtaagaacctcgatgtgcagaccgatgcagagaagcatagccaggttgaacggaattccttatggtctggcgatgacgtcaagaagtcggatggaggtagcgattcaggcatcaagatggaacctggctctaagtggcgccgcaacccatccgatgtgtcggacgaaagtgacaagtctacctccggaaaaaaaaacccagttatttctcagacggggagttggcggcggggcatgactgctcaggtgggaattaccatgcccagaacgaagccctcagcccctgctggtgctctgaaaacaccaggcacaggaaagactgatgacgccaaggtgtctgaaaaaggtcggctgtctcctaaagcttctcaggtgaaaaggagcccgtcagacgcaggacgttcgtccggagacgagagcaagaagccactgccttcttcttcaagaaccccaactgccaatgccaactcctttgggttcaagaaacagtccggtagtgccgccggcctggccatgatcaccgccagtggcgttactgtgacttctcggtccgctaccctggggaaaattcccaagagcagcgctctggtgagtaggagcgcaggaagaaaaagcagcatggacggggcacagaaccaagacgacggatatctggccctgagtagcaggaccaacctacagtacaggagtctgccccgtccctcaaagagcaacagccgcaatggagcagggaacaggtctagcacttccagcattgactcaaacatatccagtaaaagtgccggactccccgtccctaagctgcgcgaacccagcaagaccgccctgggatcttccctgcccggcctcgtgaaccagacagacaaagaaaaaggaatttcgtctgataacgaaagtgtggctagttgtaacagcgtgaaggtgaaccccgccgcccagcctgtttctagccccgcacaaacgagcctccagcccggagcgaaataccccgatgttgcctcccctacgctgcgacgcctatttggcggcaaacccaccaaacaagtccccatagccacagcagagaacatgaaaaattcagttgtcattagtaatccccatgccaccatgacccaacagggcaatctcgactctcccagtggcagtggtgttttgagttctggatctagcagcccactgtacagtaaaaacgtggatctgaaccagtccccacttgcaagctcaccatcgtccgcacactcagccccctctaacagcctgacatggggaacaaacgcaagttcgtcaagtgccgttagcaaagatggactgggcttccagtctgtgtcttctctacatacttcttgcgaatccatcgatatttctctttccagtggtggcgtccccagtcataacagtagcaccggcctcattgccagttctaaagacgactctctgaccccattcgtccggactaactcagtaaagacaaccctgagcgagtctcctctcagttcacctgctgcttctcctaagttctgccgttctaccctgccacgaaaacaggatagtgatccacaccttgatcgcaacaccctgccaaagaaagggttgaggtacacgccaacatctcagctgcgcacccaggaagacgccaaggaatggctgagaagccattccgcggggggcctacaagatactgccgctaattctccatttagcagtggctcgagtgtgaccagcccatcgggaacccggtttaacttctctcagctcgccagcccgactactgttacacagatgagtctctcaaaccccaccatgctgcggacacattcactgtcaaatgctgatggtcagtacgatccatataccgatagtcggttccggaacagtagtatgtccctagatgagaagagcagaactatgtcccgatccgggtcattcagggatgggtttgaggaagtgcacggatcgtctctgtccctcgtcagttctaccagctcggtgtactccacgcctgaggagaaatgtcaatctgaaattcggaaactcaggcgcgagctggacgcctcccaggagaaggtctctgctctgaccacccagttgaccgctaacgcccacctggtggcagctttcgagcagtccctggggaacatgacaattcggctgcagtctcttacaatgacagccgagcagaaagactcagagctcaacgagttacgaaaaactattgagctcttgaagaaacagaatgctgctgcgcaggctgccatcaacggcgtgataaatacccctgagctcaattgtaagggtaacggtaccgcccagtcagcagatctccggatccgcagacagcactcctcagacagcgtgtcaagcatcaattcagcaacgtcccattccagtgtcgggagcaatattgagtcggattctaagaagaaaaagcgaaagaactgggtcaatgagctacggagctctttcaaacaagccttcggcaaaaaaaaaagcccaaagtccgcttccagtcatagtgatatcgaagagatgactgatagcagcttgccgtcgtcgcccaagctgccccacaatgggtccaccggatctactccacttctccggaattcacacagcaattcccttattagtgaatgcatggactcggaggcagagaccgtgatgcagctgagaaatgagctgagagataaggagatgaaactaactgacattcggctggaagcgctctcttcagcacaccagctggatcagttgcgcgaggccatgaaccgtatgcagtctgaaatagaaaaattgaaggccgagaatgaccgccttaagtctgagtcgcagggcagtgggtgcagcagagcaccttctcaggtgagtattagtgctagtccacggcagtcgatggggctcagtcagcattcgctgaacttgacggaaagtacctcattggacatgttattagacgatactggggagtgctcagctaggaaggagggcggcagacatgtgaagatcgttgtttcattccaggaggagatgaagtggaaggaggacagtcgccctcacctgtttctgattggctgcataggtgtgtcagggaagaccaaatgggacgtgttggatggtgtggttcgccgactttttaaggaatacatcatccatgtggatcccgttagccagctgggattaaattctgacagtgtgctcggttatagtataggcgagattaaacgctccaatacaagtgagactccggagctgctgccttgcgggtatctggttggcgagaataccactatctccgtcactgtgaaggggctcgccgagaatagtctggacagcctggtttttgaatcgctgataccaaagcctatcctccaaaggtacgtgagcctgctaatcgaacacaggcggattatcctctctggcccctcaggaactggaaagacttacttagctaaccgactttcggagtacatcgtactccgagagggccgcgaactaacggatggagttatcgcaacctttaacgttgatcacaagtcctccaaagagctcaggcagtacctctccaacctggccgatcaatgtaacagtgagaacaatgccgtcgacatgcccctggtcatcatcctcgacaatctgcatcacgtgtcttctctcggggaaatttttaacggattgcttaactgcaaatatcataagtgcccatatatcataggtactatgaatcaggccacatcaagcacccccaacctgcagctccaccataatttccgatgggtcctatgcgccaatcacacagagcctgtgaaaggttttctgggtcggttcctccgaaggaaactcatggaaactgaaatttctggacgcgtgcgtaacatggaactagtgaagattatcgactggatccccaaggtctggcatcaccttaaccgctttcttgaggctcattcttcttccgacgttacaatcgggccccgcttatttctcagttgccctattgacgtagatggttcacgcgtctggttcactgacttatggaattatagcatcatcccttacctgctcgaggctgttcgggaaggcctccagttgtatggacgtagggctccctgggaggatcctgccaaatgggtgatggacacttacccttgggccgctagcccccagcagcacgagtggccaccgcttctccaactacggcccgaggacgtgggcttcgatggatatagcatgccacgcgaaggatcaacaagtaaacaaatgcccccgtctgatgcagaaggagatccattgatgaatatgctcatgcgattacaggaggccgcgaactactcatcccctcagtcatacgactctgatagtaatagcaatagccaccacgacgatatcctcgattctagtttagaatccacactgtag

SEQ ID NO: 257574 - DNA, 11000 bp, Artificial Sequence
  derived and/or modified sequence
gttaatatgggcgtccaagcctctgtttcccaggaggaaatttgcaagaggcggcagcccctgagcgcccagagctcttgaaaggccacccaggagaggtgtgagacccggcggcagcatccgtccaggtgggacccgctgagcgccgtggccagtcccccattcccatcccggcaccccaaaggcgcgctcgcccgattgcttcgagttccccgacctggggattttttttttagccgctggtggtgggcgcctcgtgggctaaggcccggcgcctgctctgctacccgcgctgcctttagcggtcgcccccgccgccgctgccagggacgtgctgggaaagcccaagccccgggagaagatgccggccatcctggtcgcctccaaaatgaagtcgggactgcccaaacccgtgcacagcgccgcgcccatcctgcacgtgcccccggcccgggcgggcccccagccctgctacctgaagttgggaagcaaggtggaggtgagcaagaccacctatcctagccagatccccctgaaatcgcaggtgctgcaggggctgcaggagccagcgggggaggggctcccgctgcggaagagcggctcggtggaaaacgggttcgatacccagatctacacagactgggccaatcattacctagccaaatccggccacaagcgtctcatcagggatctccagcaagatgtgacagatggcgtcctcctggcccagattatccaggttgtggcaaatgaaaagattgaagacatcaatggctgtccgaagaacagatcccaaatgattgaaaacatagatgcctgcttgaatttcctggcagctaagggaataaacatccaggggctgtctgcagaagagatcaggaatggaaacctcaaggccattctaggcctcttcttcagcctctcccgatacaagcagcagcagcagcagccccagaagcagcacctctcctcacctctgccgcccgccgtatcccaggtggccggggccccctcccagtgccaggctggcacccctcagcagcaggtgccagtcactccccaagccccgtgccagcctcaccagccagcgccacatcagcagtcaaaagcacaagctgaaatgcagtccagacttccaggtcctaccgcgagggtatccgctgcaggcagcgaggccaaaacacgcggagggtcaactactgctaacaaccgacgcagccagagctttaacaactatgataaatccaaaccagtcacctccccacccccaccgccaagcagccacgagaaagagcctttggcaagttcagcctcctcccaccccggaatgagtgacaatgcacctgcttccttggagagcggcagcagctccacccctactaattgcagtacctcctcggccatcccgcagcccggtgcagccaccaagccttggcgcagcaaatccctcagcgtgaagcacagtgccacggtatccatgctctcggtcaagcctcctgggcctgaggcccccaggcccacacctgaagccatgaagccggcccccaacaatcagaagtccatgctggaaaagctgaaacttttcaacagtaaagggggctcaaaggcaggtgaggggccggggtcccgggacacaagctgtgagcggctggagactctgcccagcttcgaagagagcgaggagctggaggccgccagtcgcatgctcaccaccgtgggccctgcttccagcagccccaagattgcactcaagggcattgcccagaggacttttagccgggcactgaccaacaagaagagttctctgaaaggcaatgagaaagagaaggagaaacaacagcgggagaaggataaggagaaaagcaaggaccttgccaagagagcctctgtgacggagaggctggacctcaaggaggagccaaaagaagaccccagtggagcagctgtgcccgagatgccaaaaaagtcctccaagattgccagcttcatccccaaaggggggaagctcaacagtgccaagaaggagcccatggccccttcccacagtggaataccaaaaccaggaatgaaaagcatgcccgggaaatccccaagtgccccagcgccttccaaggaaggggagcggagccggagtgggaagctgagctcaggactcccccagcagaagccccagctggacggcagacactccagttcctcttccagcctggcgtcctcagaaggaaaaggcccaggagggaccaccctgaaccacagcatcagcagccagactgtcagtgggtctgtcgggaccacccagaccacaggaagcaataccgtcagtgttcagctacctcagccccagcagcaatacaaccatcccaacactgccacggttgcacctttcctgtacaggtctcagacggacactgaagggaatgttactgccgagtcaagctcaacaggtgtgagcgtggagcccagccacttcaccaagactggacagcctgctctggaagaactcactggggaagatcctgaggctcggcggctgcggacagtgaagaacatcgctgatctgcggcagaatttggaggaaaccatgtccagtttaaggggaactcaggttacacacagcacattggaaaccacgtttgacaccaatgtcaccacggagatgagtggccgtagcatactcagcttgacagggaggcccacacctctgtcctggagactgggccagtccagccctcggctccaagcaggagacgccccctcaatgggcaatgggtatccccctcgagccaacgccagcaggttcatcaacactgagtcaggtcgctatgtgtactccgcccctctgagaaggcagctggcctcccggggcagtagtgtctgccatgtggacgtctcagacaaggcaggagatgagatggacctggaaggcatcagcatggatgcccccggctacatgagcgacggggatgttctgagcaagaacatccggaccgatgacattacaagcggatacatgactgatggtggacttggcctctatacccgtcgcctgaaccggctccctgatgggatggctgtggtacgggagaccctgcaacgaaatacctccctgggcctcggagacgctgacagctgggacgacagcagctccgtcagcagcggcatcagcgacaccatagacaacctcagcactgatgacatcaacaccagctcctccatcagctcttatgccaacacacctgcctcctctcgaaaaaacctggatgtgcagactgatgctgagaagcactcacaggtggagaggaattccctgtggtctggtgatgatgtcaagaaatcagacggaggctcagacagcggcataaaaatggagccaggttccaagtggaggcggaatccttctgatgtgtctgacgagtccgacaaaagcacgtcgggcaagaagaatcctgtcatctcccagacaggctcatggcggcgaggcatgacagctcaggtgggcatcaccatgccaaggacgaagccttcagccccggcaggcgcactgaagaccccaggaactggaaaaacagacgacgcaaaggtgtctgagaaaggaaggctttctcctaaagcctcccaggtgaagcgctccccatcagatgcaggccggagcagtggtgacgaatccaaaaagcccctccccagcagctctaggacacctactgccaatgccaacagctttgggttcaagaagcagagtggttccgccgccggcctggccatgatcacagccagcggggtgactgtcaccagcaggtcagccacactgggcaaaatcccaaagtcatctgcactcgtcagtcggtctgctggtcggaagtcaagtatggatggggctcagaatcaggatgacgggtatctagccctaagctcccggacaaaccttcagtaccggagtttgccgaggcccagtaagtccaacagccggaacggggctgggaacaggtctagcaccagcagcatagattccaacattagcagcaagtccgcaggcctgccagtgcccaaactgagggagccttccaaaacagccctaggcagctctctaccaggtctggtcaaccaaacagacaaggagaaaggcatctcatcagacaacgagagtgtggcttcctgtaactcggtgaaagtgaatccggcagcccagcctgtgtccagtccggctcagaccagtctccagcctggagccaagtacccagatgtggcctctcccacactccgcagactctttggtgggaagcctaccaagcaagtgcccatcgccacagctgaaaacatgaaaaattcggtggtcatctccaatcctcatgccaccatgactcagcaaggtaacctagactccccgtcaggcagtggcgtcctgagcagtgggagcagcagtcctctctacagcaagaatgtggacctcaaccagtctccgctagcctccagccccagctcagcccactcggccccttccaacagcctcacctggggcaccaacgccagcagctcctccgcagttagcaaggatggcctgggctttcagtctgtcagcagcctccacaccagctgtgagtccatcgacatctccctcagcagtggaggggtccccagccacaattcttccactggcctcatcgcctcctccaaggacgactccttgactccctttgtcagaactaacagtgtgaagaccacactgtcagaaagccctctctcttcccctgctgctagccctaagttctgcagaagtactctgcccaggaaacaggacagtgacccgcaccttgataggaacactttgcctaagaaaggactcaggtatactcccacctcccagcttcgcacgcaagaagatgcaaaagaatggttacggtcccattctgcaggaggccttcaggacaccgctgccaattcccccttttcctctggctccagcgtgacttctccctccggaacaagattcaacttttcccagcttgcgagtcccaccactgtcacccagatgagcttgtccaacccgaccatgctgaggactcacagcctctccaatgctgatgggcagtatgatccatacactgacagccgcttccggaatagctccatgtccctggatgagaagagcagaaccatgagccgttcaggctcattccgggatgggtttgaagaagttcatggatcctcactctccttggtttccagcacatcgtcagtttattctacaccagaagaaaaatgccagtcagagattcgcaagctgcggcgggaactggatgcctcccaggagaaagtttcagctttgaccacccagctgacagcaaatgctcaccttgtggcagcctttgaacagagtcttggtaacatgacaatcaggctccagagtctgaccatgacagctgagcagaaggactcagaactgaatgagttaagaaaaaccattgagctgctaaagaaacagaacgcagctgcccaggctgccattaatggagtaattaacacacctgagctcaactgcaaaggaaacggcactgcccagtctgcagacctccgcatccgcaggcagcactcctcagacagcgtctccagcatcaacagtgccaccagccactccagcgtgggcagcaacatagagagtgactcaaagaagaagaagcggaagaactgggtcaatgagttacgcagctccttcaagcaagctttcgggaagaagaagtccccaaaatctgcgtcctctcattcagatattgaggagatgacggattcttctttgccttcctcaccaaagttaccgcacaatgggtccacaggttccaccccactgctgaggaattctcactccaactctctaatttcagaatgcatggatagtgaagctgagaccgtcatgcagctccgaaatgagttaagagacaaggagatgaagctgacggatatccgcttagaagctctcagttctgcccaccagctggaccagctccgggaggccatgaacaggatgcagagtgaaatagagaagctgaaagctgagaatgatcggctgaagtcagagtctcaaggcagtggctgcagccgggctccttcccaagtgtccatctctgcctccccgaggcagtccatgggcctctcccagcacagcttgaacctcactgagtcaaccagcctggacatgttgctggatgacactggtgaatgctcggctcggaaggaaggaggcaggcatgttaagatagttgtcagctttcaggaggaaatgaagtggaaggaggattccagaccacatctctttcttattggctgcattggagttagtggcaagacgaagtgggatgtgctcgatggggtggttagacggctgttcaaagaatacatcattcatgtcgacccagtgagtcagctagggctgaattcagacagcgttcttggctacagcattggagaaatcaagcgcagcaacacttccgaaacaccggagctgcttccttgtggctatctggttggagagaacacgaccatctcagtgactgtgaaagggctcgcagaaaacagcctggactcactggtgtttgagtccttgattcccaagcccatcctgcagcgctacgtctccctcctgatagagcaccgtcggatcattctctctggccccagcggcactgggaaaacctacctggccaaccggctgtctgagtatatagtgcttcgagagggacgggagttgacagacggggttatcgccacctttaacgtggaccataagtccagcaaggaattgcgccagtacctgtccaaccttgctgaccagtgcaacagtgagaacaatgctgtggacatgcccctcgtcatcatcctggacaacctacaccacgtgagctctctgggagagatcttcaatgggctgctcaactgcaagtaccacaaatgcccttacataattggcacaatgaaccaggctacctcttcgactcccaacctgcagcttcaccataacttcagatgggtgctttgtgccaaccacacggagcctgtgaagggtttccttggccgattcctgaggaggaagctcatggaaacagagatcagtgggcgggtgcgcaatatggagctggtaaaaatcattgactggattcccaaggtctggcatcacctcaaccgcttcctggaggctcacagttcctcggacgtcaccatcggcccccggctcttcctgtcatgccccatcgatgtggacggctcgagagtgtggttcaccgacttgtggaactattccattatcccctatctcctggaagccgtcagagaaggactccagctctatggaaggcgcgccccctgggaggatcctgccaagtgggtgatggacacatatccatgggcagccagcccacaacagcacgagtggcctcccctgctgcagttacggcctgaggatgtcggcttcgacggctactccatgcctcgggagggatcgacaagcaagcagatgccccccagtgatgctgaaggtgacccgctgatgaacatgctgatgaggctgcaggaggcagccaactactccagcccccagagctatgacagcgactccaacagcaacagccatcacgatgacatcttggactcctctttggagtccactctgtgacaggggcccggagcccagcgccctcctcttctcctcaccgcattccacctgcatcccccacatcaccctgaagatgacttcctgagccagcccccagccacagccttagagctgcgggaacaccgagaccccccgtccttcagcctcgacctgggtgcaggcatcccgggccagctgcctgcggaccgcttccttccacagcgagaactgcactaccttctgttgtactttaattattgttttgccttgttgctgtgacctccctaagacactgaagatacttctcgggaaaggatcatcgccgttgaaatgaaaagagagacagagagaaaaaaaaaaagagaacccacatgaagctctgaaaccaaacagcatcctgccatgagcttcccagagacagaagagactggagcaaagtcggaaacacagagaagcacggcttcccctcagcacagaccctccagactgggtctcagagccgtgccacccaccctcccacacagccggccacagggagaactggtgctaaccagggtgcttgctttggtcacgttcaacgcactacagagctacgacacagggaaaccttaggagcaaataaaccgtgctttcatgttttttaaatggtgctttccttacccgagaggtattttgcctgttccaatcaaaccaccccattcaggtccatcagcctctgattaatatccgtgagagtgagtgacggagtgagagtgtgagcgagtggatgtggctgtcagtgcagaacagcatgtgtctctttccttctgatatatgaatgaatcaggtttttttttttttttttctgcaaacactgtgtatagtgagacttgttctactttggagaacaggttaccttttgaaaatgaggttgagtttcttcctttctgatgcattgatttttgaagatttttttttcccccttcccctcttggtcagaatcaatcctttggtgaaagtaagaaccgcaggagttgagttttggtttggtcctgctcagttttggtttttagttgtccatcctcacagtcctacacactcgcctcctcctgctagggctgggggtatctgtgtcctttaaaatggatgaggacctggtcctcgacatgtgggtgagccatggaccttgccttcccttctcgtccttgagggtttagaacacacaccaacacctccagcgtccccgccccagcttccggtggggtgatgcggtcaccctgcaaaagacttgcactttcctcagaaccaacatgacgcagctcaataagggtgagggtcactccctcccagaagccccgtctggacgagccttgcctgacctcttcggtgctgaccttcccaaagtgatgccttactggttttgtactaactgtgttcattttacataagtgtcgtgcctgcctggggtttgttttttttgtcattgttttccccattgaaacaaacagggctaaaaagtcatctgttcattaggagaactcaagttgctgtgacttttctcatccaaaagactcatttgtgtggatgcgtgaccatgggaaaaagaaaaaaaaaaagatccattttttaggttcttttcggtctccagctgacaacccaactggacaatgatctgtctggtgcaggagaaggcaaaagtttctacaagtctacatgaccttgctgatacttgttctaatagaaacccagtctgctgtgtcttcaacatactggtattttcattacaaagtatggtaaatttttgagttgtttgtttctgttttgtaaagagaatccttattggacaccagtgaaggtgtctctgttttaatgatcagggtttttattccatcttttgcatttcttctatttctgaaggtttgtctcttggcatctttttttagtttcttaccataagagtttgacccgaaactgctcacttcacattggatgacaccatgttcttcctctttgaaaagaaaaggggaatgtgtcccactagtgaaaggaaaacttttcaacactatccctgctttagtctcagcaaactcagactattctgcttagccttcattagtcatctgggtgtgagtgtgtcttgttctgtttttctttttaataaaacttttaaaccatatatttagcctgtgaccaggggggccaaaccctaagatttctggtaaacctgaagggtggccctcctcagacaatttatctcccagcaatgaccctactacactcgcgtactgtgaatttgggaggaggtaaagttgacttctcctcgtgggcagttttccaatcaccttgtgagtagacacctgccaatattgtttgaaacctttttttaatatgacatcctctcttgtcattctcttctcccctttcccacagacttccctcctgggtccaggttcagaaccaagacttctgtacctagtgctgcctgattggtgaacattgacttcaagtagcatagcccttgtgtgactcacaactccgtgtccttcctaaagtttcgggaagcagggttgtctaatatgcacatttcttattttggtcatatttttactttagtgtcactcaccttttacaaagtgactttgtactcatttagggctctatcggaaatgcttccattttgccttttctacagttaggccaattttgaaatatataaattctatgcaacatttatgttgagttaccaatggaagccaaaagttctcttcccaaactgccaagaatgatacaggccataattgaaatgggaataccttttaagtttcattaggggtggggtgggagtgggacaggaacaagacttgcctagatctttgttgtatcttggggacttttactttgttgtttgatgcttaaacttcaaaattctctgtattcaaatttgattgtggcgaatctacttcaaaaaggaaaaataatccaactttgtggatattaaatggaaggtttgctgttttgatctagttgtttccagtggagcagttttatgaaatatgttctataagatgtacattttttcattgtaacatagaaattgtaaataattgattaaagtgctgcattttgatgaattttttctagccatttttaaagagaaaactaggaattgagtattttgtgtacggtatgtttccatcctccctccccttcctcctcccctcctctctctctcttcctacctatttaattttcatttgtcatgaggtttttggatttgccaatgatctgctggacatcatgccccatgtcatagagaataaagctgatgattgtaccagtcttaaattattcatgattcaataaaattgatgcttatttattc

SEQ ID NO: 257575 - DNA, 7298 bp, Artificial Sequence
  derived and/or modified sequence
atgcctgcaattctggttgcgtccaagatgaagtcaggactccccaaaccagtgcattctgctgccccaattttacacgtgccccctgcaagagctggtccccagccctgttatctgaagctcggaagcaaggttgaagtgagcaagacaacttatcctagccagatcccactcaagagccaggtccttcagggtctccaggaaccagctggcgagggcctacccctgagaaagagcggatccgtcgaaaatgggttcgacacacaaatttacactgattgggctaatcactacctcgcaaagtctggccacaagcgattgatcagagacctccagcaagacgttacagacggggtgctgctcgcccagattattcaggtcgtggcaaacgagaaaatagaggacataaatggctgtcccaaaaaccgctcccagatgatcgaaaacatcgatgcttgcctgaactttttagctgctaaagggataaacatccagggccttagcgccgaggagatccggaacgggaacctaaaagctattctcggcttgtttttcagtctcagtagatacaaacagcagcagcaacagccacagaagcagcacctgtcgtctccattgcccccagctgttagtcaggtggctggggcaccaagccagtgccaggctggaacacctcaacagcaggtgcctgtgactccacaggcaccgtgccaacctcaccagcctgcacctcatcaacagtctaaagcgcaggcagagatgcaatctaggttacccggtccaactgccagggtgtccgccgcaggctcagaggcaaaaacacggggtgggtccacaactgccaacaacaggagatcccagagctttaacaactatgataagtccaagccagtcacaagccccccacccccaccttcgagtcacgagaaggagccgcttgcttcttctgccagctctcaccccggaatgtccgataatgcacctgctagtcttgagagtggatcttcatcgacccccactaactgcagtacttcctctgccataccccagccaggcgctgcgacaaagccttggcgcagcaagtcattgtccgtgaaacacagtgccacagtgagcatgctttccgtgaagccacccggtcctgaggcccctcgtccgacccctgaagccatgaaacctgccccaaacaatcagaagtccatgctagaaaaactcaaattgtttaacagcaaaggaggcagcaaggccggagaaggcccagggtctcgcgacacctcgtgtgaaagattagagactttaccgtctttcgaggagtccgaggagctggaggcagcttcccgaatgttgaccaccgtgggacccgcaagctcatcccccaaaatcgctctgaaagggatcgcccagaggacattctctcgcgcactgacaaacaagaaatcttcgctgaagggaaacgagaaggagaaagaaaagcagcaaagagagaaggataaggagaaaagcaaagatctggcaaaacgggctagtgtgaccgaacgtctcgatctgaaagaggaaccaaaagaggacccctcaggcgcagcagttccagaaatgcccaaaaagagctccaagatcgcaagtttcatccccaaaggtgggaagctgaattctgcaaagaaggagcccatggcacccagccactccgggatcccaaagcctgggatgaaaagcatgcctggtaaaagtccctccgcaccagctcctagcaaggagggggagagaagtcgctccggtaaacttagctccgggctacctcagcagaaaccacaattggatggaaggcattccagttcatcttcaagcctggcctcctctgagggcaagggcccaggcggtactactctcaaccactctatctcctctcagacagtgagcggctctgtcggaacaacccaaacaacaggctccaacacagtgtccgttcagctgccgcaaccacaacaacagtataatcatccaaacaccgccacagtggctccttttctttatagatcacagaccgatactgagggtaacgtgactgctgaaagttctagtaccggcgtatcagtggagccctcacattttacgaaaaccggccaacctgccttggaggagcttactggtgaagatccggaggctaggcgactgcggactgtaaaaaacatcgcagatttgagacagaatttggaagagacaatgagttctctgcggggtacacaggtaacccacagcaccctggaaaccacttttgacacaaacgtcaccacagagatgtcaggcaggtcaatccttagcctgaccggtaggcccacacccctgagttggcgcctgggtcagagttctcctcgattgcaggccggagatgcaccgtctatgggcaacggatatccacccagggccaacgcgtctcgcttcatcaatacagaatctggcagatatgtttacagcgcccctctccggaggcaactggcttctaggggctcctccgtgtgtcatgtcgacgtgtcggacaaagcaggggacgagatggacctggaggggatatccatggacgccccaggctacatgagcgacggcgacgtactgtcaaaaaacatcaggaccgacgatattacatcaggctatatgaccgatggtggtcttggtctgtatacacgcaggctgaatcgcctgcctgacggaatggcagtcgtccgggaaactttgcaacgcaatacctctctgggacttggagacgccgatagctgggacgattcatcgagcgtgtcatcaggcatttccgatactatagacaacttatccaccgatgatatcaatacaagctcatctatcagctcttatgccaataccccggcatcaagccggaagaatctagacgtccaaactgatgctgagaaacactctcaggtggagcgcaattccctctggagtggagacgatgtcaagaaaagcgacgggggttccgattcaggtattaagatggagccaggctctaaatggagacgcaaccctagcgacgtctctgatgagagtgataagtcaacgtctggaaaaaaaaacccagtcatctcacagaccggcagttggcgcagaggaatgaccgctcaggtaggtatcactatgcctagaacgaagccctcagcaccggctggggctctcaagacccccggaacagggaagactgacgacgctaaggtgtcagaaaaaggccgactaagccccaaagccagccaggtcaaacgctctccttccgatgccggaagatcttccggagacgagtctaaaaaaccactgccgagtagcagtcggacgcctactgcaaacgcgaattcttttggattcaaaaagcagtccggcagcgcagctggactagccatgattaccgcatcgggcgtcactgtgacctccagatccgctacactcggcaaaatcccgaagtctagcgccctggtttcacggtcagccggtcgaaaaagctctatggatggagcccaaaatcaggacgacggatatctggcgctctcatcacggactaatcttcagtatcgatcactccccaggccaagcaaaagcaacagtcgcaacggcgctggcaatcggagcagcacatcctcaatcgatagcaacatctctagtaagagcgccggtctaccagtacctaagctcagggagcccagcaaaacagctcttgggagctctctgcctggtctcgttaaccagaccgataaagaaaagggcatctcttctgacaacgagtctgtggctagttgcaacagcgtgaaggtaaaccctgcagcacagccagtgagtagccccgcacagacctctcttcaacctggagcaaaataccccgacgttgccagtcccacactgcggagattgtttgggggtaagccaactaagcaggtaccgattgcgacagccgaaaatatgaaaaattccgtcgttatctcaaatccccatgctaccatgacccagcaggggaatctggactctccctccggctcaggcgtcctgtcttctggctcaagcagtcctttgtatagcaaaaatgtcgacctgaatcagtccccactagcctccagccccagttcagcgcatagcgcgcctagcaacagtcttacttggggaactaacgcaagctcttccagcgctgtatcgaaagacgggttgggcttccaatctgttagcagtctccacacatcatgcgaaagtattgatatttccctctcctcgggtggcgtgccttctcataattcctccactggactgatcgctagttcaaaggacgactccctgaccccatttgtgagaacaaacagcgttaagacgacactgagtgagagtcctctgtcttctcctgccgcttccccaaagttttgtcgctctaccctcccacgcaagcaggactcagatccacacctggacaggaacaccctccccaaaaaaggccttcggtacactcctactagtcaacttcggacgcaggaagacgccaaggaatggcttcggagccattccgctggcggactgcaagatacagctgctaacagtcctttttctagcgggtcatctgtgaccagcccaagtggaaccaggttcaatttcagtcagctcgcatcccccaccacagttacccagatgtcacttagtaatcctaccatgctaaggacccactcactttctaacgctgatggtcagtacgatccatacaccgatagccgtttccgaaattcttcgatgtcattagatgaaaaatcccgtactatgagccgcagcggtagctttcgcgacgggtttgaggaggtgcacggaagctccttaagcctcgtatcaagcacttcgtctgtatacagtacccccgaggaaaagtgccagtctgaaatcagaaaactccggagggaactggatgccagccaggagaaagtgtctgctcttaccactcagctgactgccaacgctcacctggtggccgcatttgagcaatccctgggcaatatgacaataagattgcagtccttgacaatgaccgccgagcagaaggattcagagttgaacgagctgcggaagactatcgaattgcttaagaagcagaatgctgctgcgcaggcagctatcaatggtgttattaataccccggagttaaattgtaagggaaacggaactgcgcaatccgccgacctcaggatccggagacagcactcatctgatagcgtctcttccatcaactccgccacttcacactcttctgttggctctaacatcgaatcagatagcaaaaaaaaaaaaagaaagaactgggtcaacgagctcaggagttctttcaaacaggcattcgggaagaaaaagtctcccaagagcgccagcagccacagtgatattgaggaaatgactgattcatccctgccctcctcccctaagcttccccacaatggatctacaggtagtacccccctgctacggaacagtcacagcaattcacttatttcggaatgtatggacagtgaggctgaaactgtgatgcagctgagaaatgaactcagggacaaggagatgaaactaacagacattcgccttgaagctctttcatccgcacatcagctcgaccagctgagagaggcaatgaatcgcatgcagtctgaaattgaaaagctgaaggccgaaaacgaccgactcaagtcggagtcccaggggtctggctgctccagagctccaagccaggtgtcaatttctgcatctcccaggcagtccatgggccttagtcaacacagtctcaatctgacggagtctacctctctggacatgctcttggacgacaccggggagtgttcagcaaggaaagaaggcggacgccacgtgaaaatagtcgtttcttttcaggaagagatgaaatggaaggaagacagcaggccacacctgttcctgatagggtgcataggcgtctccggaaagaccaagtgggatgttctggacggggtcgtgcggcgactcttcaaggagtacataatccatgttgacccggtttcccaattgggcctgaatagtgactctgtcctcggctattccatcggggagatcaagcgctctaatacttctgagacacctgagctcttgccatgcggatacttggtgggtgaaaatacaacaatctctgtgactgtcaagggcttggccgaaaactccctggattccctggtcttcgagtccctcatccccaaacccatcctgcagagatatgtgtcattgctgatagagcatcgccgaataatcctgtccggacctagcggtaccggtaaaacgtacctggccaaccgactgtccgagtatatcgtcctcagggagggcagagagctcactgacggagtgattgctacctttaatgtggatcacaagagctccaaggaacttaggcagtacttgagtaacctcgcagaccaatgtaattcggaaaataacgccgtcgacatgcccttagtcataatactggataacctccaccatgtgagctctttaggtgaaatttttaatggcctcctgaactgtaagtaccataagtgcccgtacattatcggaaccatgaatcaggcgacgtcaagcaccccaaatctccagcttcaccacaactttagatgggttttgtgtgccaatcatacagagccagttaaaggctttcttggcagattcctcaggcggaagctgatggagaccgagattagtggtagagtgcggaatatggaattagtaaaaattatcgactggatccccaaagtctggcaccacctgaaccggtttctggaagcgcattccagctcagatgtgaccatcgggcctcggctgtttctgtcgtgccccatagacgtcgacggatcacgcgtctggttcacagacctgtggaactactccatcataccataccttttggaggccgtgagagaaggcttacagttatatggcaggcgagccccttgggaggaccctgccaaatgggtgatggacacatacccctgggctgccagcccccagcaacacgagtggcctccattgctgcaactccggcctgaagatgtgggcttcgacgggtattctatgcccagggagggctcaacctcaaaacagatgcctcctagcgatgctgagggtgaccctttgatgaacatgcttatgaggctccaggaagccgctaattactccagcccccagtcttacgatagcgattccaactctaattctcaccacgatgacatcctggactcaagcctcgaaagcaccctgta

SEQ ID NO: 257576 - DNA, 7299 bp, Artificial Sequence
  derived and/or modified sequence
atgcccgccatcctggtggccagcaagatgaagagcggcctgcccaagcccgtgcacagcgccgcccccatcctgcacgtgccccccgccagagccggcccccagccctgctacctgaagctgggcagcaaggtggaggtgagcaagaccacctaccccagccagatccccctgaagagccaggtgctgcagggcctgcaggagcccgccggcgagggcctgcccctgagaaagagcggcagcgtggagaacggcttcgacacccagatctacaccgactgggccaaccactacctggccaagagcggccacaagagactgatcagagacctgcagcaggacgtgaccgacggcgtgctgctggcccagatcatccaggtggtggccaacgagaagatcgaggacatcaacggctgccccaagaacagaagccagatgatcgagaacatcgacgcctgcctgaacttcctggccgccaagggcatcaacatccagggcctgagcgccgaggagatcagaaacggcaacctgaaggccatcctgggcctgttcttcagcctgagcagatacaagcagcagcagcagcagccccagaagcagcacctgagcagccccctgccccccgccgtgagccaggtggccggcgcccccagccagtgccaggccggcaccccccagcagcaggtgcccgtgaccccccaggccccctgccagccccaccagcccgccccccaccagcagagcaaggcccaggccgagatgcagagcagactgcccggccccaccgccagagtgagcgccgccggcagcgaggccaagaccagaggcggcagcaccaccgccaacaacagaagaagccagagcttcaacaactacgacaagagcaagcccgtgaccagccccccccccccccccagcagccacgagaaggagcccctggccagcagcgccagcagccaccccggcatgagcgacaacgcccccgccagcctggagagcggcagcagcagcacccccaccaactgcagcaccagcagcgccatcccccagcccggcgccgccaccaagccctggagaagcaagagcctgagcgtgaagcacagcgccaccgtgagcatgctgagcgtgaagccccccggccccgaggcccccagacccacccccgaggccatgaagcccgcccccaacaaccagaagagcatgctggagaagctgaagctgttcaacagcaagggcggcagcaaggccggcgagggccccggcagcagagacaccagctgcgagagactggagaccctgcccagcttcgaggagagcgaggagctggaggccgccagcagaatgctgaccaccgtgggccccgccagcagcagccccaagatcgccctgaagggcatcgcccagagaaccttcagcagagccctgaccaacaagaagagcagcctgaagggcaacgagaaggagaaggagaagcagcagagagagaaggacaaggagaagagcaaggacctggccaagagagccagcgtgaccgagagactggacctgaaggaggagcccaaggaggaccccagcggcgccgccgtgcccgagatgcccaagaagagcagcaagatcgccagcttcatccccaagggcggcaagctgaacagcgccaagaaggagcccatggcccccagccacagcggcatccccaagcccggcatgaagagcatgcccggcaagagccccagcgcccccgcccccagcaaggagggcgagagaagcagaagcggcaagctgagcagcggcctgccccagcagaagccccagctggacggcagacacagcagcagcagcagcagcctggccagcagcgagggcaagggccccggcggcaccaccctgaaccacagcatcagcagccagaccgtgagcggcagcgtgggcaccacccagaccaccggcagcaacaccgtgagcgtgcagctgccccagccccagcagcagtacaaccaccccaacaccgccaccgtggcccccttcctgtacagaagccagaccgacaccgagggcaacgtgaccgccgagagcagcagcaccggcgtgagcgtggagcccagccacttcaccaagaccggccagcccgccctggaggagctgaccggcgaggaccccgaggccagaagactgagaaccgtgaagaacatcgccgacctgagacagaacctggaggagaccatgagcagcctgagaggcacccaggtgacccacagcaccctggagaccaccttcgacaccaacgtgaccaccgagatgagcggcagaagcatcctgagcctgaccggcagacccacccccctgagctggagactgggccagagcagccccagactgcaggccggcgacgcccccagcatgggcaacggctacccccccagagccaacgccagcagattcatcaacaccgagagcggcagatacgtgtacagcgcccccctgagaagacagctggccagcagaggcagcagcgtgtgccacgtggacgtgagcgacaaggccggcgacgagatggacctggagggcatcagcatggacgcccccggctacatgagcgacggcgacgtgctgagcaagaacatcagaaccgacgacatcaccagcggctacatgaccgacggcggcctgggcctgtacaccagaagactgaacagactgcccgacggcatggccgtggtgagagagaccctgcagagaaacaccagcctgggcctgggcgacgccgacagctgggacgacagcagcagcgtgagcagcggcatcagcgacaccatcgacaacctgagcaccgacgacatcaacaccagcagcagcatcagcagctacgccaacacccccgccagcagcagaaagaacctggacgtgcagaccgacgccgagaagcacagccaggtggagagaaacagcctgtggagcggcgacgacgtgaagaagagcgacggcggcagcgacagcggcatcaagatggagcccggcagcaagtggagaagaaaccccagcgacgtgagcgacgagagcgacaagagcaccagcggcaagaagaaccccgtgatcagccagaccggcagctggagaagaggcatgaccgcccaggtgggcatcaccatgcccagaaccaagcccagcgcccccgccggcgccctgaagacccccggcaccggcaagaccgacgacgccaaggtgagcgagaagggcagactgagccccaaggccagccaggtgaagagaagccccagcgacgccggcagaagcagcggcgacgagagcaagaagcccctgcccagcagcagcagaacccccaccgccaacgccaacagcttcggcttcaagaagcagagcggcagcgccgccggcctggccatgatcaccgccagcggcgtgaccgtgaccagcagaagcgccaccctgggcaagatccccaagagcagcgccctggtgagcagaagcgccggcagaaagagcagcatggacggcgcccagaaccaggacgacggctacctggccctgagcagcagaaccaacctgcagtacagaagcctgcccagacccagcaagagcaacagcagaaacggcgccggcaacagaagcagcaccagcagcatcgacagcaacatcagcagcaagagcgccggcctgcccgtgcccaagctgagagagcccagcaagaccgccctgggcagcagcctgcccggcctggtgaaccagaccgacaaggagaagggcatcagcagcgacaacgagagcgtggccagctgcaacagcgtgaaggtgaaccccgccgcccagcccgtgagcagccccgcccagaccagcctgcagcccggcgccaagtaccccgacgtggccagccccaccctgagaagactgttcggcggcaagcccaccaagcaggtgcccatcgccaccgccgagaacatgaagaacagcgtggtgatcagcaacccccacgccaccatgacccagcagggcaacctggacagccccagcggcagcggcgtgctgagcagcggcagcagcagccccctgtacagcaagaacgtggacctgaaccagagccccctggccagcagccccagcagcgcccacagcgcccccagcaacagcctgacctggggcaccaacgccagcagcagcagcgccgtgagcaaggacggcctgggcttccagagcgtgagcagcctgcacaccagctgcgagagcatcgacatcagcctgagcagcggcggcgtgcccagccacaacagcagcaccggcctgatcgccagcagcaaggacgacagcctgacccccttcgtgagaaccaacagcgtgaagaccaccctgagcgagagccccctgagcagccccgccgccagccccaagttctgcagaagcaccctgcccagaaagcaggacagcgacccccacctggacagaaacaccctgcccaagaagggcctgagatacacccccaccagccagctgagaacccaggaggacgccaaggagtggctgagaagccacagcgccggcggcctgcaggacaccgccgccaacagccccttcagcagcggcagcagcgtgaccagccccagcggcaccagattcaacttcagccagctggccagccccaccaccgtgacccagatgagcctgagcaaccccaccatgctgagaacccacagcctgagcaacgccgacggccagtacgacccctacaccgacagcagattcagaaacagcagcatgagcctggacgagaagagcagaaccatgagcagaagcggcagcttcagagacggcttcgaggaggtgcacggcagcagcctgagcctggtgagcagcaccagcagcgtgtacagcacccccgaggagaagtgccagagcgagatcagaaagctgagaagagagctggacgccagccaggagaaggtgagcgccctgaccacccagctgaccgccaacgcccacctggtggccgccttcgagcagagcctgggcaacatgaccatcagactgcagagcctgaccatgaccgccgagcagaaggacagcgagctgaacgagctgagaaagaccatcgagctgctgaagaagcagaacgccgccgcccaggccgccatcaacggcgtgatcaacacccccgagctgaactgcaagggcaacggcaccgcccagagcgccgacctgagaatcagaagacagcacagcagcgacagcgtgagcagcatcaacagcgccaccagccacagcagcgtgggcagcaacatcgagagcgacagcaagaagaagaagagaaagaactgggtgaacgagctgagaagcagcttcaagcaggccttcggcaagaagaagagccccaagagcgccagcagccacagcgacatcgaggagatgaccgacagcagcctgcccagcagccccaagctgccccacaacggcagcaccggcagcacccccctgctgagaaacagccacagcaacagcctgatcagcgagtgcatggacagcgaggccgagaccgtgatgcagctgagaaacgagctgagagacaaggagatgaagctgaccgacatcagactggaggccctgagcagcgcccaccagctggaccagctgagagaggccatgaacagaatgcagagcgagatcgagaagctgaaggccgagaacgacagactgaagagcgagagccagggcagcggctgcagcagagcccccagccaggtgagcatcagcgccagccccagacagagcatgggcctgagccagcacagcctgaacctgaccgagagcaccagcctggacatgctgctggacgacaccggcgagtgcagcgccagaaaggagggcggcagacacgtgaagatcgtggtgagcttccaggaggagatgaagtggaaggaggacagcagaccccacctgttcctgatcggctgcatcggcgtgagcggcaagaccaagtgggacgtgctggacggcgtggtgagaagactgttcaaggagtacatcatccacgtggaccccgtgagccagctgggcctgaacagcgacagcgtgctgggctacagcatcggcgagatcaagagaagcaacaccagcgagacccccgagctgctgccctgcggctacctggtgggcgagaacaccaccatcagcgtgaccgtgaagggcctggccgagaacagcctggacagcctggtgttcgagagcctgatccccaagcccatcctgcagagatacgtgagcctgctgatcgagcacagaagaatcatcctgagcggccccagcggcaccggcaagacctacctggccaacagactgagcgagtacatcgtgctgagagagggcagagagctgaccgacggcgtgatcgccaccttcaacgtggaccacaagagcagcaaggagctgagacagtacctgagcaacctggccgaccagtgcaacagcgagaacaacgccgtggacatgcccctggtgatcatcctggacaacctgcaccacgtgagcagcctgggcgagatcttcaacggcctgctgaactgcaagtaccacaagtgcccctacatcatcggcaccatgaaccaggccaccagcagcacccccaacctgcagctgcaccacaacttcagatgggtgctgtgcgccaaccacaccgagcccgtgaagggcttcctgggcagattcctgagaagaaagctgatggagaccgagatcagcggcagagtgagaaacatggagctggtgaagatcatcgactggatccccaaggtgtggcaccacctgaacagattcctggaggcccacagcagcagcgacgtgaccatcggccccagactgttcctgagctgccccatcgacgtggacggcagcagagtgtggttcaccgacctgtggaactacagcatcatcccctacctgctggaggccgtgagagagggcctgcagctgtacggcagaagagccccctgggaggaccccgccaagtgggtgatggacacctacccctgggccgccagcccccagcagcacgagtggccccccctgctgcagctgagacccgaggacgtgggcttcgacggctacagcatgcccagagagggcagcaccagcaagcagatgccccccagcgacgccgagggcgaccccctgatgaacatgctgatgagactgcaggaggccgccaactacagcagcccccagagctacgacagcgacagcaacagcaacagccaccacgacgacatcctggacagcagcctggagagcaccctgtag

SEQ ID NO: 257577 - protein, 470 aa, Artificial Sequence
  derived and/or modified sequence
MSAQVLGFLRSWTPLPLAAPRGPAAAGNDAGAPAATAPGGEGEPHSRPCDARLGSTDKELKAGAAATGSAPTAPGTPWQREPRVEVMDPAGGPRGVLPRPCRVLVLLNPRGGKGKALQLFRSHVQPLLAEAEISFTLMLTERRNHARELVRSEELGRWDALVVMSGDGLMHEVVNGLMERPDWETAIQKPLCSLPAGSGNALAASLNHYAGYEQVTNEDLLTNCTLLLCRRLLSPMNLLSLHTASGLRLFSVLSLAWGFIADVDLESEKYRRLGEMRFTLGTFLRLAALRTYRGRLAYLPVGRVGSKTPASPVVVQQGPVDAHLVPLEEPVPSHWTVVPDEDFVLVLALLHSHLGSEMFAAPMGRCAAGVMHLFYVRAGVSRAMLLRLFLAMEKGRHMEYECPYLVYVPVVAFRLEPKDGKGVFAVDGELMVSEAVQGQVHPNYFWMVSGCVEPPPSWKPQQMPPPEEPL

SEQ ID NO: 257578 - protein, 384 aa, Artificial Sequence
  derived and/or modified sequence
MDPAGGPRGVLPRPCRVLVLLNPRGGKGKALQLFRSHVQPLLAEAEISFTLMLTERRNHARELVRSEELGRWDALVVMSGDGLMHEVVNGLMERPDWETAIQKPLCSLPAGSGNALAASLNHYAGYEQVTNEDLLTNCTLLLCRRLLSPMNLLSLHTASGLRLFSVLSLAWGFIADVDLESEKYRRLGEMRFTLGTFLRLAALRTYRGRLAYLPVGRVGSKTPASPVVVQQGPVDAHLVPLEEPVPSHWTVVPDEDFVLVLALLHSHLGSEMFAAPMGRCAAGVMHLFYVRAGVSRAMLLRLFLAMEKGRHMEYECPYLVYVPVVAFRLEPKDGKGVFAVDGELMVSEAVQGQVHPNYFWMVSGCVEPPPSWKPQQMPPPEEPL

SEQ ID NO: 257579 - protein, 383 aa, Artificial Sequence
  derived and/or modified sequence
EPTGGPRGVLPRPCRVLVLLNPRGGKGKALQLFRSHVQPLLAEAEISFTLMLTERRNHARELVRSEELGRWDALVVMSGDGLMHEVVNGLMERPDWETAIQKPLCSLPAGSGNALAASLNHYAGYEQVTNEDLLTNCTLLLCRRLLSPMNLLSLHTASGLRLFSVLSLAWGFIADVDLESEKYRRLGEMRFTLGTFLRLAALRTYRGRLAYLPVGRVGSKTPASPVVVQQGPVDAHLVPLEEPVPSHWTVVPDEDFVLVLALLHSHLGSEMFAAPMGRCAAGVMHLFYVRAGVSRAMLLRLFLAMEKGRHMEYECPYLVYVPVVAFRLEPKDGKGVFAVDGELMVSEAVQGQVHPNYFWMVSGCVEPPPSWKPQQMPPPEEPL

SEQ ID NO: 257580 - DNA, 1413 bp, Artificial Sequence
  derived and/or modified sequence
atgagcgcccaggtgctgggcttcctgagaagctggacccccctgcccctggccgcccccagaggccccgccgccgccggcaacgacgccggcgcccccgccgccaccgcccccggcggcgagggcgagccccacagcagaccctgcgacgccagactgggcagcaccgacaaggagctgaaggccggcgccgccgccaccggcagcgcccccaccgcccccggcaccccctggcagagagagcccagagtggaggtgatggaccccgccggcggccccagaggcgtgctgcccagaccctgcagagtgctggtgctgctgaaccccagaggcggcaagggcaaggccctgcagctgttcagaagccacgtgcagcccctgctggccgaggccgagatcagcttcaccctgatgctgaccgagagaagaaaccacgccagagagctggtgagaagcgaggagctgggcagatgggacgccctggtggtgatgagcggcgacggcctgatgcacgaggtggtgaacggcctgatggagagacccgactgggagaccgccatccagaagcccctgtgcagcctgcccgccggcagcggcaacgccctggccgccagcctgaaccactacgccggctacgagcaggtgaccaacgaggacctgctgaccaactgcaccctgctgctgtgcagaagactgctgagccccatgaacctgctgagcctgcacaccgccagcggcctgagactgttcagcgtgctgagcctggcctggggcttcatcgccgacgtggacctggagagcgagaagtacagaagactgggcgagatgagattcaccctgggcaccttcctgagactggccgccctgagaacctacagaggcagactggcctacctgcccgtgggcagagtgggcagcaagacccccgccagccccgtggtggtgcagcagggccccgtggacgcccacctggtgcccctggaggagcccgtgcccagccactggaccgtggtgcccgacgaggacttcgtgctggtgctggccctgctgcacagccacctgggcagcgagatgttcgccgcccccatgggcagatgcgccgccggcgtgatgcacctgttctacgtgagagccggcgtgagcagagccatgctgctgagactgttcctggccatggagaagggcagacacatggagtacgagtgcccctacctggtgtacgtgcccgtggtggccttcagactggagcccaaggacggcaagggcgtgttcgccgtggacggcgagctgatggtgagcgaggccgtgcagggccaggtgcaccccaactacttctggatggtgagcggctgcgtggagcccccccccagctggaagccccagcagatgcccccccccgaggagcccctgtag

SEQ ID NO: 257581 - DNA, 1413 bp, Artificial Sequence
  derived and/or modified sequence
atgtccgcacaagtgctaggatttctcaggtcgtggacccccctacccctggcagccccaaggggccccgccgcagcaggaaatgacgccggcgcccccgccgccaccgcccctggcggcgagggcgaacctcactctaggccgtgtgatgcaagactgggaagcaccgataaagagctcaaggctggcgcagctgctaccggctccgcccctactgctcctggcaccccatggcagcgcgagcccagagtggaggtgatggatcccgccggcggacccagaggcgtgctcccacggccttgtcgagttctggtgttgctcaatccacgcgggggaaaggggaaggccttacaactttttcgatctcatgtgcaaccactgctggcagaggccgaaatttcattcacacttatgttgactgagaggcggaaccatgcaagggaactggtgaggagcgaggaactggggaggtgggatgccctcgttgtgatgtctggcgatgggctcatgcatgaggtggtcaacggactcatggaaagacccgactgggagaccgcgatccagaaacctctatgtagtctccctgctggctcaggcaacgctctagctgcgtccctgaaccactacgctggatacgaacaggtcactaacgaagatctgttgaccaactgtacactcttgctctgccgtagactgctgtcccccatgaacctgctaagcctgcatacagcctctggcctacgcttattttccgtcctgtcgctggcatggggctttattgcggatgtggacttggaatcagagaaatacaggcggcttggcgagatgaggtttacattgggaaccttcctgagattggccgctctccggacctaccggggccgcctggcctacttgcccgtaggtcgggtgggaagcaagacacccgccagtccagtcgtggtgcagcagggcccagttgacgcccacctcgtaccactcgaggagccagtgccatcccactggaccgtggttccagatgaggatttcgtactggtactcgcccttctgcactcccatctgggtagtgagatgtttgcagcccccatgggccggtgtgcggccggagtgatgcatctcttctacgtccgggccggcgtatctagggctatgcttctgcgactcttcttggcaatggagaaagggcggcatatggagtacgagtgcccgtatctggtgtacgtacccgtcgtggccttcagactcgagccaaaggatggaaagggagtgtttgcggtcgacggcgagctgatggtgtctgaagcagtccaggggcaggtccatcctaattacttttggatggtgagcgggtgcgtcgagccacccccctcatggaagccccagcaaatgccgcctccagaagagccattatag

SEQ ID NO: 257582 - DNA, 1413 bp, Artificial Sequence
  derived and/or modified sequence
atgtctgcccaggtgctgggcttcctgcgctcctggacccccctgcccctggccgccccccggggccctgctgctgctggaaatgatgctggggccccagctgccacagcccctggaggagagggggagccccacagccggccctgtgatgcccggctgggcagcacagacaaggagctgaaggccggggctgctgccactggaagtgcccccacagcccctggcaccccctggcagcgggagccccgggtggaggtgatggaccctgctgggggcccccggggcgtgctgccccggccctgccgggtgctggtgctgctgaacccccggggcggcaagggcaaggccctgcagctgttccgcagccacgtgcagcccctgctggccgaggccgagatctccttcaccctgatgctgacagagaggagaaatcatgcccgggagctggtgcgctctgaggagctgggccgctgggatgccctggtggtgatgtctggagatggcctgatgcatgaggtggtgaatggcctgatggagaggccagactgggagacagccatccagaagcccctgtgcagcctgcctgctggcagcggaaatgccctggccgccagcctgaaccactacgccggctatgagcaggtgaccaatgaagacctgctgaccaactgcaccctgctgctgtgccggcggctgctgagccccatgaacctgctgagcctgcacacagccagcggcctgcggctcttctctgtgctgagcctggcctggggcttcatcgcagatgtggacctggagagcgagaagtacagaaggctgggggagatgaggttcaccctgggcaccttcctgcggctggccgccctgcggacctaccggggccgcctggcctacctgcctgtgggccgggtgggcagcaagaccccagccagccctgtggtggtgcagcagggccctgtggatgcccacctggtgcccctggaggagcctgtgcccagccactggacagtggtgcctgatgaagattttgtgctggtgctggccctgctgcacagccacctgggcagcgagatgtttgctgcccccatgggccgctgtgccgccggcgtgatgcacctgttctacgtgcgggccggcgtgtcccgggccatgctgctgcggctcttcctggccatggagaagggccgccacatggagtatgaatgtccctacctggtgtatgtgcctgtggtggccttccggctggagcccaaggatggaaaaggagtgtttgctgtggatggagagctgatggtgtctgaggccgtgcagggccaggtgcaccccaactacttctggatggtgtctggctgtgtggagcccccacccagctggaagccccagcagatgcctcctcctgaggagcccctgtag

SEQ ID NO: 257583 - DNA, 1413 bp, Artificial Sequence
  derived and/or modified sequence
atgagcgcccaggtgctgggcttcctgcggagctggacccccctgccgctggctgctccgcgcggcccggcagccgccgggaacgacgctggggcgccagctgcaactgccccgggcggtgaaggcgagcctcatagcagaccgtgtgacgccaggctgggctcaactgacaaggaactcaaagctggtgccgccgccaccggctctgcccccaccgcgccagggaccccatggcagagggaaccacgcgttgaagtgatggatccagctggtggccccagaggagtgctgccacgcccgtgccgggttcttgttctgctcaacccacgcggaggaaaaggcaaagcactgcagctgttccggtcacacgtgcagcccttgctcgccgaggctgaaatctcattcaccctgatgcttactgagaggcgcaaccacgcccgagaactggtacgaagcgaagagttaggacggtgggatgcactggtggtaatgtcaggggatgggcttatgcatgaggttgtgaacggacttatggagcgccctgactgggaaacggctatccagaagcccctgtgtagcctgccagcaggatccggtaacgcccttgccgcttcgctgaaccactacgcaggctacgaacaggtgactaatgaggacctactcacgaattgtactttgctgctgtgccgccgactgttatcgcctatgaatctactgagccttcacaccgcatctgggttgcgcttattcagcgttctcagcctggcatggggattcatcgctgatgtggacctcgagagtgaaaaataccgccgacttggcgaaatgagattcaccctgggtacatttctccggctggcggcgctacgtacttatagaggcagactggcttaccttcccgtcgggagagtcggctcaaagacaccagccagcccggtcgtggtgcagcagggcccagtggacgcccacctagttcctctcgaggaacccgtccctagccactggaccgtggtgcccgatgaggacttcgttctggtcctcgcacttctccacagccacctagggagcgagatgtttgccgcgccaatgggacgttgtgctgccggagttatgcatctgttttatgtaagagcgggcgtttctagggcaatgctgctgcggctgtttctggccatggaaaaagggaggcatatggagtacgagtgtccctatctggtgtatgtgcctgtggtcgcattcagactggaacctaaggatggcaaaggcgtgtttgctgtggatggcgaactcatggtaagcgaggccgtccagggccaagttcatcccaactacttctggatggtgtccggctgcgttgaaccccctccgtcctggaaaccacagcagatgcctccacctgaggaaccactttag

SEQ ID NO: 257584 - DNA, 1413 bp, Artificial Sequence
  derived and/or modified sequence
atgtcagcccaggtgctcggcttcttgcgctcatggacgcctctgcctctggcggcacctagaggtcctgctgccgctggcaatgatgctggggcaccggctgccacggccccaggtggggagggggagccacactctcgcccatgcgacgctcgcctgggctcaacagacaaggagctgaaagcaggtgccgctgcgacggggagcgctcctactgcacccggtaccccatggcaacgagagccaagagtagaagtcatggaccctgccggtggccctcgaggcgttctgcctaggccctgcagagtgctggtgttgctcaatcccagaggcggaaagggcaaagctctgcaactgtttaggagtcatgtgcagccactgctggctgaggctgaaatttccttcacactgatgctgaccgaaagaagaaaccatgcccgtgaattggtccggtcggaggagctgggacgctgggatgctctggttgttatgagcggggacggcctcatgcacgaggtggttaatggtctcatggagcggccagattgggagaccgccatacagaaacctctgtgctctttgcccgctggcagtggtaatgcactggccgcatccctcaaccattatgcaggttacgaacaggtcacaaatgaagatcttctgaccaattgcacacttctgctatgccggagactgttgtcaccaatgaatctgttgtctctccatactgcttcaggccttcggctgttctccgtgctcagcctggcctggggtttcatcgccgacgtcgacctggagagtgagaaatatcgtagactcggcgaaatgcggtttaccctaggcactttccttcgactcgctgccctacgcacctatcggggacgactggcttaccttccggtcggacgtgtgggtagcaaaacgcctgcctccccggtcgtggttcaacaggggccagtagatgcccacttggttcccctggaggagccagtgccatcccattggaccgtggttccagacgaagattttgtcctggttctggctctcctgcacagccatctgggctctgaaatgtttgctgccccaatgggcagatgtgccgcaggagtcatgcacctgttttacgtgagagccggagtcagtcgtgcaatgctgctgcggttgtttctggccatggagaaaggacggcatatggagtacgagtgtccctacctggtgtatgtaccagtggtagcgtttagattggagcccaaagacggcaagggagtgtttgctgtggacggcgagctcatggtgagcgaggcagtgcagggacaggtccaccctaactacttttggatggtttccggttgcgtggaaccacctccgagctggaaacctcagcagatgccgcctccagaagagcctctgtag

SEQ ID NO: 257585 - DNA, 2184 bp, Artificial Sequence
  derived and/or modified sequence
agtgccctccccgctccgcggcgccggctgcgaagttgagcgaaaagtttgaggccggagggagcgaggccggggagtccgctccagcggggcgctccagtccctcagacgtgggctgagcttgggacgagctgcgttccgccccaggccactgtagggaacggcggtggcgcctccccagcaaaccggaccgactgggtagggccgcccaccctgccttcgcgccgctcgtggctcctgtgcggcccgccctcgcggggccccgggaactgggccacttgtcgcttgggcgagagcaggcggcagctggtggcccggttcgggcttggctttggcgcgacccgggagcggctcccacgagcgccgcgcgcgtcgcaacggagcggggccctgagaagcgcgcgccgcggctcccaccgctctggagctccgggcaggggacacggcaacctggatggctggggcagggatcctctcccagaacttcgtgcccagcaatgtccgctcaagttctgggatttttacgcagctggactcccctccccctggcagccccgaggggtccagccgccgcagggaatgacgccggtgctcctgcagccacggctccgggcggggaaggcgagccccacagccggccctgcgacgcccgcctgggcagcaccgataaggagctgaaggcaggagccgccgccacgggcagcgcccccacagcgccagggaccccctggcagcgggagccgcgggtcgaggttatggatccagcgggcggcccccggggcgtgctcccgcggccctgccgcgtgctggtgctgctgaacccgcgcggcggcaagggcaaggccttgcagctcttccggagtcacgtgcagccccttttggctgaggctgaaatctccttcacgctgatgctcactgagcggcggaaccacgcgcgggagctggtgcggtcggaggagctgggccgctgggacgctctggtggtcatgtctggagacgggctgatgcacgaggtggtgaacgggctcatggagcggcctgactgggagaccgccatccagaagcccctgtgtagcctcccagcaggctctggcaacgcgctggcagcttccttgaaccattatgctggctatgagcaggtcaccaatgaagacctcctgaccaactgcacgctattgctgtgccgccggctgctgtcacccatgaacctgctgtctctgcacacggcttcggggctgcgcctcttctctgtgctcagcctggcctggggcttcattgctgatgtggacctagagagtgagaagtatcggcgtctgggggagatgcgcttcactctgggcaccttcctgcgtctggcagccctgcgcacctaccgcggccgactggcctacctccctgtaggaagagtgggttccaagacacctgcctcccccgttgtggtccagcagggcccggtagatgcacaccttgtgccactggaggagccagtgccctctcactggacagtggtgcccgacgaggactttgtgctagtcctggcactgctgcactcgcacctgggcagtgagatgtttgctgcacccatgggccgctgtgcagctggcgtcatgcatctgttctacgtgcgggcgggagtgtctcgtgccatgctgctgcgcctcttcctggccatggagaagggcaggcatatggagtatgaatgcccctacttggtatatgtgcccgtggtcgccttccgcttggagcccaaggatgggaaaggtgtgtttgcagtggatggggaattgatggttagcgaggccgtgcagggccaggtgcacccaaactacttctggatggtcagcggttgcgtggagcccccgcccagctggaagccccagcagatgccaccgccagaagagcccttatgacccctgggccgcgctgtgccttagtgtctacttgcaggacccttcctccttccctagggctgcagggcctgtccacagctcctgtgggggtggaggagactcctctggagaagggtgagaaggtggaggctatgctttggggggacaggccagaatgaagtcctgggtcaggagcccagctggctgggcccagctgcctatgtaaggccttctagtttgttctgagacccccaccccacgaaccaaatccaaataaagtgacattcccagcctg

SEQ ID NO: 257586 - DNA, 1866 bp, Artificial Sequence
  derived and/or modified sequence
gactcatccgtcgggccggaaccgaaccccaagccccagggagaaagccccggagcaggcgcccttctcagggattgtaggcttagtcacacggcgggggcgccctcggaggcaccggacctcagctctctggacttcccgggaacctggctccccgcgcgtggtcccgggatttagtcgggcgctccccacctctggcagctgcggccccggactccgccagcgctgtcttctctccctcaggtccagccgccgcagggaatgacgccggtgctcctgcagccacggctccgggcggggaaggcgagccccacagccggccctgcgacgcccgcctgggcagcaccgataaggagctgaaggcaggagccgccgccacgggcagcgcccccacagcgccagggaccccctggcagcgggagccgcgggtcgaggttatggatccagcgggcggcccccggggcgtgctcccgcggccctgccgcgtgctggtgctgctgaacccgcgcggcggcaagggcaaggccttgcagctcttccggagtcacgtgcagccccttttggctgaggctgaaatctccttcacgctgatgctcactgagcggcggaaccacgcgcgggagctggtgcggtcggaggagctgggccgctgggacgctctggtggtcatgtctggagacgggctgatgcacgaggtggtgaacgggctcatggagcggcctgactgggagaccgccatccagaagcccctgtgtagcctcccagcaggctctggcaacgcgctggcagcttccttgaaccattatgctggctatgagcaggtcaccaatgaagacctcctgaccaactgcacgctattgctgtgccgccggctgctgtcacccatgaacctgctgtctctgcacacggcttcggggctgcgcctcttctctgtgctcagcctggcctggggcttcattgctgatgtggacctagagagtgagaagtatcggcgtctgggggagatgcgcttcactctgggcaccttcctgcgtctggcagccctgcgcacctaccgcggccgactggcctacctccctgtaggaagagtgggttccaagacacctgcctcccccgttgtggtccagcagggcccggtagatgcacaccttgtgccactggaggagccagtgccctctcactggacagtggtgcccgacgaggactttgtgctagtcctggcactgctgcactcgcacctgggcagtgagatgtttgctgcacccatgggccgctgtgcagctggcgtcatgcatctgttctacgtgcgggcgggagtgtctcgtgccatgctgctgcgcctcttcctggccatggagaagggcaggcatatggagtatgaatgcccctacttggtatatgtgcccgtggtcgccttccgcttggagcccaaggatgggaaaggtgtgtttgcagtggatggggaattgatggttagcgaggccgtgcagggccaggtgcacccaaactacttctggatggtcagcggttgcgtggagcccccgcccagctggaagccccagcagatgccaccgccagaagagcccttatgacccctgggccgcgctgtgccttagtgtctacttgcaggacccttcctccttccctagggctgcagggcctgtccacagctcctgtgggggtggaggagactcctctggagaagggtgagaaggtggaggctatgctttggggggacaggccagaatgaagtcctgggtcaggagcccagctggctgggcccagctgcctatgtaaggccttctagtttgttctgagacccccaccccacgaaccaaatccaaataaagtgacattcccagcctg

SEQ ID NO: 257587 - DNA, 2238 bp, Artificial Sequence
  derived and/or modified sequence
aatgcagctctgccttcctgctccctgtgcagaggtgccggctcctgcttcctggttcccagctttccttttgggaactgcctgaggtggtttgacacacagctgttgggcttctcttcccttgaggtctctgaaccagggcacccatgcagggagagggccctctgaaggtgaaggcagagacggggacgacgcagcagcaagacacggatgaccaaaggctgtcggcaaaccaccaggacacaggcctgggacagagtcacagcctcagaaggaaccaaccctgccaacaccgtgatcgtagacttcccaacctccaaaactgtgagacagtcaatttctgttgtctacgccaccaggacactaatacaaatgcctatagatgctgggcaggcagctgagacaaatggagtgggtagggctgcagctcgccaccttgagagggctctgaagagaatcaccctgaattgcagccacagtcagcagcctggagatggagtttcgccctgtcacccaggctggagtgcaatgggacgatctcagctcaccacaacctctgcctcctgggtgcaagcaattctcctgcctcagcctcccaagtagctgggactacaggtccagccgccgcagggaatgacgccggtgctcctgcagccacggctccgggcggggaaggcgagccccacagccggccctgcgacgcccgcctgggcagcaccgataaggagctgaaggcaggagccgccgccacgggcagcgcccccacagcgccagggaccccctggcagcgggagccgcgggtcgaggttatggatccagcgggcggcccccggggcgtgctcccgcggccctgccgcgtgctggtgctgctgaacccgcgcggcggcaagggcaaggccttgcagctcttccggagtcacgtgcagccccttttggctgaggctgaaatctccttcacgctgatgctcactgagcggcggaaccacgcgcgggagctggtgcggtcggaggagctgggccgctgggacgctctggtggtcatgtctggagacgggctgatgcacgaggtggtgaacgggctcatggagcggcctgactgggagaccgccatccagaagcccctgtgtagcctcccagcaggctctggcaacgcgctggcagcttccttgaaccattatgctggctatgagcaggtcaccaatgaagacctcctgaccaactgcacgctattgctgtgccgccggctgctgtcacccatgaacctgctgtctctgcacacggcttcggggctgcgcctcttctctgtgctcagcctggcctggggcttcattgctgatgtggacctagagagtgagaagtatcggcgtctgggggagatgcgcttcactctgggcaccttcctgcgtctggcagccctgcgcacctaccgcggccgactggcctacctccctgtaggaagagtgggttccaagacacctgcctcccccgttgtggtccagcagggcccggtagatgcacaccttgtgccactggaggagccagtgccctctcactggacagtggtgcccgacgaggactttgtgctagtcctggcactgctgcactcgcacctgggcagtgagatgtttgctgcacccatgggccgctgtgcagctggcgtcatgcatctgttctacgtgcgggcgggagtgtctcgtgccatgctgctgcgcctcttcctggccatggagaagggcaggcatatggagtatgaatgcccctacttggtatatgtgcccgtggtcgccttccgcttggagcccaaggatgggaaaggtgtgtttgcagtggatggggaattgatggttagcgaggccgtgcagggccaggtgcacccaaactacttctggatggtcagcggttgcgtggagcccccgcccagctggaagccccagcagatgccaccgccagaagagcccttatgacccctgggccgcgctgtgccttagtgtctacttgcaggacccttcctccttccctagggctgcagggcctgtccacagctcctgtgggggtggaggagactcctctggagaagggtgagaaggtggaggctatgctttggggggacaggccagaatgaagtcctgggtcaggagcccagctggctgggcccagctgcctatgtaaggccttctagtttgttctgagacccccaccccacgaaccaaatccaaataaagtgacattcccagcctg

SEQ ID NO: 257588 - DNA, 1851 bp, Artificial Sequence
  derived and/or modified sequence
gctccgcggcgccggctgcgaagttgagcgaaaagtttgaggccggagggagcgaggccggggagtccgctccagcggggcgctccagtccctcagacgtgggctgagcttgggacgagctgcgttccgccccaggccactgtagggaacggcggtggcgcctccccagcaaaccggaccgactgggtccagccgccgcagggaatgacgccggtgctcctgcagccacggctccgggcggggaaggcgagccccacagccggccctgcgacgcccgcctgggcagcaccgataaggagctgaaggcaggagccgccgccacgggcagcgcccccacagcgccagggaccccctggcagcgggagccgcgggtcgaggttatggatccagtggtcggttgcggacgtggcctctttggttttgttttctcagcgggcggcccccggggcgtgctcccgcggccctgccgcgtgctggtgctgctgaacccgcgcggcggcaagggcaaggccttgcagctcttccggagtcacgtgcagccccttttggctgaggctgaaatctccttcacgctgatgctcactgagcggcggaaccacgcgcgggagctggtgcggtcggaggagctgggccgctgggacgctctggtggtcatgtctggagacgggctgatgcacgaggtggtgaacgggctcatggagcggcctgactgggagaccgccatccagaagcccctgtgtagcctcccagcaggctctggcaacgcgctggcagcttccttgaaccattatgctggctatgagcaggtcaccaatgaagacctcctgaccaactgcacgctattgctgtgccgccggctgctgtcacccatgaacctgctgtctctgcacacggcttcggggctgcgcctcttctctgtgctcagcctggcctggggcttcattgctgatgtggacctagagagtgagaagtatcggcgtctgggggagatgcgcttcactctgggcaccttcctgcgtctggcagccctgcgcacctaccgcggccgactggcctacctccctgtaggaagagtgggttccaagacacctgcctcccccgttgtggtccagcagggcccggtagatgcacaccttgtgccactggaggagccagtgccctctcactggacagtggtgcccgacgaggactttgtgctagtcctggcactgctgcactcgcacctgggcagtgagatgtttgctgcacccatgggccgctgtgcagctggcgtcatgcatctgttctacgtgcgggcgggagtgtctcgtgccatgctgctgcgcctcttcctggccatggagaagggcaggcatatggagtatgaatgcccctacttggtatatgtgcccgtggtcgccttccgcttggagcccaaggatgggaaaggtgtgtttgcagtggatggggaattgatggttagcgaggccgtgcagggccaggtgcacccaaactacttctggatggtcagcggttgcgtggagcccccgcccagctggaagccccagcagatgccaccgccagaagagcccttatgacccctgggccgcgctgtgccttagtgtctacttgcaggacccttcctccttccctagggctgcagggcctgtccacagctcctgtgggggtggaggagactcctctggagaagggtgagaaggtggaggctatgctttggggggacaggccagaatgaagtcctgggtcaggagcccagctggctgggcccagctgcctatgtaaggccttctagtttgttctgagacccccaccccacgaaccaaatccaaataaagtgacattcccagcctg

SEQ ID NO: 257589 - DNA, 1821 bp, Artificial Sequence
  derived and/or modified sequence
agtgccctccccgctccgcggcgccggctgcgaagttgagcgaaaagtttgaggccggagggagcgaggccggggagtccgctccagcggggcgctccagtccctcagacgtgggctgagcttgggacgagctgcgttccgccccaggccactgtagggaacggcggtggcgcctccccagcaaaccggaccgactgggtccagccgccgcagggaatgacgccggtgctcctgcagccacggctccgggcggggaaggcgagccccacagccggccctgcgacgcccgcctgggcagcaccgataaggagctgaaggcaggagccgccgccacgggcagcgcccccacagcgccagggaccccctggcagcgggagccgcgggtcgaggttatggatccagcgggcggcccccggggcgtgctcccgcggccctgccgcgtgctggtgctgctgaacccgcgcggcggcaagggcaaggccttgcagctcttccggagtcacgtgcagccccttttggctgaggctgaaatctccttcacgctgatgctcactgagcggcggaaccacgcgcgggagctggtgcggtcggaggagctgggccgctgggacgctctggtggtcatgtctggagacgggctgatgcacgaggtggtgaacgggctcatggagcggcctgactgggagaccgccatccagaagcccctgtgtagcctcccagcaggctctggcaacgcgctggcagcttccttgaaccattatgctggctatgagcaggtcaccaatgaagacctcctgaccaactgcacgctattgctgtgccgccggctgctgtcacccatgaacctgctgtctctgcacacggcttcggggctgcgcctcttctctgtgctcagcctggcctggggcttcattgctgatgtggacctagagagtgagaagtatcggcgtctgggggagatgcgcttcactctgggcaccttcctgcgtctggcagccctgcgcacctaccgcggccgactggcctacctccctgtaggaagagtgggttccaagacacctgcctcccccgttgtggtccagcagggcccggtagatgcacaccttgtgccactggaggagccagtgccctctcactggacagtggtgcccgacgaggactttgtgctagtcctggcactgctgcactcgcacctgggcagtgagatgtttgctgcacccatgggccgctgtgcagctggcgtcatgcatctgttctacgtgcgggcgggagtgtctcgtgccatgctgctgcgcctcttcctggccatggagaagggcaggcatatggagtatgaatgcccctacttggtatatgtgcccgtggtcgccttccgcttggagcccaaggatgggaaaggtgtgtttgcagtggatggggaattgatggttagcgaggccgtgcagggccaggtgcacccaaactacttctggatggtcagcggttgcgtggagcccccgcccagctggaagccccagcagatgccaccgccagaagagcccttatgacccctgggccgcgctgtgccttagtgtctacttgcaggacccttcctccttccctagggctgcagggcctgtccacagctcctgtgggggtggaggagactcctctggagaagggtgagaaggtggaggctatgctttggggggacaggccagaatgaagtcctgggtcaggagcccagctggctgggcccagctgcctatgtaaggccttctagtttgttctgagacccccaccccacgaaccaaatccaaataaagtgacattcccagcctg

SEQ ID NO: 257590 - protein, 174 aa, Artificial Sequence
  derived and/or modified sequence
MKYKNLMARALYDNVPECAEELAFRKGDILTVIEQNTGGLEGWWLCSLHGRQGIVPGNRVKLLIGPMQETASSHEQPASGLMQQTFGQQKLYQVPNPQAAPRDTIYQVPPSYQNQGIYQVPTGHGTQEQEVYQVPPSVQRSIGGTSGPHVGKKVFQRDGQVSYFLVRASKQTSL

SEQ ID NO: 257591 - DNA, 525 bp, Artificial Sequence
  derived and/or modified sequence
atgaagtataagaacctgatggcacgggccctctatgataatgtaccggagtgtgctgaagagctcgcattccgcaagggtgatatattaacagtaatcgaacagaacaccggtgggctggaggggtggtggctctgcagcctccatggtagacaaggaattgtgccaggcaacagggtgaaacttctgatcggtcccatgcaggagaccgccagctctcacgaacagccagcctcaggcttgatgcagcagacgttcggtcaacagaaactttatcaggtccctaatccacaggcggcacctcgtgatactatctaccaggtgccacctagttaccagaaccagggaatctaccaggtcccgactgggcacggcacccaagagcaggaagtgtatcaagtcccacccagcgttcaacggagcatcgggggcacgtccggtccacatgtgggaaagaaggtgtttcagagagatgggcaggtgtcctattttctggtgcgggcctcaaagcaaactagcctgtag

SEQ ID NO: 257592 - DNA, 525 bp, Artificial Sequence
  derived and/or modified sequence
atgaagtacaagaacctgatggcccgggccctgtatgacaacgtgcctgaatgtgccgaggagctggccttcaggaagggggacatcctgactgtgattgagcagaacacaggaggcctggagggctggtggctgtgcagcctgcacggccggcagggcatcgtgcccggcaacagagtgaagctgctgattggccccatgcaggagacagccagcagccatgagcagcctgccagcggcctgatgcagcagaccttcggccagcagaagctgtaccaggtgcccaacccccaggccgccccccgggacaccatctaccaggtgcccccatcctaccagaaccagggcatctaccaggtgcccaccggccacggcacccaggagcaggaggtgtaccaggtgcccccatctgtgcagaggagcatcggcggcaccagcggcccccacgtgggcaagaaggtgttccagagagatggccaggtgtcctacttcctggtgcgggccagcaagcagaccagcctgtag

SEQ ID NO: 257593 - DNA, 525 bp, Artificial Sequence
  derived and/or modified sequence
atgaagtacaagaacctgatggcccgggccctgtacgacaacgtgcctgagtgcgcggaagagctcgccttccggaagggcgatattctgaccgtcatagaacagaataccggtggccttgaggggtggtggctgtgctcacttcacggacggcaaggcatcgtgcctgggaatagagtcaaactgctcatcgggcctatgcaggaaaccgcttccagccacgaacagccagcgtccggcctcatgcaacaaactttcggacaacagaaactctaccaggtccctaaccctcaggccgcaccccgcgacaccatttaccaggtgccaccttcttaccaaaatcagggtatctaccaggttcctaccgggcacggcacacaagagcaagaggtttaccaggttccaccctctgtgcagaggtccatcggaggcacgagcggtccgcatgtgggcaagaaagtatttcagagggacggtcaggtaagttatttccttgtgagggcatcaaaacaaacgtctctatag

SEQ ID NO: 257594 - DNA, 3341 bp, Artificial Sequence
  derived and/or modified sequence
gggaggcgctgcgactgacaagcggctctgcccgggaccttctcgctttcatctagcgctgcactcaatggaggggcgggcaccgcagtgcttaatgctgtcttaactagtgtaggaaaacggctcaacccaccgctgccgaaatgaagtataagaatcttatggcaagggccttatatgacaatgtcccagagtgtgccgaggaactggcctttcgcaagggagacatcctgaccgtcatagagcagaacacagggggactggaaggatggtggctgtgctcattacacggtcggcaaggcattgtcccaggcaaccgggtgaagcttctgattggtcccatgcaggagactgcctccagtcacgagcagcctgcctctggactgatgcagcagacctttggccaacagaagctctatcaagtgccaaacccacaggctgctccccgagacaccatctaccaagtgccaccttcctaccaaaatcagggaatttaccaagtccccactggccacggcacccaagaacaagaggtatatcaggtgccaccatcagtgcagagaagcattgggggaaccagtgggccccacgtgggtaaaaaggtgttccagagagatgggcaagtgtcctatttcttagtgagagcctctaaacaaaccagcttgtgaacctccactgaaaagatctcatctgatgagcattttaataaagtgtcctgagtttggaggcttgccgtctttctcttggataaatatcttcatctcctagacttggaaaaacacattttctcctggggtttcccattggcgtgtcttgagctgctctggtgataaccgtaataatgccaatactgatacgaacagcagaaaacagtaaccccaagaactctacagatgatcatcaaggaccactgtctcttaccatttgctgctttggtttgaaattctcactgcctcgtagatctcattttgagcactatacattcctaaagattgatttctttctatctgacttaaatttaggaatgattaaatcttcatttctcccatgatttgatcctaaaacattttgaaaggaaacagccttgagatctgtgattactaagacatacataacattcttatcacattagaaagcaagaattgactgttgcttgtcttgttcctgttgtcttgtcccctgaattcctgtttatctttgattgtatgtgggacattgtattttcagtacatttgtagaaataatgtgaagcctataaagatgttctctgcctccagagagaattttgtttccttctgccagcctcataggcaagcatacatctgattccatgctttgagctgttctggcaaccctgatgtcttcagcctgtgcaagggtgggtttacttccagttaatccttattttggatacagtccttagggttccaacccaaagtcgggggtggtttggggtccctgccttggtgagccctatagtccaatgttcccccttacccaaagaagctgtagaaaacccagcacagcctcccaggcaccagtttcagatcagcaaaaaatagcaaatgcccccaggcttgaaaagcaatctcacctctattaactcttctcccaaagtttgacctagtaattctttattatccttgaactcttgacactattaagaagatcttttcggctgggcgcagtggctcacgcctgtaatcccagcactttcggaggccgaggcgggcggatcacgaggtcaggagatcgagatcgtcctggctaacacggtaaaaccccgtctctactaaaaatacaaaaaattagctgggcacggtggcgggcgcagtgggcgggtgcctgtagtcccagctactcggaaggctgaggcaggagaatggcgtgaactcaggaggcggagcttgcggtgagccgagatctcaccactgcactccagcctgggcgacagagtaagactctgtctcaaaaaaaaaaaaaaaaaaaaaaaaaaaaaaaaaaaaaaaaagatctttcctagcttttcttcatttttttaagttgtcttcagcaagatggttaatctcaattacctagtccatgatttctggaagtcaaagtcaaaaggtaaaatctatatagcctaggtgacaattacaataacaataacaatagctaaggcttattatggctttatgccaggtactttatgcacttgatctcatttaatactcatatagcctatgagggaagtataatttccattttacctatgagaaaacaggcttagaatggaacctttgttctcatagcttgtgagtggtagaaccgggatttagatccagctctgcctgagtccagcttctgtttgtcaattacttccctcttcagacctaattcttccaataagcaacagaaaaagacccagtggggccatggcctctggcacacagcttctcataaacgagcctatcacacatccccagaactaaagcaatcgtatgttccttctgatgttgaggtaaaaagcagggtttgttttggtttcccttttccaaaacactcccccacatgtttctggcttgtggttaagaagaacccaggtgttcatgtcacatacgagctcaactggggaaaaggaaaccatccagcagccctccttgcctgccaatagtggcttcacccaacttggggtgcattcttctacagtttctgatttctcaacttcacctaacattcccttgccttcttggatccctctcttgcccaacactaccatgcatggctgatagggcactgttctgccccatatcccatgggttctacttaacccagagctggcttacctggaaaccaagcttattctgtagtggcagacctcacgccatcttgcttaatagccttcagttttcctttagttgattaatgtatcactcaatagattatgcaagacctactctgctaggcactgtactaggccctgtggtttatatttaaatgaagagggaatgatctctgactttaaaatgctggaagaagagatgagatgcatcaagaccgtcaaaccacaagtgataagtgctgtcagagatgtgtggatcactggctcagggagttccaaggatagagacatattatctgtttgggaagggcttggtgggggaaaggcattcagccgggccttgaaaatcaattaaagtttgaatatgaggaaagaaagaagagcatctcagacaaggacatggcatggatgaaggcacagaggtatgggcgtgcagggcatctgtggaaatggacagctcagttctcgccgagggagggagttggtgcagagcctgggggccctgccttcagaagat

SEQ ID NO: 257595 - DNA, 525 bp, Artificial Sequence
  derived and/or modified sequence
atgaagtataagaacttgatggccagggccctgtacgacaatgtgccagagtgcgctgaagaactagctttccggaagggtgatatcttaactgttatcgaacaaaacactggcggtctggaaggatggtggctgtgctctctgcacggcaggcaggggattgtcccaggaaaccgggttaaattattaatcggaccaatgcaagaaaccgcctcgagtcatgagcagcctgcttctgggttaatgcagcaaacgttcgggcagcagaagctctatcaggtgcccaatcctcaggcagcaccaagggatacaatataccaggttcctccctcttatcagaaccagggaatttaccaggtacctactggtcatggcacccaggagcaggaagtgtaccaggttccgccatcagttcagcgatctataggcggaacaagcgggccacatgtggggaagaaagttttccaacgcgatggacaggtcagttattttttggtgagagccagcaaacagacatccttgtag

SEQ ID NO: 257596 - DNA, 525 bp, Artificial Sequence
  derived and/or modified sequence
atgaagtacaagaacctgatggccagagccctgtacgacaacgtgcccgagtgcgccgaggagctggccttcagaaagggcgacatcctgaccgtgatcgagcagaacaccggcggcctggagggctggtggctgtgcagcctgcacggcagacagggcatcgtgcccggcaacagagtgaagctgctgatcggccccatgcaggagaccgccagcagccacgagcagcccgccagcggcctgatgcagcagaccttcggccagcagaagctgtaccaggtgcccaacccccaggccgcccccagagacaccatctaccaggtgccccccagctaccagaaccagggcatctaccaggtgcccaccggccacggcacccaggagcaggaggtgtaccaggtgccccccagcgtgcagagaagcatcggcggcaccagcggcccccacgtgggcaagaaggtgttccagagagacggccaggtgagctacttcctggtgagagccagcaagcagaccagcctgtag

SEQ ID NO: 257597 - protein, 792 aa, Artificial Sequence
  derived and/or modified sequence
MAFSGIYKLDDGKPYLNNCFPARNLLRVPEEGQGHWLVVQKGNLKKKPKGLVGAQAERRESLKATSFEFKGKKESRRENQVDLPGHILDQAFLLKHHCVRKPSDLCTINAKENDFKHFHSVIYINASENLLPLEAFHTFPALKELDLAFNGIKTIYVKYGDFKLLEFLDLSFNSLTVEAICDLGILPHLRVLLLTGNGLTSLPPNLAVAEQEASVTSLTSKRYILRFPALETLMLDDNRLSNPSCFASLAGLRRLKKLSLDENRIIRIPYLQQVQLYDESVDWNGGRGSPHKEPQFMLQSKPRMLEDSDEQLDYTVLPMKKDVDRTEVVFSSYPGFSTSETTKICSLPPIFEILPVKSLKARNQTLAPPFPELRYLSLAYNKIAKEDAVLPVALFPSLCEFVFHNNPLVAHTRGVPPLLKSFLQERLGIHLIRRKIVKPKHHVLMSRKESWKVKSEIPKVPKQPLVLHHPRMTTTKSPSKDMLEPEAELAEDLPTTKSTSVESEMPTENLEGHSPSCRTFVPLPPICSNSTVHSEETLSHLSDTTVRLSPERPSDEDSKSTESIFLTQVSELPSSVIHKDDLELKEKDQKKPPTAPREVKGTRRKLPTAFLPSKYHGYEELLTAKPDPAFIEPKGIQKNAQALQQMLKHPLLCHSSKPKLDTLQKPYVHKEKRAQRIPIPPPKKTRAQLLDDIFIRLRDPRNITEAPLGAVLHQWTERRLVNHKQYLEAKRLLKEFQARYRQLVSGSLRTVFGTTPLPMACPALSESQPKFGHFLEFMDEFCQEPTASDSQG

SEQ ID NO: 257598 - protein, 778 aa, Artificial Sequence
  derived and/or modified sequence
MAFSGIYKLDDGKPYLNNCFPARNLLRVPEEGQGHWLVVQKGNLKKKPKGLVGAQAERRESLKATSFEFKGKKESRRENQVDLPGHILDQAFLLKHHCVRKPSDLCTINAKENDFKHFHSVIYINASENLLPLEAFHTFPALKELDLAFNGIKTIYVKYGDFKLLEFLDLSFNSLTVEAICDLGILPHLRVLLLTGNGLTSLPPNLAVAEQEASVTSLTSKRYILRFPALETLMLDDNRLSNPSCFASLAGLRRLKKLSLDENRIIRIPYLQQVQLYDESVDWNGGRGSPHKEPQFMLQSKPRMLEDSDEQLDYTVLPMKKDVDRTTTKICSLPPIFEILPVKSLKARNQTLAPPFPELRYLSLAYNKIAKEDAVLPVALFPSLCEFVFHNNPLVAHTRGVPPLLKSFLQERLGIHLIRRKIVKPKHHVLMSRKESWKVKSEIPKVPKQPLVLHHPRMTTTKSPSKDMLEPEAELAEDLPTTKSTSVESEMPTENLEGHSPSCRTFVPLPPICSNSTVHSEETLSHLSDTTVRLSPERPSDEDSKSTESIFLTQVSELPSSVIHKDDLELKEKDQKKPPTAPREVKGTRRKLPTAFLPSKYHGYEELLTAKPDPAFIEPKGIQKNAQALQQMLKHPLLCHSSKPKLDTLQKPYVHKEKRAQRIPIPPPKKTRAQLLDDIFIRLRDPRNITEAPLGAVLHQWTERRLVNHKQYLEAKRLLKEFQARYRQLVSGSLRTVFGTTPLPMACPALSESQPKFGHFLEFMDEFCQEPTASDSQG

SEQ ID NO: 257599 - DNA, 2379 bp, Artificial Sequence
  derived and/or modified sequence
atggccttcagcggcatctacaagctggacgacggcaagccctacctgaacaactgcttccccgccagaaacctgctgagagtgcccgaggagggccagggccactggctggtggtgcagaagggcaacctgaagaagaagcccaagggcctggtgggcgcccaggccgagagaagagagagcctgaaggccaccagcttcgagttcaagggcaagaaggagagcagaagagagaaccaggtggacctgcccggccacatcctggaccaggccttcctgctgaagcaccactgcgtgagaaagcccagcgacctgtgcaccatcaacgccaaggagaacgacttcaagcacttccacagcgtgatctacatcaacgccagcgagaacctgctgcccctggaggccttccacaccttccccgccctgaaggagctggacctggccttcaacggcatcaagaccatctacgtgaagtacggcgacttcaagctgctggagttcctggacctgagcttcaacagcctgaccgtggaggccatctgcgacctgggcatcctgccccacctgagagtgctgctgctgaccggcaacggcctgaccagcctgccccccaacctggccgtggccgagcaggaggccagcgtgaccagcctgaccagcaagagatacatcctgagattccccgccctggagaccctgatgctggacgacaacagactgagcaaccccagctgcttcgccagcctggccggcctgagaagactgaagaagctgagcctggacgagaacagaatcatcagaatcccctacctgcagcaggtgcagctgtacgacgagagcgtggactggaacggcggcagaggcagcccccacaaggagccccagttcatgctgcagagcaagcccagaatgctggaggacagcgacgagcagctggactacaccgtgctgcccatgaagaaggacgtggacagaaccgaggtggtgttcagcagctaccccggcttcagcaccagcgagaccaccaagatctgcagcctgccccccatcttcgagatcctgcccgtgaagagcctgaaggccagaaaccagaccctggccccccccttccccgagctgagatacctgagcctggcctacaacaagatcgccaaggaggacgccgtgctgcccgtggccctgttccccagcctgtgcgagttcgtgttccacaacaaccccctggtggcccacaccagaggcgtgccccccctgctgaagagcttcctgcaggagagactgggcatccacctgatcagaagaaagatcgtgaagcccaagcaccacgtgctgatgagcagaaaggagagctggaaggtgaagagcgagatccccaaggtgcccaagcagcccctggtgctgcaccaccccagaatgaccaccaccaagagccccagcaaggacatgctggagcccgaggccgagctggccgaggacctgcccaccaccaagagcaccagcgtggagagcgagatgcccaccgagaacctggagggccacagccccagctgcagaaccttcgtgcccctgccccccatctgcagcaacagcaccgtgcacagcgaggagaccctgagccacctgagcgacaccaccgtgagactgagccccgagagacccagcgacgaggacagcaagagcaccgagagcatcttcctgacccaggtgagcgagctgcccagcagcgtgatccacaaggacgacctggagctgaaggagaaggaccagaagaagccccccaccgcccccagagaggtgaagggcaccagaagaaagctgcccaccgccttcctgcccagcaagtaccacggctacgaggagctgctgaccgccaagcccgaccccgccttcatcgagcccaagggcatccagaagaacgcccaggccctgcagcagatgctgaagcaccccctgctgtgccacagcagcaagcccaagctggacaccctgcagaagccctacgtgcacaaggagaagagagcccagagaatccccatccccccccccaagaagaccagagcccagctgctggacgacatcttcatcagactgagagaccccagaaacatcaccgaggcccccctgggcgccgtgctgcaccagtggaccgagagaagactggtgaaccacaagcagtacctggaggccaagagactgctgaaggagttccaggccagatacagacagctggtgagcggcagcctgagaaccgtgttcggcaccacccccctgcccatggcctgccccgccctgagcgagagccagcccaagttcggccacttcctggagttcatggacgagttctgccaggagcccaccgccagcgacagccagggctag

SEQ ID NO: 257600 - DNA, 2337 bp, Artificial Sequence
  derived and/or modified sequence
atggccttcagcggcatctacaagctggacgacggcaagccctacctgaacaactgcttccccgccagaaacctgctgagagtgcccgaggagggccagggccactggctggtggtgcagaagggcaacctgaagaagaagcccaagggcctggtgggcgcccaggccgagagaagagagagcctgaaggccaccagcttcgagttcaagggcaagaaggagagcagaagagagaaccaggtggacctgcccggccacatcctggaccaggccttcctgctgaagcaccactgcgtgagaaagcccagcgacctgtgcaccatcaacgccaaggagaacgacttcaagcacttccacagcgtgatctacatcaacgccagcgagaacctgctgcccctggaggccttccacaccttccccgccctgaaggagctggacctggccttcaacggcatcaagaccatctacgtgaagtacggcgacttcaagctgctggagttcctggacctgagcttcaacagcctgaccgtggaggccatctgcgacctgggcatcctgccccacctgagagtgctgctgctgaccggcaacggcctgaccagcctgccccccaacctggccgtggccgagcaggaggccagcgtgaccagcctgaccagcaagagatacatcctgagattccccgccctggagaccctgatgctggacgacaacagactgagcaaccccagctgcttcgccagcctggccggcctgagaagactgaagaagctgagcctggacgagaacagaatcatcagaatcccctacctgcagcaggtgcagctgtacgacgagagcgtggactggaacggcggcagaggcagcccccacaaggagccccagttcatgctgcagagcaagcccagaatgctggaggacagcgacgagcagctggactacaccgtgctgcccatgaagaaggacgtggacagaaccaccaccaagatctgcagcctgccccccatcttcgagatcctgcccgtgaagagcctgaaggccagaaaccagaccctggccccccccttccccgagctgagatacctgagcctggcctacaacaagatcgccaaggaggacgccgtgctgcccgtggccctgttccccagcctgtgcgagttcgtgttccacaacaaccccctggtggcccacaccagaggcgtgccccccctgctgaagagcttcctgcaggagagactgggcatccacctgatcagaagaaagatcgtgaagcccaagcaccacgtgctgatgagcagaaaggagagctggaaggtgaagagcgagatccccaaggtgcccaagcagcccctggtgctgcaccaccccagaatgaccaccaccaagagccccagcaaggacatgctggagcccgaggccgagctggccgaggacctgcccaccaccaagagcaccagcgtggagagcgagatgcccaccgagaacctggagggccacagccccagctgcagaaccttcgtgcccctgccccccatctgcagcaacagcaccgtgcacagcgaggagaccctgagccacctgagcgacaccaccgtgagactgagccccgagagacccagcgacgaggacagcaagagcaccgagagcatcttcctgacccaggtgagcgagctgcccagcagcgtgatccacaaggacgacctggagctgaaggagaaggaccagaagaagccccccaccgcccccagagaggtgaagggcaccagaagaaagctgcccaccgccttcctgcccagcaagtaccacggctacgaggagctgctgaccgccaagcccgaccccgccttcatcgagcccaagggcatccagaagaacgcccaggccctgcagcagatgctgaagcaccccctgctgtgccacagcagcaagcccaagctggacaccctgcagaagccctacgtgcacaaggagaagagagcccagagaatccccatccccccccccaagaagaccagagcccagctgctggacgacatcttcatcagactgagagaccccagaaacatcaccgaggcccccctgggcgccgtgctgcaccagtggaccgagagaagactggtgaaccacaagcagtacctggaggccaagagactgctgaaggagttccaggccagatacagacagctggtgagcggcagcctgagaaccgtgttcggcaccacccccctgcccatggcctgccccgccctgagcgagagccagcccaagttcggccacttcctggagttcatggacgagttctgccaggagcccaccgccagcgacagccagggctag

SEQ ID NO: 257601 - DNA, 2379 bp, Artificial Sequence
  derived and/or modified sequence
atggctttctcgggtatctacaaacttgacgacgggaaaccttacctgaacaattgtttccctgcccgaaacctcctgcgggtgcctgaggaaggtcagggacactggctggtcgtccagaaggggaacctcaaaaaaaagcccaagggcttggtgggcgctcaagcggagcgtagggagagtctgaaagccacatccttcgagttcaagggcaaaaaggaatcccgtagagagaaccaagttgacctccccggccacatcttagatcaggccttcctccttaagcaccactgcgtaagaaaaccctccgacctgtgtacaattaatgctaaggagaacgattttaaacatttccatagtgttatctacattaacgccagcgagaacctcctgccactcgaagcatttcacaccttccccgcactgaaggagttggatctcgccttcaacgggattaaaaccatctatgtaaagtatggggattttaagctcctggaatttctcgatctgagtttcaattcactgacagttgaagcgatctgtgatctcggcattctccctcacttaagagtgcttctgctgacagggaacggcctaacatctctgcctcccaacctagccgtggccgaacaggaggcgtcagtgacatccctgactagcaaacgctatatcctgcgttttccagctctggagacgctgatgttagacgacaacagactcagcaatccctcttgtttcgcctccttggccggcctgcgacggctgaaaaagcttagcctagacgaaaacaggatcattagaattccttatctgcagcaagtgcaactttacgatgagagcgtggactggaatgggggcagaggcagcccccacaaggaaccccagttcatgctgcaatccaaaccacggatgctggaagattcagacgagcaactcgactacacagtcctccccatgaagaaggacgtcgataggaccgaggtagtgtttagctcataccctggattctcaacgagcgagaccactaagatatgcagcctccctccgatctttgaaatcctcccagtgaagtctcttaaagcccgcaatcagacattggcacccccatttcctgaactccgctatctctccctggcatacaataagatagcaaaagaggacgcagtcctaccggttgccctgtttccatccctgtgcgagtttgtcttccataataatcctctggtggctcacacgcgtggcgttccccctttgttaaaatccttccttcaggaacggctggggatccatctgatccgaagaaaaatagtaaaacccaaacaccacgttctgatgagtcgaaaggagtcctggaaagttaagtccgagattccaaaagtgcccaagcagcccttggttttgcaccaccctaggatgaccactacaaagagcccctctaaggacatgctggaacctgaagccgaactagccgaagacttacccaccactaaaagtacaagcgttgaatcagagatgcccaccgaaaatttagagggccatagcccctcttgcaggacatttgtaccgttaccaccaatttgttcaaattccaccgttcactccgaggagacactttcacacctgtcagatactacagttcgcttgagccccgaacggcctagcgacgaggacagcaaatcaacggagtcaatctttctcacacaggtttccgagttgccgtcatctgttatccacaaggacgatctcgaacttaaagaaaaagaccagaaaaagcctcccacagctcccagggaagtgaaagggacaagacggaaactgcctactgccttcctccctagcaaataccacggctacgaggaattgctcaccgccaaaccggaccccgccttcatcgagccgaagggcattcagaagaatgcacaggccttgcagcagatgctgaagcatccattgctatgtcactcttccaagccaaagctcgatacccttcagaaaccctatgtacacaaggagaagagggcccagagaatacccatcccacccccaaagaagacacgggcacagctcctggacgatattttcatcaggctgcgcgatcctcgcaacatcactgaggctcctctaggagctgtactgcaccagtggactgagagacgcctcgtgaaccacaagcagtacttggaagccaagagacttttgaaggagttccaggcaaggtacagacagctggtctcaggtagcttgcggacagtcttcgggaccaccccactgcccatggcatgtcctgccctgtccgaatcacagcccaagtttggtcatttcctggagtttatggatgagttttgccaagaacctaccgcttccgacagtcagggttag

SEQ ID NO: 257602 - DNA, 2337 bp, Artificial Sequence
  derived and/or modified sequence
atggcgttcagtggcatttataaactcgacgatgggaagccctatctcaataattgtttccctgctaggaatctgctcagggtccctgaggaaggacagggccactggctcgtagtgcagaagggaaacttgaaaaagaagccaaaaggactagtgggcgcgcaagctgagcgaagagagtcacttaaggctacgtcgtttgaatttaaggggaagaaggaaagcagacgcgaaaatcaggtggatctgccgggacatattctggaccaggcattcctgctgaaacaccactgtgtaagaaagcccagtgacctctgcacgataaacgccaaggaaaatgacttcaagcactttcacagcgttatttacatcaatgcctctgaaaatttacttccactcgaggctttccatactttccccgccctgaaagagttggacttggccttcaatggcattaagacaatctacgttaaatacggtgactttaagttattggaattcctggatctgtcctttaatagcttgacagtcgaagcgatttgtgatctcgggatccttccgcacctccgcgtattgctactcaccggaaacggcctcacatctctgcctccaaatctggcggtcgccgaacaggaggcctcggtaacgagcctgaccagtaagcgatatattctcaggtttcctgctttagaaactctgatgctggatgataatcgcctaagcaacccctcctgctttgctagtctagcgggactgcgccgactcaagaaactctctctggatgagaacaggatcatccgaattccctatctgcagcaggttcagttgtacgacgagagcgtagattggaacggcgggaggggcagcccacacaaggagcctcagttcatgctccagtccaagccgaggatgttggaggactccgatgagcagttagattataccgttctgcctatgaagaaagacgtcgatcgtaccacaacaaagatctgtagcctgccccctatattcgagatcctgcctgtgaagtctctgaaggctagaaaccagacattggcaccgcctttccctgaactgagatatttgagtttagcatacaataagatagctaaagaagacgcagtgctcccagttgccttgtttcctagtctgtgtgaattcgtttttcacaacaatccactggtagcccacacaaggggcgtccctcccctgctgaaaagctttctacaagagaggctggggatccatcttataaggcggaagatcgtcaagccaaagcaccacgtgctgatgtccaggaaagagtcgtggaaagtgaaaagtgagattcccaaggtccccaagcagccactggtgctccaccaccctagaatgactacaaccaaaagcccgagtaaggacatgctcgaacctgaggctgaacttgcagaggatttgcccacgacgaagagcactagcgtggagtcagagatgccaactgaaaatctcgaaggccactctcccagctgtcgaacttttgtaccactgcccccaatatgttccaactccacagtacactccgaggaaaccctcagccacctcagtgacaccaccgtgaggttatctcctgaacgtccctctgacgaggattccaagagcaccgagtctattttcctgactcaggttagtgagttgccaagtagtgtcatccacaaggacgatctggagcttaaggagaaagatcaaaagaaaccgcctacagcgcccagagaggtaaaaggaacaagaaggaagctgcctacggccttcttgcctagtaaatatcatggctacgaggaactcctgacagcaaaacctgatcctgctttcatcgagccaaaagggattcagaaaaacgcacaggcacttcagcagatgctcaagcatcctttactttgccatagcagcaaacctaaactggatacacttcaaaaaccctatgtacacaaggagaaaagagctcagcgaatcccaatccctccccctaaaaaaactcgggctcagctccttgacgacattttcatcagactgcgagatcctcgcaatattaccgaggcacccctcggagccgttctacaccaatggaccgaacgtcgactggtcaaccacaaacaatacttggaggcaaaacgtcttttgaaggagttccaagcaagataccgccaactagtgagtggctccctgaggactgtttttggaactactccgctacctatggcttgtcccgcattgagtgaatctcaaccgaagttcggccacttcctggagttcatggatgaattttgccaggagcccactgccagtgatagtcaaggctag

SEQ ID NO: 257603 - DNA, 2379 bp, Artificial Sequence
  derived and/or modified sequence
atggccttcagcggcatctacaagctggatgatggcaagccctacctgaacaactgcttccctgccaggaacctgctgcgggtgcctgaggagggccagggccactggctggtggtgcagaagggcaacctgaagaagaagcccaagggcctggtgggcgcccaggccgagcggcgggagagcctgaaggccaccagctttgagttcaagggcaagaaggagagccggcgggagaaccaggtggacctgcccggccacatcctggaccaggccttcctgctgaagcaccactgtgtgaggaagcccagcgacctgtgcaccatcaatgccaaggaaaatgacttcaagcacttccacagcgtcatctacatcaatgccagcgagaacctgctgcccctggaggccttccacaccttccctgccctgaaggagctggacctggccttcaacggcatcaagaccatctacgtgaagtatggagacttcaagctgctggagttcctggacctgtccttcaacagcctgactgtggaggccatctgtgacctgggcatcctgccccacctgcgggtgctgctgctgactggaaatggcctgaccagcctgccccccaacctggccgtggccgagcaggaggcctctgtgaccagcctgaccagcaagcgctacatcctgcgcttccctgccctggagaccctgatgctggatgacaaccggctgagcaaccccagctgctttgccagcctggccggcctgcggcggctgaagaagctgagcctggatgagaaccgcatcatccgcatcccctacctgcagcaggtgcagctgtatgatgagagcgtggactggaatggaggccggggcagcccccacaaggagccccagttcatgctgcagagcaagcccaggatgctggaggacagtgatgagcagctggactacacagtgctgcccatgaagaaggatgtggacagaacagaggtggtgttcagcagctacccaggcttcagcaccagcgagaccaccaagatctgcagcctgccccccatctttgagatcctgcctgtgaagagcctgaaggccaggaaccagaccctggccccacccttccctgagctgcgctacctgagcctggcctacaacaagatcgccaaggaggatgctgtgctgcctgtggccctcttccccagcctgtgtgaatttgtgttccacaacaaccccctggtggcccacacccggggcgtgccccccctgctgaagagcttcctgcaggagcggctgggcatccacctgatccggaggaagatcgtgaagcccaagcaccacgtgctgatgagcaggaaggagagctggaaggtgaagtctgagatccccaaggtgcccaagcagcccctggtgctgcaccaccccaggatgaccaccaccaagagccccagcaaggacatgctggagcctgaggccgagctggccgaggacctgcccaccaccaagagcacctctgtggagagcgagatgcccacagagaacctggagggccacagccccagctgcaggacctttgtgcccctgccccccatctgcagcaacagcacagtgcacagcgaggagaccctgagccacctgagtgacaccaccgtgcggctgagccctgagcggcccagtgatgaggacagcaagagcacagagagcatcttcctgacccaggtgtctgagctgcccagcagcgtcatccacaaggatgacctggagctgaaggagaaggaccagaagaagccacccacagccccccgggaggtgaagggcaccaggaggaagctgcccacagccttcctgcccagcaagtaccacggctatgaggagctgctgacagccaagccagaccctgccttcatcgagcccaagggcatccagaagaatgcccaggccctgcagcagatgctgaagcaccccctgctgtgccacagcagcaagcccaagctggacaccctgcagaagccctacgtgcacaaggagaagagggcccagaggatccccatccccccacccaagaagacccgggcccagctgctggatgacatcttcatccggctgcgggaccccaggaacatcacagaggcccccctgggcgctgtgctgcaccagtggacagagcggcggctggtgaaccacaagcagtacctggaggccaagaggctgctgaaggagttccaggcccgctaccggcagctggtgtctggcagcctgaggacagtgtttggcaccacccccctgcccatggcctgcccagccctgtctgagagccagcccaagtttggccacttcctggagttcatggatgagttctgccaggagcccacagccagtgacagccagggctag

SEQ ID NO: 257604 - DNA, 2337 bp, Artificial Sequence
  derived and/or modified sequence
atggccttcagcggcatctacaagctggatgatggcaagccctacctgaacaactgcttccctgccaggaacctgctgcgggtgcctgaggagggccagggccactggctggtggtgcagaagggcaacctgaagaagaagcccaagggcctggtgggcgcccaggccgagcggcgggagagcctgaaggccaccagctttgagttcaagggcaagaaggagagccggcgggagaaccaggtggacctgcccggccacatcctggaccaggccttcctgctgaagcaccactgtgtgaggaagcccagcgacctgtgcaccatcaatgccaaggaaaatgacttcaagcacttccacagcgtcatctacatcaatgccagcgagaacctgctgcccctggaggccttccacaccttccctgccctgaaggagctggacctggccttcaacggcatcaagaccatctacgtgaagtatggagacttcaagctgctggagttcctggacctgtccttcaacagcctgactgtggaggccatctgtgacctgggcatcctgccccacctgcgggtgctgctgctgactggaaatggcctgaccagcctgccccccaacctggccgtggccgagcaggaggcctctgtgaccagcctgaccagcaagcgctacatcctgcgcttccctgccctggagaccctgatgctggatgacaaccggctgagcaaccccagctgctttgccagcctggccggcctgcggcggctgaagaagctgagcctggatgagaaccgcatcatccgcatcccctacctgcagcaggtgcagctgtatgatgagagcgtggactggaatggaggccggggcagcccccacaaggagccccagttcatgctgcagagcaagcccaggatgctggaggacagtgatgagcagctggactacacagtgctgcccatgaagaaggatgtggacaggaccaccaccaagatctgcagcctgccccccatctttgagatcctgcctgtgaagagcctgaaggccaggaaccagaccctggccccacccttccctgagctgcgctacctgagcctggcctacaacaagatcgccaaggaggatgctgtgctgcctgtggccctcttccccagcctgtgtgaatttgtgttccacaacaaccccctggtggcccacacccggggcgtgccccccctgctgaagagcttcctgcaggagcggctgggcatccacctgatccggaggaagatcgtgaagcccaagcaccacgtgctgatgagcaggaaggagagctggaaggtgaagtctgagatccccaaggtgcccaagcagcccctggtgctgcaccaccccaggatgaccaccaccaagagccccagcaaggacatgctggagcctgaggccgagctggccgaggacctgcccaccaccaagagcacctctgtggagagcgagatgcccacagagaacctggagggccacagccccagctgcaggacctttgtgcccctgccccccatctgcagcaacagcacagtgcacagcgaggagaccctgagccacctgagtgacaccaccgtgcggctgagccctgagcggcccagtgatgaggacagcaagagcacagagagcatcttcctgacccaggtgtctgagctgcccagcagcgtcatccacaaggatgacctggagctgaaggagaaggaccagaagaagccacccacagccccccgggaggtgaagggcaccaggaggaagctgcccacagccttcctgcccagcaagtaccacggctatgaggagctgctgacagccaagccagaccctgccttcatcgagcccaagggcatccagaagaatgcccaggccctgcagcagatgctgaagcaccccctgctgtgccacagcagcaagcccaagctggacaccctgcagaagccctacgtgcacaaggagaagagggcccagaggatccccatccccccacccaagaagacccgggcccagctgctggatgacatcttcatccggctgcgggaccccaggaacatcacagaggcccccctgggcgctgtgctgcaccagtggacagagcggcggctggtgaaccacaagcagtacctggaggccaagaggctgctgaaggagttccaggcccgctaccggcagctggtgtctggcagcctgaggacagtgtttggcaccacccccctgcccatggcctgcccagccctgtctgagagccagcccaagtttggccacttcctggagttcatggatgagttctgccaggagcccacagccagtgacagccagggctag

SEQ ID NO: 257605 - DNA, 2379 bp, Artificial Sequence
  derived and/or modified sequence
atggccttcagcggcatctacaagctggacgacggcaagccctacctgaacaactgttttcccgcccgaaacctgttaagggttccagaggaggggcaggggcactggctggtggtgcagaaaggcaatctcaagaagaagcctaaaggcctcgttggtgcccaggccgaaaggcgtgagtctcttaaagctaccagtttcgaattcaagggaaaaaaagaatcaaggagagaaaatcaggttgatctgcccggacacattttggatcaagcctttctgctcaagcatcactgcgtcaggaagcctagtgacctctgtaccatcaatgcaaaggaaaatgacttcaagcacttccactccgttatatatataaatgctagcgaaaacctgttgcccttagaagcatttcatacgttcccagccctgaaggaactagacctggcattcaacggcatcaaaactatctacgttaagtacggagacttcaagcttttggagtttctagatctttcgttcaatagtcttactgttgaggccatatgcgacctcggaatccttcctcatcttagggttttgctgctaacgggcaatgggttgactagcctccctcccaatctggcagtagctgaacaggaggctagcgtgacgtctttaacatctaaacgatacattttaaggttcccggctcttgaaactctgatgctcgacgacaatcggcttagtaacccctcttgtttcgcttccctggctggcttaagacgcctcaagaaactgagcctggacgaaaataggatcatacgtatcccctatctgcaacaagttcagctatacgatgaatccgtcgactggaatggcggccgcggctctccccacaaagaaccccaattcatgcttcagtctaagccacgaatgttggaagacagtgacgaacagctcgactacacagtgctcccaatgaagaaagatgtcgatcgcactgaggtagtgttttcttcatatccagggtttagtacaagtgagacaaccaaaatctgcagcttgccaccaatttttgagatactccccgtaaagtccctcaaggctagaaaccagaccctggccccacctttcccggagctgagatatttgtccctggcttataacaagatagcaaaagaagacgccgtcctgccagttgctctgtttcccagcctgtgtgagtttgtcttccataacaatcctttagtggcacacacaaggggtgtgcctcccctactgaagtctttcctgcaggaaaggttggggatccatttgataaggagaaagatcgtcaaacctaaacatcacgtgctcatgtccaggaaagagtcttggaaggtgaaatctgagattccgaaggtgccaaaacagccacttgttctgcaccatccacgcatgactactacgaagagtccttccaaagacatgctggagcctgaagctgagctggccgaggatcttccgaccactaagagcacctctgttgaaagtgaaatgccgacagagaacctggagggtcattcgccatcttgccggacatttgtcccacttccaccaatttgtagtaacagcaccgtgcattcggaagagactttgtctcacttaagtgacacaaccgtgaggttatcccctgaacgcccaagtgatgaggattcaaaaagcaccgaaagcatcttcctgacccaggtgtccgagcttcctagttccgtcatacacaaggatgacctggagctgaaagaaaaggaccagaagaaaccccccacagctccgagagaggtgaaaggcactcgcagaaagctgcccactgccttcttgcccagcaaataccacggatacgaggagttacttactgccaagcccgatcctgcctttatcgagcctaaagggattcagaagaatgcacaggctctgcagcaaatgctgaaacatccactgctttgtcactctagtaaacctaagcttgacaccctgcagaagccttacgttcataaggaaaagagggctcaacgaatacccatccctccccccaaaaaaacccgcgctcaactgctggacgacatctttattcgcctgcgagatcctaggaacatcaccgaagcgcccctaggagcagtcctccaccagtggacagaacgcaggcttgtgaatcataaacagtatctggaggctaaacggctcctaaaagagtttcaagctaggtatcgccagctggtctcgggcagtttaagaacggtttttggtaccacgccactaccaatggcttgtccggcgctcagcgagagtcagccaaagtttggacactttttagaattcatggatgaattctgccaagagcctactgcgagcgacagccagggatag

SEQ ID NO: 257606 - DNA, 2337 bp, Artificial Sequence
  derived and/or modified sequence
atggccttcagcggcatctacaagctggacgacggcaagccctacttaaataattgtttcccggctaggaacctcctccgtgtaccggaagagggacaggggcactggttagtggtccaaaaggggaacctgaaaaagaagcctaaaggattagtgggcgcacaggccgagcgtcgcgaaagtctgaaagccacatccttcgagttcaagggaaagaaggagagccgacgggagaaccaagtcgatctgcccgggcacattctggaccaggcctttctgctgaagcaccattgtgtgcggaaacccagcgacctctgcacaatcaacgcaaaggaaaatgatttcaagcattttcacagcgtgatttatattaacgcatcggagaatctgctccctttagaagccttccacacctttccagctctgaaggagctcgatcttgcttttaacggcattaagactatctatgtgaaatacggagactttaagctcctggagtttctggacttatcctttaacagcctcaccgtggaagcaatctgtgacctgggtatccttccccacctccgggtgctgcttctcactggaaacggtctaacaagcctcccccctaatctggccgtggccgaacaagaagcctctgtgactagtctaacttcaaagagatatatcttgcggttcccagccctggagacactgatgctggacgataacagactctcaaatcctagctgtttcgcttcattggctggacttcgtaggctcaagaagttatctttggacgagaaccgtattatccggatcccatatctgcaacaggtccaactgtatgatgagtccgtagattggaacgggggacggggatccccacacaaggagccccagtttatgttacagagcaaaccgcgtatgcttgaggactctgacgagcagttggactacactgtgttgcctatgaaaaaggacgtcgaccgcaccactaccaaaatttgctctctgccacccatctttgaaatcctgcctgtgaaatcgctaaaggctcggaaccagacactggctccacccttccctgaacttcggtacctgtccctggcgtataataaaattgcaaaagaagacgccgtccttcccgtcgcgctgttccccagcctgtgcgaatttgtgttccacaacaaccccttggtcgcgcatacacggggtgtgccaccgctgctgaagagcttcctgcaggagaggctggggatacatctgattaggcgtaaaatcgtgaaacccaagcatcacgtactcatgtccagaaaggagtcctggaaggtgaagagtgaaattcctaaagtcccaaagcagccactggtgctgcatcatcctcggatgaccaccaccaagagcccttcgaaagacatgctcgagccggaagcagaattggcggaggaccttccgactacaaaatcaacatccgttgagtccgaaatgccaacggagaatcttgaaggacattctccgtcctgtcgcacatttgtccccctccctccaatatgtagcaattccacggttcattctgaggaaaccctatctcatctgtccgacaccacagtcaggctcagccctgagaggccttccgacgaggattccaagtcaacagaatcgatcttcctgacccaggtgagcgagctcccttcaagcgtgattcacaaggacgatctggaactgaaggagaaggaccagaaaaagcctcccactgcgcctagggaggtgaaaggcacaagaagaaagttgcctacagcattcctcccctccaagtaccatgggtacgaggaactgttgactgctaaacccgaccccgcttttattgagccaaaaggtattcagaagaacgcacaggccctgcagcagatgctcaaacatccactactgtgtcatagcagcaagcccaagcttgacactttacagaagccctatgtacacaaggagaagagagcgcaacgcatccctatccctccccctaaaaagactcgggctcagttgttggatgacatcttcataagactacgcgaccctaggaatatcactgaggcgcccctgggagccgtgctccaccagtggacagagcgtcgactggtaaatcataagcaatacttggaagcaaagcggttactaaaggaatttcaggcgaggtacagacagctggtgtccggtagccttcggactgtctttggcaccacccctctccctatggcctgccctgcgctctccgaaagccagccaaagttcgggcattttttagagtttatggacgagttttgtcaagaacccacagcaagtgattcgcagggctag

SEQ ID NO: 257607 - DNA, 2379 bp, Artificial Sequence
  derived and/or modified sequence
atggcctttagcggaatttataaactagacgacggtaagccatacctgaacaactgttttccagctcgtaacctcctgagggtccctgaagagggccaagggcactggcttgtagtccagaaggggaacctgaagaagaaacccaagggcctagtgggagctcaggccgagaggcgggagtcactgaaagccaccagctttgaattcaaaggcaagaaagagtcccgacgggaaaaccaagttgacctgcccggacacatactcgatcaggcctttctactgaagcatcactgtgtgagaaaaccaagcgatctctgcactatcaatgccaaggagaatgatttcaagcatttccactccgttatctacatcaacgcatccgagaacctccttccactggaggcattccatacttttccagctctaaaggaactggacctcgcctttaacgggatcaaaacaatatacgtgaaatacggtgactttaagctattggaatttttagatctgtcattcaacagcctgaccgttgaggcaatctgcgatctggggatcctgccccacctgagggtcctgctgctgacggggaatggcctgacttcattgcctcccaatctggcagtagccgagcaggaagcatccgtgacctcactcactagcaaacgatacatcctgcggttccctgcacttgagacattgatgctggatgacaatcgactctctaacccttcttgctttgctagcctggcaggcctgcggaggctgaagaagctgagtctggacgagaatcgcatcatcaggatcccgtacctgcaacaggtccagctgtacgatgaatctgttgattggaacggcggtcggggttctcctcacaaagagccccagttcatgcttcagtccaaacccagaatgctcgaggactctgacgagcagcttgattatactgtgttgccgatgaagaaggatgttgacaggacagaggtggtcttttcctcgtaccccggtttcagcaccagcgaaaccaccaagatatgcagcctgcctccaatatttgaaattttaccagtcaaaagcctgaaggcacgcaatcaaacgctggccccacctttcccagagctgcgttatctgagcctcgcgtacaacaagatcgcaaaggaggacgccgtgttgcccgtggctctgtttccttccctttgcgaatttgtattccacaataacccactcgtggcccacacacgcggagtccctccactgctgaagtcattcttgcaggaacggctcggcatccatctgattcggaggaagatagtgaagccgaagcaccatgtgttaatgagtcggaaggagagctggaaagtgaagtctgagatccctaaagttccaaagcagcccctagtgctgcatcatccgagaatgactaccacaaagtcgccctctaaagatatgttggaacccgaagcagaacttgccgaggatcttcccactaccaaatccaccagtgtggagagtgaaatgcccaccgaaaatttggagggccactctcctagttgtcgaacattcgtgccactgcctcccatatgctccaattcaaccgttcacagcgaggaaactctttcacatctgtctgataccacagtgaggctgtcccctgaacggcctagcgatgaagatagtaaaagcacggaaagcatttttctgactcaggtatctgagcttccctcatccgttatccacaaagatgatcttgagctaaaagaaaaagaccaaaaaaagccacctaccgctcccagggaggtgaagggaacacgacggaagctgcccactgcatttctgccatcaaaatatcatggctacgaagaactgctcacagccaagccggatcccgcatttatcgaacctaaagggattcagaagaacgcacaggctctgcagcaaatgcttaagcacccgctcttatgtcatagctctaaacccaaacttgacacactccagaaaccctatgtccacaaagaaaaacgggctcaacgcataccaatcccacctccaaaaaagacacgtgctcagttgttggatgacatatttatccgcctcagggaccccagaaatattaccgaggcccctttgggagctgtgctgcaccagtggaccgagagaaggcttgtaaatcacaagcagtatcttgaggcaaaaaggttgctcaaggagtttcaggcgcgataccggcagctggttagcggtagccttcggactgtcttcggcaccactcccttacccatggcttgtcccgctctttccgagtcgcagcctaaattcggccatttcctggaattcatggatgagttctgccaggaacctaccgcctccgatagccagggctag

SEQ ID NO: 257608 - DNA, 2337 bp, Artificial Sequence
  derived and/or modified sequence
atggccttttccggaatctacaaactcgacgacggcaagccataccttaataactgcttcccagcaaggaatttgctcagggtcccagaggaggggcaaggtcactggctcgtggtacagaaaggtaacttgaaaaagaaaccaaagggcctggtgggcgcacaggcggaaaggcgcgaatcactaaaggctactagtttcgagttcaaaggcaaaaaggaaagcagacgagagaaccaagtggacctccccggacacattttggaccaggctttcctcctcaagcaccactgcgttcggaaaccgtcagacctttgtaccattaatgccaaggagaacgattttaaacacttccactctgtaatctacatcaacgctagcgagaaccttctgcctctggaagcattccatactttccctgcattaaaggagctcgatctcgcctttaacggaatcaagaccatctacgttaaatatggggatttcaagctcctggaatttcttgatcttagttttaactcgctgacagttgaggcaatctgcgacctgggaatcctgcctcatctccgagtgctattgttaacagggaatggactgacatcgctccccccaaatttggcggttgcagaacaggaagcatctgtgacctccctgacctccaagcgctacatcctgaggttcccagctctggaaaccctcatgctcgatgacaacagactatctaaccctagttgtttcgcgtcattagccggtctccgtagactgaaaaaactgtccctggatgagaacagaataattcgaattccttaccttcagcaggttcagctgtacgatgagtccgtcgattggaatggcggaaggggaagcccacacaaggagccacagttcatgctgcagtcaaagccgcgtatgctggaggacagcgacgaacagctggactacacagtcttgcccatgaaaaaggatgtagatcgcaccaccactaaaatctgctcactgccgccaatcttcgagattcttccagtgaagagcctgaaggccagaaatcagacattagcccctccatttcccgagctgaggtacctgtcattggcatacaataaaatcgccaaagaagatgccgtccttcccgtggctttgttcccctcattgtgcgagttcgttttccacaacaaccccctggtggcccatacccgcggtgtgccaccactgctgaaatcattcctgcaggaacggcttggcatccacctaatccgaagaaagatagtgaaacctaaacatcatgtgctgatgtctcggaaagaatcatggaaagtgaagagtgaaatccctaaggtgcctaagcagccactggtacttcatcaccctcgaatgacgactacaaaatccccgagtaaagatatgcttgagcctgaggcagagttggcagaggacctgcctaccactaaatctaccagcgtcgaatccgaaatgcccactgaaaatctggaaggacactctccaagctgccgcacgtttgtgcctttaccacctatctgcagtaacagtacagtgcactcagaggaaaccctgtcacacctgtccgacacaacagtgagactgagccccgaacgccctagtgacgaggattctaaaagcacagagagcattttcctaacgcaggtcagtgaactgccaagcagcgttatccataaggacgatctcgagctgaaggagaaagaccagaagaaaccccctacagcacctagagaggtaaaggggacccggaggaaacttccaactgctttcctgccatccaaataccacggttacgaggagctgttgaccgcaaagccagatccagcttttattgagccgaagggtatccagaagaatgctcaagcactccaacaaatgctcaagcaccctcttctatgtcacagcagcaagccaaagctcgacaccctccagaaaccatatgtccacaaagaaaaaagggcccagaggatacctattcctccaccaaagaaaactcgagcgcagttgttggatgatatctttattcgccttagagaccctagaaatataactgaggctcctcttggcgctgttctgcaccagtggacggagcgcagactggtgaaccataagcagtatctagaggctaagcgcctgctaaaggaattccaagcacgatataggcagctggtcagtggctcactccggaccgttttcggaaccacgccactgccgatggcctgtcctgccctgtcagaatctcagcctaagttcgggcactttttggaattcatggatgagttttgtcaggagcctacggcctccgattcccaaggttag

SEQ ID NO: 257609 - DNA, 5681 bp, Artificial Sequence
  derived and/or modified sequence
agtttgggtcttgctggcgcgaggtagtcagaggacgtggccgcggggcttgctgggacttgaggttagacgtcccggccgtcggttgccgcctacactgtctgccgtcgcgtcgcagttactaaggcgtggggaagatagcggcaggcaccgcagtggagcggctccgagatccccggggggctcgcaggcgcgcatccctcctgactgggacgtcgcctccgcagacccctcggaggctgaagcgacgccggaggcaggcaaagaaacaagtgaagaaacaaaaaaaaaaggaagttaaggggccattcccaaagtcaaagatcaaggagatggccttctcaggaatctacaagctggatgatgggaagccttacctgaacaactgcttcccagccagaaatctgcttcgcgtgccggaggaaggccaaggacactggttagtggttcagaaaggtaacctcaagaagaagcccaagggtttggttggagcacaagctgaacgtcgggaaagcctgaaggcgacttcttttgagttcaaggggaagaaagagtctcggcgggaaaatcaggtggaccttcctggacatatcctggaccaggcttttctgctgaagcaccactgtgtgaggaagccatcagatctgtgcaccattaatgccaaggaaaatgacttcaagcattttcattctgtgatttatatcaatgcctcagaaaacctgctgcctctagaggcatttcacacgtttccagccctaaaggaactggatctcgcatttaatggcatcaaaactatctacgtgaaatatggagactttaagttattagaattcttggacctttccttcaacagcctgactgtggaggccatctgtgatttggggattctgccacacctccgtgtcctgctcctcacaggcaatggccttacctccctgccgcccaatttggccgtcgcagaacaggaggcatctgtaacatcgctgacaagcaagaggtacatcctgaggttcccagcgctggagacactgatgctggatgacaacagactctccaaccccagttgctttgccagcctggctgggctcaggagactgaagaagttaagcttggatgaaaacaggattatcaggatcccatacctacagcaagttcagctctatgacgagtcagtagactggaatggaggcaggggaagtccccataaagagccccaattcatgctgcagtccaagccaaggatgcttgaggactcagatgagcaactggattatactgtactgcccatgaaaaaggatgttgaccggacagaggttgtgttttcatcttaccctggattttcaacctcagagacaaccaagatatgttcacttcctcccatattcgagatccttcctgtgaagtcactgaaggccaggaaccagacgctggccccacccttcccagagctgagataccttagcctggcctacaacaagatcgcaaaagaggatgctgtcctaccagtagctctcttcccatctctctgcgagttcgtctttcataacaaccctctggtggcccatacacgaggggtccctccactgctgaagagcttcctccaggagcgactgggaatccacttaattcgaaggaagatagtaaagcctaagcatcatgttttgatgtctcggaaggaatcatggaaggtgaaaagcgaaatcccaaaggtgccgaagcagcctctggtgctccatcacccgcgcatgacgacaaccaagtctccctcaaaggatatgctagagccagaggcagagctggctgaagatctgcccactaccaaaagcacttctgtggagtcagagatgcccactgagaacctggaaggccattccccgtcttgccggaccttcgtgccactgcctcccatctgctccaactccactgtgcatagtgaagagaccctgtcccacctgagtgacacaactgtccgcctcagcccagagcgcccatcagatgaggactccaagagcacagagtccatcttcctgacccaggtgagtgaactgccttcctccgtcatccataaggatgatttagagttaaaggagaaagaccaaaagaaaccaccaacggcacccagagaggtgaaagggactcggaggaaactcccaactgccttccttcccagcaagtaccacggctatgaagaactgctgacagccaagcctgatccagccttcattgagccaaagggaatccagaagaatgcacaagccctgcaacaaatgctgaagcacccactcctgtgccactcctccaagcccaagctggacactcttcagaaaccctatgttcacaaagagaaacgggcccagagaatcccgattccacccccaaagaagactagagcccaacttctggatgacatcttcattcgcttgcgggatccccggaacattacagaggctccactaggtgctgtcctgcaccagtggacagaacggcggctggtgaaccacaagcagtacctggaggccaagaggctgttgaaggagttccaggcacgttaccggcagctggtgagtggctctctgcgcacagtgttcgggactaccccgctccccatggcctgcccagcgctgagtgagagccagcccaagttcggccacttcctcgagttcatggatgagttctgccaggagcccacagccagtgactcacaaggctagagctgtgcatgggggctgtgtgcaccacccggcctgtgccccagctctccccgagggctctgtgccctggaccgcacctcaaggttgaccagccggccacaggcctcagagctcagctgggccccacttgctggccacaaggtggcatccccttgtcaggatctcccctccttggcccaggcatgacctggtgcctggcccagcggcaataaagagtgggtgcacagggcaatagactgggtgccacatgcattctttcttggaacccaggccacagcagcattgtcacacttccctctaaaaatggttttccagttcagatgcaacagggatacatttgttctctgttgtatgagaaactgacaccaaggggatcttaacaaattcctgaacaatggctccaaaaaagggtatttttaaaaaccagatcttgtgagtacagccctaatgtgcagggacagtgtcatcctgtatattcgttctttactcagactctttcttggttccttcattaggagcatgaatggttgaatgtgaacatgacagtaaattggagcaaactgtaaactggacataacttatgccaaaagacgtagttgtacaccatggaaaccccatccctgctcctaatctctactgccattctgaatgccaaagcaagacatccaacatggggcatctcccagagcacatacagcaccaaaaatccacacacagcctaagcttaacccatgtttttgtctgagattgttcaccagagacaagactctgactataaacagaacatccactttcatgagtttcctttactgtattctcaacttgggccttgcttcaagcaggcaaacatacattgaagaatgcactttggtactgtttaaataacaacacatcagcccacttgattccatgccatgtccttgctgacagaaacatccccaacagggcatgccctggtccaagtcctctgtctttgtcaaaatgctcttctgatgagttggagaggaggcagccagcagtggcagtccacaaggatccaggtaccttctccaatcctaaagcagacagcaggttgaataaaaccaatacacaacctattttctaggcaggaggggaaaaggcccttaggacaataatatttgtacaaagagttgagagtaaacaaacagtgtatcaggttcaaaaaaaaaaaaactattcgttggcatttaaatttttttcccttgcatagtatctattctctcactaggacttttaagtgctctgctggaggctcagcgttggtaataccatgtttgatgcaaacttgaacccaatgctctcattggtggcacagctttggagggtggtggccccaagaaggggcaatctgcctgctgctatattaatctggaaccagggccaacagctactcttgaactatggtatttgaagagcgagttcattgcctgttttaccttaaatgacaggaaaggaagatgaacaaaccttgctttgccttggcttcaaactagttcttgatttaagacaccagaaagggagagagggagtctgcttagagtttgaggttgcctctcacaagatgacagttaaaagttgccaccttacttaaaaggcattaaggaggcatttactcacaaaggagagagagtaaatttttttcttaagaggaaaaaaatactgataatacatagaacaatctgcacatccagtcttggcactttttccaatttgactgatctctaaactggtgacccttgcatatatcttagtctcttttctacaatcttcttcagaaagctacagcagctaacaatcatgtataaagatgcatttcctagatcatcttcagaagaaaatctcttcagcactttccctagaatctgtctcctgaccaccccgccccagacctgctttctcttttgagaattcataaccaggtatgtttagataccagttcaaaagaccactctatgggttgatgaggaaaaggctgcctgaggacaatttaagaccataatgagtttccaatttttaaagaaaatttggctagctggcttttaattcttaattaaaatcattaaatttaattaaaattattccaatcaaaatatatcactttccaagattccacattcatattacttacttatactatggagactttctctacctgagcatgtattcaggggctataggtacatttaactctaactaactgaaaaaaatcaggaagaaaaaactattaaaataaaataacctcctaaatcatttgggggtatccccatcattggtgcgtgtgtctgcgtgtgtcaaactttaatgattatttattcagaccctggaaaaccacactataaaatagggcactggatcacaagttcgtttggttaaaaaaaaaaaaaaaaaaaagtgggggcggggggcagagaagaagtttaacttggatgatttccatgcccattccagctgtaacattctatgactgtgacccagcctttgttctcttttctcactctcctactagacatttcaatgaaaagttaggcaggaaaaaggaaaggaatcccaagttgctgccagctctgatgagagatcaggttgggggagagattaggtggttactgaattgaggtgtgggcctcccctgaccatgtcagtgatccacaacccacctcacttcttggggcttaagctaaaagcagcttctgaagagatgttaatgtcctgtaatcactagaggagaaaattcattctccttccataacattacttagtaaaggaaaagcggtggtgcaatcaaattcacaaataccaatggggtctctaaaatgtagaatgcagcttgctgggtgctggtcagttttctaaatgggaccagaaatggctttcctaagaccataaatgaactctccagccacacatacattcaaatgcattccattagacattgagctcctcaagagcagg

SEQ ID NO: 257610 - DNA, 4958 bp, Artificial Sequence
  derived and/or modified sequence
agtttgggtcttgctggcgcgaggtagtcagaggacgtggccgcggggcttgctgggacttgaggttagacgtcccggccgtcggttgccgcctacactgtctgccgtcgcgtcgcagttactaaggcgtggggaagatagcggcaggcaccgcagtggagcggctccgagatccccggggggctcgcaggcgcgcatccctcctgactgggacgtcgcctccgcagacccctcggaggctgaagcgacgccggaggcaggcaaagaaacaagtgaagaaacaaaaaaaaaaggaagttaaggggccattcccaaagtcaaagatcaaggagatggccttctcaggaatctacaagctggatgatgggaagccttacctgaacaactgcttcccagccagaaatctgcttcgcgtgccggaggaaggccaaggacactggttagtggttcagaaaggtaacctcaagaagaagcccaagggtttggttggagcacaagctgaacgtcgggaaagcctgaaggcgacttcttttgagttcaaggggaagaaagagtctcggcgggaaaatcaggtggaccttcctggacatatcctggaccaggcttttctgctgaagcaccactgtgtgaggaagccatcagatctgtgcaccattaatgccaaggaaaatgacttcaagcattttcattctgtgatttatatcaatgcctcagaaaacctgctgcctctagaggcatttcacacgtttccagccctaaaggaactggatctcgcatttaatggcatcaaaactatctacgtgaaatatggagactttaagttattagaattcttggacctttccttcaacagcctgactgtggaggccatctgtgatttggggattctgccacacctccgtgtcctgctcctcacaggcaatggccttacctccctgccgcccaatttggccgtcgcagaacaggaggcatctgtaacatcgctgacaagcaagaggtacatcctgaggttcccagcgctggagacactgatgctggatgacaacagactctccaaccccagttgctttgccagcctggctgggctcaggagactgaagaagttaagcttggatgaaaacaggattatcaggatcccatacctacagcaagttcagctctatgacgagtcagtagactggaatggaggcaggggaagtccccataaagagccccaattcatgctgcagtccaagccaaggatgcttgaggactcagatgagcaactggattatactgtactgcccatgaaaaaggatgttgaccggacaacaaccaagatatgttcacttcctcccatattcgagatccttcctgtgaagtcactgaaggccaggaaccagacgctggccccacccttcccagagctgagataccttagcctggcctacaacaagatcgcaaaagaggatgctgtcctaccagtagctctcttcccatctctctgcgagttcgtctttcataacaaccctctggtggcccatacacgaggggtccctccactgctgaagagcttcctccaggagcgactgggaatccacttaattcgaaggaagatagtaaagcctaagcatcatgttttgatgtctcggaaggaatcatggaaggtgaaaagcgaaatcccaaaggtgccgaagcagcctctggtgctccatcacccgcgcatgacgacaaccaagtctccctcaaaggatatgctagagccagaggcagagctggctgaagatctgcccactaccaaaagcacttctgtggagtcagagatgcccactgagaacctggaaggccattccccgtcttgccggaccttcgtgccactgcctcccatctgctccaactccactgtgcatagtgaagagaccctgtcccacctgagtgacacaactgtccgcctcagcccagagcgcccatcagatgaggactccaagagcacagagtccatcttcctgacccaggtgagtgaactgccttcctccgtcatccataaggatgatttagagttaaaggagaaagaccaaaagaaaccaccaacggcacccagagaggtgaaagggactcggaggaaactcccaactgccttccttcccagcaagtaccacggctatgaagaactgctgacagccaagcctgatccagccttcattgagccaaagggaatccagaagaatgcacaagccctgcaacaaatgctgaagcacccactcctgtgccactcctccaagcccaagctggacactcttcagaaaccctatgttcacaaagagaaacgggcccagagaatcccgattccacccccaaagaagactagagcccaacttctggatgacatcttcattcgcttgcgggatccccggaacattacagaggctccactaggtgctgtcctgcaccagtggacagaacggcggctggtgaaccacaagcagtacctggaggccaagaggctgttgaaggagttccaggcacgttaccggcagctggtgagtggctctctgcgcacagtgttcgggactaccccgctccccatggcctgcccagcgctgagtgagagccagcccaagttcggccacttcctcgagttcatggatgagttctgccaggagcccacagccagtgactcacaaggctagagctgtgcatgggggctgtgtgcaccacccggcctgtgccccagctctccccgagggctctgtgccctggaccgcacctcaaggttgaccagccggccacaggcctcagagctcagctgggccccacttgctggccacaaggtggcatccccttgtcaggatctcccctccttggcccaggcatgacctggtgcctggcccagcggcaataaagagtgggtgcacagggcaatagactgggtgccacatgcattctttcttggaacccaggccacagcagcattgtcacacttccctctaaaaatggttttccagttcagatgcaacagggatacatttgttctctgttgtatgagaaactgacaccaaggggatcttaacaaattcctgaacaatggctccaaaaaagggtatttttaaaaaccagatcttgtgagtacagccctaatgtgcagggacagtgtcatcctgtatattcgttctttactcagactctttcttggttccttcattaggagcatgaatggttgaatgtgaacatgacagtaaattggagcaaactgtaaactggacataacttatgccaaaagacgtagttgtacaccatggaaaccccatccctgctcctaatctctactgccattctgaatgccaaagcaagacatccaacatggggcatctcccagagcacatacagcaccaaaaatccacacacagcctaagcttaacccatgtttttgtctgagattgttcaccagagacaagactctgactataaacagaacatccactttcatgagtttcctttactgtattctcaacttgggccttgcttcaagcaggcaaacatacattgaagaatgcactttggtactgtttaaataacaacacatcagcccacttgattccatgccatgtccttgctgacagaaacatccccaacagggcatgccctggtccaagtcctctgtctttgtcaaaatgctcttctgatgagttggagaggaggcagccagcagtggcagtccacaaggatccaggtaccttctccaatcctaaagcagacagcaggttgaataaaaccaatacacaacctattttctaggcaggaggggaaaaggcccttaggacaataatatttgtacaaagagttgagagtaaacaaacagtgtatcaggttcaaaaaaaaaaaaactattcgttggcatttaaatttttttcccttgcatagtatctattctctcactaggacttttaagtgctctgctggaggctcagcgttggtaataccatgtttgatgcaaacttgaacccaatgctctcattggtggcacagctttggagggtggtggccccaagaaggggcaatctgcctgctgctatattaatctggaaccagggccaacagctactcttgaactatggtatttgaagagcgagttcattgcctgttttaccttaaatgacaggaaaggaagatgaacaaaccttgctttgccttggcttcaaactagttcttgatttaagacaccagaaagggagagagggagtctgcttagagtttgaggttgcctctcacaagatgacagttaaaagttgccaccttacttaaaaggcattaaggaggcatttactcacaaaggagagagagtaaatttttttcttaagaggaaaaaaatactgataatacatagaacaatctgcacatccagtcttggcactttttccaatttgactgatctctaaactggtgacccttgcatatatcttagtctcttttctacaatcttcttcagaaagctacagcagctaacaatcatgtataaagatgcatttcctagatcatcttcagaagaaaatctcttcagcactttccctagaatctgtctcctgaccaccccgccccagacctgctttctcttttgagaattcataaccaggtatgtttagataccagttcaaaagaccactctatgggttgatgaggaaaaggctgcctgaggacaatttaagaccataatgagtttccaatttttaaagaaaatttggctagctggcttttaattcttaattaaaatcattaaatttaattaaaattattccaatcaaaatatatcactttccaagattccacattcatattacttacttatactatggagactttctctacctgagcatgtattcaggggctataggtacatttaactctaactaactgaaaaaaatcaggaagaaaaaactattaaaataaaataacctcctaaatcatttgggggtatccccatc

SEQ ID NO: 257611 - protein, 269 aa, Artificial Sequence
  derived and/or modified sequence
MERSQSRLSLSASFEALAIYFPCMNSFDDEDAGDSRRLKGAIQRSTETGLAVEMPSRTLRQASHESIEDSMNSYGSEGNLNYGGVCLASDAQFSDFLGSMGPAQFVGRQTLATTPMGDVEIGLQERNGQLEVDIIQARGLTAKPGSKTLPAAYIKAYLLENGICIAKKKTKVARKSLDPLYNQVLLFPESPQGKVLQVIVWGNYGRMERKQFMGVARVLLEELDLTTLAVGWYKLFPTSSMVDPATGPLLRQASQLSLESTVGPCGERS

SEQ ID NO: 257612 - DNA, 810 bp, Artificial Sequence
  derived and/or modified sequence
atggaacgaagccaatcccggttgtctttaagcgcaagtttcgaggcactggccatctatttcccctgtatgaatagcttcgatgacgaggatgctggcgactctcggcgtcttaagggggcaatacaacgatctaccgagaccggactcgccgtggagatgccatcgcgtacactccgacaagctagtcatgaatcaatcgaagattctatgaatagctatggctccgaggggaatttaaactacggcggggtctgtcttgctagtgacgcccagttctctgattttcttggttctatgggtcccgcccagtttgtagggaggcagacactggctacaacaccaatgggggacgtcgaaatagggctacaggagagaaacggacagctggaagtggatataatccaggcacggggtctaactgcaaagccaggctccaagactctgccggcagcgtatatcaaggcatatctcttggagaatgggatttgtatcgcaaagaagaaaactaaagtggcgcggaaatccttagaccccctgtacaaccaggtcctgctgtttcccgagagcccccagggaaaggtgctgcaggtaattgtctggggaaactatgggcggatggaacgcaaacagttcatgggcgtcgcgagagttttgctagaagagctagaccttactacactggccgtcggctggtataagctgttcccaaccagcagtatggtggatcctgccactggccctctgctgaggcaggcctcgcaactctcactcgaatctacagttggaccctgtggggagcgtagttag

SEQ ID NO: 257613 - DNA, 810 bp, Artificial Sequence
  derived and/or modified sequence
atggagaggagccagagccggctgagcctgagcgccagctttgaggccctggccatctacttcccctgcatgaacagctttgatgatgaagatgctggggacagccggcggctgaagggggccatccagaggagcacagagaccggcctggccgtggagatgcccagcaggaccctgcggcaggccagccatgagagcattgaggacagcatgaacagctatggcagcgagggcaacctgaactacggcggcgtgtgcctggccagtgatgcccagttcagtgacttcctgggctccatgggccctgcccagtttgtgggccggcagaccctggccaccacccccatgggagatgtggagatcggcctgcaggagagaaatggccagctggaggtggacatcatccaggcccggggcctgacagccaagccaggcagcaagaccctgcctgctgcctacatcaaggcctacctgctggagaatggcatctgcatcgccaagaagaagaccaaggtggccaggaagagcctggaccccctgtacaaccaggtgctgctcttccctgagagcccccagggcaaggtgctgcaggtgattgtgtggggcaactacggccgcatggagaggaagcagttcatgggcgtggcccgggtgctgctggaggagctggacctgaccaccctggccgtgggctggtacaagctgttccccaccagctccatggtggaccctgccaccggccccctgctgcggcaggccagccagctgagcctggagagcacagtgggcccctgtggggagaggagctag

SEQ ID NO: 257614 - DNA, 810 bp, Artificial Sequence
  derived and/or modified sequence
atggagcggagccagagccggctgagcctgagcgccagcttcgaggcgcttgctatttacttcccgtgcatgaacagcttcgacgacgaagacgccggagacagccgccggttgaagggggcaatccagaggtcaacagagacaggattagcagtagaaatgcccagccgtaccttgagacaggcgagccatgaaagcatcgaagacagtatgaactcatacggatccgagggcaatttaaattatggaggagtgtgtctcgcgtccgacgcccaattttctgattttttgggttcaatgggccccgcacagttcgtcggcagacaaactctggcaaccacaccaatgggagatgtcgaaatcggattgcaggaacgcaatggccagcttgaagtggatatcatccaggccaggggactgactgctaaacccggctctaaaaccttgcccgcagcatacataaaggcctatttactcgagaatggaatctgcatcgctaaaaagaaaactaaggtggcccgtaaatctctggaccctctgtacaatcaggtccttctgtttcccgaaagccctcagggcaaggtactgcaggtaatcgtatggggcaactatggccgaatggagaggaaacagttcatgggggttgcacgggtgctgctggaggagctggacctgaccaccttggctgtgggatggtataagctctttcctacaagctcaatggtcgatcccgccacaggaccactcttgcgtcaggcttcgcaattgtcccttgagagtactgtcgggccctgcggcgagagatcatag

SEQ ID NO: 257615 - DNA, 810 bp, Artificial Sequence
  derived and/or modified sequence
atggagcgttcacagagtcggctcagtctgagcgcaagtttcgaagcgctcgccatctacttcccttgcatgaattctttcgacgatgaagatgccggtgattctcggcgtttgaagggagctatccagaggagtacagagaccggccttgcagtggagatgcctagtagaactctgcggcaggcctctcacgagtctattgaggattctatgaactcctatggatcagaaggcaacttgaattacggcggtgtatgtctcgctagcgacgcccagttctccgatttcctgggctcaatgggacccgcacaatttgtcggtaggcaaaccctcgcgaccacacccatgggggacgtggagattggcctgcaggagaggaatgggcagctagaggtggacataatccaggcaagaggcctgacagctaagcctggatccaagaccttgccagcagcctacattaaagcctacttgctggagaatggaatctgcattgccaagaagaagactaaggtcgcacggaaatccctggatccactgtacaatcaggttttactctttccagagagtccccagggaaaagtcctgcaggtcatagtgtggggaaattacggcaggatggagaggaaacagttcatgggggtggccagagtgctgctggaggaactggaccttaccactcttgccgtgggttggtataagctgtttcccacttcctctatggtcgacccagccactggcccactgctccggcaggcttcacagttatccctggagagcactgtgggtccttgcggcgagaggagttag

SEQ ID NO: 257616 - DNA, 5203 bp, Artificial Sequence
  derived and/or modified sequence
caagctgcccaagccgcccgccgccgccgccgccgccgcggccgaggcgcccggcgccggcgcgggcatggagcgctcgcagagccgcctcagtctgtccgcctccttcgaggcgctcgccatctacttcccgtgcatgaactccttcgacgacgaggacgcaggggacagccggaggctgaagggggccatccagaggagcacggagacgggcctggcagtggagatgcccagccggacactgcgccaggccagccacgagtccattgaggacagcatgaacagctatggctcagagggcaaccttaactatggaggagtttgcctggcgtcggacgcccagttcagtgacttcctgggaagcatggggccggcacagtttgtgggccgccagaccctggccaccacacccatgggggatgtggagatcggtctgcaggagcggaacggtcagttggaggtggacattatccaggctcggggactgacagccaagccaggctccaagacactgccagcggcctacatcaaggcctacctgctagagaatggcatctgcattgccaagaagaagaccaaagtcgctcgcaagtcgctggacccactgtataaccaggtgctgctgtttcctgagagtccccagggcaaagtcctccaggtgatcgtgtgggggaactacgggcggatggagcggaagcagttcatgggtgtggctcgcgtgctgctggaggagctggacttgaccaccctggccgtgggctggtacaagctcttccccacctcctccatggtggacccagccacaggccccctgctccggcaggcatcccagttgtccctcgagagcaccgtggggccctgcggagaacgatcttagtgctggaatggggaggggctccccaagatggcctggagaccacccagccctgacctgggaccccaggcccaggggcacattgaacaggaggacggggctctcccccacagtggggaagcagaacggggagacctgcccccccttgggcccctcctcaccccttctttgcctcctacccccgagacctcccctctcccaacgggattggctacacttttgacttggccggttcttgacctggtggatgtggctgcagtccagagaaaggaaagattgaggtggcagagcagaccactctcccttcccaaactgtccaacttctccccctttttgcctcctcggaagctcgctgcccagagccatgtccagaacccagccggccatctccatggtgccaattaccagcaagtgtctttcctgcggcaccgggttcaggcagctactcctgccccagagatgaaggggcagctttgcaaggatccggagccagctcccaggggcccagagccccccacttgaagaggagcttgagcttccctctgcctgcccgtggaaggagctttgccgcagcctgtccgagtccatccgtccgtcccctcctgcctgcccctcttctggtggctctaggaattggggttcagcagggaccaaaggaaaggaggaggtgccgggggcctggcacagacccctaggtgcctcgctccatgggattgcaacaagctagtttaggaaccgctggcggactagaaagaatgttgtcgtctgtgttccggtggaggagctgtggaacctgagtttccagaaccccaaccctagagagcatttgggggtgctgtattggagggggaggctaaggaaagttgggattgggactggtggtgccaagataagggtttctcaaattggagaacccctccttgttgcatgaggtcaatggtcatcctgtctacccaccctgcctccaggccagggggctggggaggcaaatagagcccccctattttagtctttttaaaaaaaacatcctatactaagggcagaacccactgccccggcctcaattaccttggctgaaggaaagatggcggtaggagagaaaagtgaagaggcgtgagtgtaagaactgggagattccttttccagcaggcctgggtagctgccttcccagcccagccctccctggggcctgcgggagcccttttgcatgcaagggaggatggaggctggcccctctttatagaagcacatttctgccacctcccctgggaggcacccagaagcctgccactctttacctagtccctgctgtgtagggcgtagtccaggttagctaggtagagttagtgctccaagccctggggcctgttcttagctcatgcatagtccttacagagtcccaggaccgggggtggagaggagcctcaagtacattccaggagaccactgtctcctcgctggcctgggcctagatggggcagcctggctcacaggaggccagcccctcctcctccgcccccttccttcccttgtccccgtagggttatagctggagctgcctgttatactcggctgttctgatttattattcttggtactgactttctttatgagggactcctaagggttgtaggaccttggcagagggggcctggtctccattagagggtgttgttttctcctgaggacacccaggctgcctttggtcccaccctgttcctggtcccggtcccggtcccagtcccaccaggcaactccttccacccggaaattcttcccttcccttagcctgtggaaaccctgggtattctttaaagttctggtcaatgtatatcacctccacagagctgcttaccctgcactgggaaggggagatggagacgccccctttacccaggaggtcttcagagtttcctgggaccgcggtgggtggaatcccaaggctgggggtggaaggagcagggctctggagggattcgcattcaaggcacagaattggccccttgcctgtttgtttttctaaccagtgtgatttctctgctgttcgtttattacttaccattggaatattttgagccaggagagcgccttctctctccagccatcaccgctgtggttgttcaggggtagcttttcaaaaacagggcagagcctggctgtcccaaccagggggagcaggggcttggccctgacagcctgagcccttcccctggtgtctgcacagcctttataaagagagagagagctccgaagcaataacaacacctgggggtggtcagtgagggccccctcaatgattttcttgtttgttctgtgaaatcccgctcacctcctggaggggtggagcagctgggggctggagccctgtttctttgtgtcatcgtgagcatgtgccccttcccaggggctgtgaccattgggtgtgggaactacggtctgtcctcaccaagggatgggggtttggggaggagagtgacattttcatcattagcttcggagaagcttcaagcccatcctgtccccgctactgcctggccccttgctgactcaggctgcactgtttgaagaggagcagagaggctggcactaggggccactggggggctggggtctccaggggatgactgttttcaatctctgggccaagatcacatgcaggataccatgggaaggagccatctccactctccttctccagaacccccttgaagggcctttgggaccattagtccatttccattttacagacaaggaaatcaagacccagcttgggggaaaagccacccctggagtcacctgtgtgttcagtggcacccccagcctgggtcccctcctcccaatagaggctgagccggagccagggcagtatgaggtggggctgccactgcccatacctcctcctcccttctttctttgaagcctaatggccccccaaaagatgggcaggacaagctgtagcccatctgagaggttgggaaactgaggcccagaaacaggaagtgactcacacaagacccctcagcaagggtgcaaagggggaagaactaggggctccattgttcttcaggcgacaggagaccgttgctccagtgcatgtctgctgggacaaggattcctggcctcgaagccctgggctgcacagccctactgggctccacctctataaaccagtgacttctctgggcctgggtctgggggagagggttgccagggagactcagctctccttgggggctggcccagctgactgagggtacacaggattgggtctagaccttgatgcctgggtggagggcccttgtaaggggccatagcctcttcaggaccaactggagggagagttaggaaacaccagctcctgcctggggcagtgagggaatgggagcagctgtgggcgcctcatttcaggcaagtcctccccaaaccttcagatgcagtgagacctggccttcctgttgtgcttttcagactttgttttcagaatgcttttatctcgagtgtgcccttcggccctcacaagagcccctggggagtaggtggtggcctgtgccgtcatccccatttcaaagcagggagctgaggtcctgggaggggaaagtgcttgcctgaggtcccactgtgttagtgggtgggcaggactggaactcggttctccaacagcccagagctcactcttttacacccagaggtggagcaggtggcttagggggtggttatgtacttcacaagccaattcccttcagccaggagctcctgggtgcatttccgtgtcagaaacagtaccgagtcccaccccctctggaggcacagctgttgcgtcaggcaaggtcacctgcatttatttattgagcagcagtgctgtgtcaggcccagggaccgagcccctctccctgttcccctatggtgtctccgaggccctctgggagggccccacatctggagcagcacctcagagtggacagaaagcattagcgtccacgagctcacccgacgccgagcctgtgaggtgggctgatggtgcccgtctaacccagcgcttcagggaggtcagaatggagccgaacccagggctgtgagcatcacctctggagccctttcactttatgactgcttcctggacgggtggtgggaaggcaggagcctgggtccttaggctgggggcctctctccatccacccacctttccctcattccctctcttggagcagcagccgcccaggcctttagggagggagggtttctggggcccttgggttggagtggggtcgcgttgcattgtgttcatgaccatgtagctcatgttgaaattaaagtttttggcttttctaa

SEQ ID NO: 257617 - DNA, 810 bp, Artificial Sequence
  derived and/or modified sequence
atggagagaagccagagcagactgagcctgagcgccagcttcgaggccctggccatctacttcccctgcatgaacagcttcgacgacgaggacgccggcgacagcagaagactgaagggcgccatccagagaagcaccgagaccggcctggccgtggagatgcccagcagaaccctgagacaggccagccacgagagcatcgaggacagcatgaacagctacggcagcgagggcaacctgaactacggcggcgtgtgcctggccagcgacgcccagttcagcgacttcctgggcagcatgggccccgcccagttcgtgggcagacagaccctggccaccacccccatgggcgacgtggagatcggcctgcaggagagaaacggccagctggaggtggacatcatccaggccagaggcctgaccgccaagcccggcagcaagaccctgcccgccgcctacatcaaggcctacctgctggagaacggcatctgcatcgccaagaagaagaccaaggtggccagaaagagcctggaccccctgtacaaccaggtgctgctgttccccgagagcccccagggcaaggtgctgcaggtgatcgtgtggggcaactacggcagaatggagagaaagcagttcatgggcgtggccagagtgctgctggaggagctggacctgaccaccctggccgtgggctggtacaagctgttccccaccagcagcatggtggaccccgccaccggccccctgctgagacaggccagccagctgagcctggagagcaccgtgggcccctgcggcgagagaagctag

SEQ ID NO: 257618 - protein, 587 aa, Artificial Sequence
  derived and/or modified sequence
MAAAVAVAAASRRQSCYLCDLPRMPWAMIWDFTEPVCRGCVNYEGADRVEFVIETARQLKRAHGCFPEGRSPPGAAASAAAKPPPLSAKDILLQQQQQLGHGGPEAAPRAPQALERYPLAAAAERPPRLGSDFGSSRPAASLAQPPTPQPPPVNGILVPNGFSKLEEPPELNRQSPNPRRGHAVPPTLVPLMNGSATPLPTALGLGGRAAASLAAVSGTAAASLGSAQPTDLGAHKRPASVSSSAAVEHEQREAAAKEKQPPPPAHRGPADSLSTAAGAAELSAEGAGKSRGSGEQDWVNRPKTVRDTLLALHQHGHSGPFESKFKKEPALTAGRLLGFEANGANGSKAVARTARKRKPSPEPEGEVGPPKINGEAQPWLSTSTEGLKIPMTPTSSFVSPPPPTASPHSNRTTPPEAAQNGQSPMAALILVADNAGGSHASKDANQVHSTTRRNSNSPPSPSSMNQRRLGPREVGGQGAGNTGGLEPVHPASLPDSSLATSAPLCCTLCHERLEDTHFVQCPSVPSHKFCFPCSRQSIKQQGASGEVYCPSGEKCPLVGSNVPWAFMQGEIATILAGDVKVKKERDS

SEQ ID NO: 257619 - DNA, 4663 bp, Artificial Sequence
  derived and/or modified sequence
ctcctcctccggcgtcgcgggctcctcggacatggccgcggcggtggcggtggcggccgcgtcccggcggcagtcgtgctacctgtgtgacctgccccgcatgccctgggccatgatctgggacttcaccgaacccgtctgccgcggctgcgtcaactacgagggcgccgaccgcgtcgagttcgtcatcgagacggcgcggcagctcaagcgggcgcacggctgcttcccggagggtcgctccccacccggcgccgcggcctcggccgccgccaagccgccgccgctctccgccaaggacatccttttgcagcagcagcagcagcttggccacggcggccccgaggcggccccgcgcgcgccgcaggccttggagcgctacccgttggcggccgcggccgagaggcccccgcgcctcggctctgacttcggcagcagccgcccggcagcgagcctggcccagccgccgacgccgcagccgccgcccgtgaacggcatcctggtgcccaacggcttctccaagctagaggagccgcccgagctgaatcgccagagcccgaacccgcggcgcggccacgcggtgccgcccaccctggtgccgctcatgaacggctcggccacgccgctgcccaccgcgctcggcctcggcggccgcgctgccgcctccttagccgcggtgtccggaaccgcggccgccagcctgggctccgcgcagcccaccgatctgggcgcccacaagcggccggcatccgtgtcgagcagcgctgccgtggagcacgagcagcgtgaggcggcagccaaggagaaacaaccgccgccgcctgcgcaccggggcccggccgacagcctgtccaccgcggccggggccgccgagctgagcgcggaaggtgcgggcaagagccgcgggtctggagagcaggactgggtcaacaggcccaagaccgtgcgcgacacgctgctggcgctgcaccagcacggccactcggggcccttcgagagcaagtttaagaaggagccggccctgactgcaggcaggttgttgggtttcgaggccaacggggccaacgggtctaaagcagttgcaagaacagcaaggaaaaggaagccctctccagaaccagaaggtgaagtcgggccccctaagatcaacggagaggcccagccgtggctgtccacatccacagaggggctcaagatccccatgactcctacatcctcttttgtgtctccgccaccacccactgcctcacctcattccaaccggaccacaccgcctgaagcggcccagaatggccagtcccccatggcagccctgatcttagtagcagacaatgcagggggcagtcatgcctcaaaagatgccaaccaggttcactccactaccaggaggaatagcaacagtccgccctctccgtcctctatgaaccaaagaaggctgggccccagagaggtggggggccagggagcaggcaacacaggaggactggagccagtgcaccctgccagcctcccggactcctctctggcaaccagtgccccgctgtgctgcaccctctgccacgagcggctggaggacacccattttgtgcagtgcccgtccgtcccttcgcacaagttctgcttcccttgctccagacaaagcatcaaacagcagggagctagtggagaggtctattgtcccagtggggaaaaatgccctcttgtgggctccaatgtcccctgggcctttatgcaaggggaaattgcaaccatccttgctggagatgtgaaagtgaaaaaagagagagactcgtgacttttccggtttcagaaaaacccaatgattacccttaattaaaactgcttgaattgtatatatatctccatatatatatatatccaagacaagggaaatgtagacttcataaacatggctgtataattttgattttttttgaatacattgtgtttctatattttttttgacgacaaaaggtatgtacttataaagacatttttttcttttgttaacgttattagcatatctttgtgctttattatcctggtgacagttaccgttctatgtaggctgtgacttgcgctgcttttttagagcacttggcaaatcagaaatgcttctagctgtatttgtatgcacttattttaaaaagaaaaaaaaagccaaatacattttctgacattgtaagattgccttactgtctgtcattccttattgctggcccctttctcaggccggaggccaagtggtggagaaggaaaggaaatgatcgaacgggcatgttgtcaagtgggcatgccactgggaaataccaccagtttaccctgaaacattgtcctcagaggagtaggaaagtggattttgaatctctattttgctcaaaagttcagttcctgagatactgatgactgagagtgctgctgggaaattttcaggattgtgtggtcttttggggttttttgtttttttttttttaagacaaagttgaccgctgttcactgtccacgtgatcagttgtaagattacaatgctgcatgctagttggttacataagatacaattccagtgatggaaggcggttataatggatggtggtgtgtacaagatggcactgccatctttgagcagagcccagctctgcagcgccacttcatctttttaaacaccctagaggtctgtttgttgttgctgttgtcctttattttgaaagagttgcaagagaagttacagtccaggtgaacttggagattgtgggattggttttgtttctgttttgttttgtttatcatttacctgtagtgctattgctgttgatactatcacctataccctgtttctagtgagtgctgaatacagtatggtacaatgacagtaacagccgcgtggtgctgccaggactgcccttgggcatatcagtgacagcccaaatgtgggtggaggaaacctgtaatttccttcttaacatgtgtttgaaataccaagtgaataatactgttctggaaaaaaatgataaactagtggaaattaaagaaattaagggttttatataatagacaggccccacctctcaaaatatttttagaagtctttttgtaaactaatttcttttgatcactattttgcatcagtaaaatgatttttttaaaaccaataaatcatcaattattagaaatagttgtctcacagtgatactggtttttcttttgtgctgttatgatttaacattgacaggaacactattttaaatccttacgttcaggtgtttgtaacttggccttataattaggctgaattatggcttcaaggtctacaatttatgtgtatggttcacagcctagcttctatttacatttgaaaatacagatttttaccaactttggattcttttttagttatatgtttgtctttcctttttaaattgttcaaaactattttttaatggtcaagttactaacacttgaaaatcagatactgcaccaaatacagtgtttttccgtagtgtttttaatgagtgcacctattactactgtgcgagaattcatgttttaccagtcattgttatattacaaacagacttgcatgattaaccagttgttacacttactttttcaagttggagtatatatgactcagtgcagactggtctctcttatgtgaatgcacacatgcagaaatgcagagtcaattttacatgcccataaagacatttgtaaagaattcagctcttatggtctgttgtataaatgtgtatctaggcactttggaatttgacctcacagatgttacaacttgatcagtcgtttgacctaatttgtggtagctatctgtatgttttgcaatcttaatacagacatgctttccaaaaagattaatacagaaccatcctgccgttttggataagtctatccagctgtggaaagggcaacctgtggtttctctgtactggtgtttaatgggggaagaatatgaacagctttaaagagctgtgtattgtggttactactattaaaaaataagatctgcacgagtctgactggcctttgggtggcctttgtggacggctcgtagctggaaagtgttgatctgggttttctggcattcttttaagttaaaaagttaacatcgggacatgggtttgatcttttgttgtacctgatgacagtgcagagattctccacagctggataaaaatgtcacaaagctacttactgtacatgggcagtatcagatttcaaatcctaatatttcagctgtgcttttaatactcaaaatattaggggatggggtgttgaagctttcccttttttgcttttaacaatttatagaatttaacagatgtactgtctttcatgtggcctcacatttaaagttatgagaacatacacatggtttacaacttttactatatacctttccttggccaccaagtattttaaaagtgtgccaccttttaacctttactttttttaagttgaaggtgatactttttctatatatgatgaaactcatgtcaactgaagtgagtgtaatctcagataccaacattattatattttaaaatcacgctatggaaatatcacctgaattctgtcatttgtcagatttacagtacctttttttctttaacttttagcattaaataaaaataaaattgggagcactgaa

SEQ ID NO: 257620 - DNA, 1764 bp, Artificial Sequence
  derived and/or modified sequence
atggctgccgccgtggcagttgcggccgccagtcggcggcaaagctgctacctgtgcgacctgcctcgcatgccatgggctatgatttgggattttactgaaccagtgtgcagggggtgcgtcaactacgaaggagctgatcgcgttgaatttgtgattgagacggccagacagttaaagcgtgcacatggatgcttcccagaaggccggtctccaccaggggcggcggcgtctgccgcggccaagccccctcccctaagcgcgaaggatatcctgctccagcagcagcaacaactcggccatgggggccctgaggcagcacccagggccccgcaggcgctggagagatatccactcgcggccgccgccgaaagaccgcctagactcggttcagactttgggagttccagacctgcagcatcactggctcagcccccgacccctcaaccacctccagtcaacgggatccttgtgcccaatggattctcaaaactggaagaacccccagaattgaaccgccagtcccctaacccccgacgcggtcacgccgtgcctccaacactggtcccactgatgaacggtagtgcgacaccgctccccactgcgctcggactcggggggcgagctgccgcctccttggccgctgtgagcggcactgctgccgcttctctgggctccgctcagcctactgacctgggcgcccataaaagacccgcgtctgtgagtagttcagccgctgtggaacacgaacagcgggaagccgccgccaaggagaagcagcccccgccaccagcacacagaggtcccgctgacagcctcagcacagccgccggcgccgctgagctcagtgccgagggagccggcaaatcccgcggtagtggcgagcaagactgggtaaacagaccgaagacagtgagagacacccttcttgcacttcatcagcatgggcatagcggtcctttcgagtctaagttcaagaaagagcctgcactgaccgcaggccgcctcttgggcttcgaggcgaacggcgctaatgggtcaaaggcagtagccagaactgcccggaaaagaaagccatcccccgagcctgaaggagaggtgggtcctcctaagataaacggcgaggcccagccctggctgagtacttctaccgaggggctcaagatcccaatgacacctacctccagtttcgtgagccctcccccacccacagcctctcctcatagtaacaggactacacctccagaagctgcacaaaacggtcagtcgcctatggcagcactcatcctggtcgctgacaacgcgggagggtcgcatgctagcaaagatgctaaccaggtgcacagcacgactcgtcgaaatagcaattccccccctagcccctcaagtatgaaccagcgacggctcggtcctagggaggtggggggccaaggagctggtaacaccggcggcctggagccagtccatcccgcttcgttacccgacagctcattggcgacttctgctccgttgtgttgcaccttgtgccacgagcgactcgaggatacacactttgtgcagtgcccaagcgtccctagccacaaattttgtttcccctgcagtcgacagtctattaagcagcagggtgcttccggagaggtatactgcccatctggcgaaaagtgtccgctggtgggctccaacgtgccgtgggccttcatgcagggcgagatagctacaatccttgctggtgacgtcaaggtgaagaaggagcgcgactcctag

SEQ ID NO: 257621 - DNA, 1764 bp, Artificial Sequence
  derived and/or modified sequence
atggctgctgctgtggccgtggccgccgccagccggcggcagagctgctacctgtgtgacctgcccaggatgccctgggccatgatctgggacttcacagagcctgtgtgccggggctgtgtgaactatgaaggagctgacagagtggagtttgtgattgaaacagcccggcagctgaagagggcccacggctgcttccctgagggccgcagccccccaggagctgctgccagcgctgctgccaagcccccacccctgagcgccaaggacatcctgctgcagcagcagcagcagctgggccatggaggccctgaggccgccccccgggccccccaggccctggagcgctaccccctggccgctgctgctgagcggcccccccggctgggcagtgactttggcagcagcaggcctgctgccagcctggcccagccccccaccccccagcccccacctgtgaatggcatcctggtgcccaacggcttcagcaagctggaggagcccccagagctgaaccggcagagccccaacccccggcggggccatgctgtgccccccaccctggtgcccctgatgaatggaagtgccacccccctgcccacagccctgggcctgggcggccgggccgccgccagcctggccgctgtgtctggaacagctgctgccagcctgggcagcgcccagcccacagacctgggcgcccacaagaggcctgcctctgtgagcagcagcgctgctgtggagcacgagcagcgggaggccgccgccaaggagaagcagcccccacctccagcccaccggggccctgctgacagcctgagcacagctgctggagctgctgagctgtctgctgagggcgccggcaagagccggggcagcggggagcaggactgggtgaaccggcccaagacagtgcgggacaccctgctggccctgcaccagcacggccacagcggcccctttgagagcaagttcaagaaggagcccgccctgacagctggccgcctgctgggctttgaggccaacggggccaacggcagcaaggctgtggccaggacagccaggaagaggaagcccagccctgagcctgagggggaggtgggcccccccaagatcaatggagaggcccagccctggctgagcaccagcacagagggcctgaagatccccatgacccccaccagcagctttgtgagccccccaccacccacagccagcccccacagcaacagaaccaccccacctgaggccgcccagaatggccagagccccatggccgccctgatcctggtggccgacaatgccggcggcagccacgccagcaaggatgccaaccaggtgcacagcaccaccaggaggaacagcaacagcccccccagccccagctccatgaaccagaggcggctgggcccccgggaggtgggcggccagggcgccggcaacacaggaggcctggagcctgtgcacccagccagcctgcctgacagcagcctggccaccagcgcccccctgtgctgcaccctgtgccacgagcggctggaggacacccactttgtgcagtgccccagcgtgcccagccacaagttctgcttcccctgcagccggcagagcatcaagcagcagggcgccagcggggaggtgtactgccccagcggggagaagtgccccctggtgggcagcaatgtgccctgggccttcatgcagggcgagatcgccaccatcctggccggagatgtgaaggtgaagaaggagcgggacagctag

SEQ ID NO: 257622 - DNA, 1764 bp, Artificial Sequence
  derived and/or modified sequence
atggccgccgccgtggccgtggccgccgccagccggcggcagagctgctacctctgcgacttgcccaggatgccttgggccatgatctgggactttaccgagcctgtctgccgtgggtgcgtcaattatgagggtgccgacagggtggaattcgtcatcgagacagcaagacagctcaaaagggcccacggctgttttcctgaaggccgctcgccaccaggcgctgcggcctcagcggccgctaaaccgcccccgctaagtgctaaggacatcctgctacagcagcaacagcagctgggccacggggggccggaagccgctccccgcgccccacaggccctggagcgctatccacttgcagctgcggcagaacggcctccacgtctgggtagtgacttcgggtcttctcgtcccgcggccagcttagcccagccccccactccccaacccccacctgtgaacgggatacttgttcccaacgggttcagtaagctagaggaaccaccagagctgaacagacagagcccaaatcctcgccgaggccatgcagtcccacccaccttggttcctctcatgaatggctccgctaccccactacccactgccctgggtcttggagggcgggcggcagccagcttggcggcagtgtctggcacggcggcagcctccctggggtccgcccagccgacagacctgggggcacacaagcggccagcttcggtctctagctctgcggcagttgaacatgagcagcgtgaagccgcagcaaaggagaaacagcccccccctcccgctcaccgaggtcctgccgactcactgtccaccgctgctggggccgcggaactgagcgcagagggcgcagggaaatctcgtgggtccggagaacaggactgggtcaatcgaccaaaaactgtgcgggacactctgctcgcccttcaccagcacggccacagtggcccattcgagtcaaagttcaagaaggagccagcgctcacagctggacgcttgttgggcttcgaagctaacggcgccaacggatccaaggccgtcgccaggacagcgaggaagaggaagccttcgccagaacctgagggcgaggtggggccaccgaaaatcaatggcgaggcccagccatggctatccacgtcaacagagggcttgaagattcctatgactccaacaagctctttcgtgtcgcccccacctccaactgcctcgccccacagcaatagaaccaccccaccagaggctgcccagaacggacaatcccctatggccgccctgattctggtggccgacaacgcgggtggtagccatgcttcaaaggacgctaaccaagtccactctaccacacggcggaactcaaattcccccccttccccgagttctatgaaccagcgccggttgggccctagagaggtgggggggcaaggggcaggcaacacagggggcctggaacctgtgcaccctgcatccttgcccgattcatctttagctactagcgcccctttgtgctgcacactgtgccatgaaaggctcgaggacactcatttcgtccaatgcccaagcgtgcctagtcataaattctgtttcccttgcagtagacagtctatcaaacagcagggggccagcggcgaggtctattgtccatcgggggaaaaatgcccactggtaggaagcaacgtcccctgggcattcatgcaaggggaaatcgccaccattttagctggggatgtcaaggtgaaaaaagagagagattcgtag

SEQ ID NO: 257623 - DNA, 1764 bp, Artificial Sequence
  derived and/or modified sequence
atggcagccgctgtcgctgttgcggcagccagcaggaggcagtcctgttatctatgcgatctgcccaggatgccgtgggcaatgatttgggactttactgagccagtgtgccggggatgcgtaaattacgagggagcggaccgcgttgaatttgtgatcgaaacggccagacagcttaagagggcacacggctgtttccccgagggcagatcgcctcccggtgctgccgcttccgcggctgctaaacccccacccttgtcagccaaagacatcttgttgcagcagcagcagcagcttggccacggaggacccgaggccgctcctcgtgcccctcaggccctcgagcggtaccccctggcggcagcagcagagagacccccacgcctgggcagcgacttcggaagcagcagacctgcagctagcctggcccaaccgcctaccccacaacctccgcctgtaaacggtatccttgtcccaaacgggttcagcaagctcgaagaaccgcctgagttaaatcgccagagtcctaatcctcgcagaggacacgccgtgccacctacactcgttccacttatgaacgggtccgccacccccttgcccacagccctggggctgggtggtcgtgcagcagcctccctggccgctgtaagcggaacggcagcagcatctctcggctctgcccagcctacagacctcggtgcgcataagaggccggcaagcgtgtcgtcaagtgctgcagtcgaacacgagcagcgggaggctgcggcaaaagaaaaacagcccccaccccctgctcaccggggtcctgcggactcactaagcaccgcagctggagcagcagaactgagcgctgagggagcagggaaatccagaggaagtggcgagcaggattgggtaaataggccaaaaacagttcgcgacacacttctggctttacaccagcacggccactccggtcctttcgagtccaaattcaagaaagagcccgctttgactgcgggtcgcttgctgggcttcgaggctaatggcgcaaacggctccaaggctgtcgcccgaaccgctcgcaagcggaagcccagccctgagccggaaggggaggtggggccacctaagatcaacggggaggcccagccttggttgagtacctccaccgagggtctgaagatccctatgactcccacgtcctcttttgtaagtcccccaccccctaccgcttctcctcacagtaaccgaaccacccccccagaagctgctcaaaacggccagagccctatggccgctcttatcctggtagccgacaacgccggagggagccatgcctccaaagacgctaatcaagttcactccacaactaggaggaattccaacagtccccctagcccgtcttcaatgaaccagaggcggctggggccaagggaggtgggtgggcagggcgcagggaacacaggaggtctggagccagtacatcccgcttcactgcccgactcgtcgctcgcgacttccgcgcctctttgctgtacactctgccatgaacgtctggaggatactcatttcgtccagtgtccctctgtaccatctcacaaattctgcttcccatgtagtcggcaaagcattaaacagcagggtgcctcaggagaggtctactgtcctagcggcgagaagtgccctctggttggctccaacgtcccatgggccttcatgcagggtgaaatcgcaacaatccttgccggtgacgtgaaggtgaagaaggagcgagattcctag

SEQ ID NO: 257624 - DNA, 1764 bp, Artificial Sequence
  derived and/or modified sequence
atggccgccgccgtggccgtggccgccgccagcagaagacagagctgctacctgtgcgacctgcccagaatgccctgggccatgatctgggacttcaccgagcccgtgtgcagaggctgcgtgaactacgagggcgccgacagagtggagttcgtgatcgagaccgccagacagctgaagagagcccacggctgcttccccgagggcagaagcccccccggcgccgccgccagcgccgccgccaagcccccccccctgagcgccaaggacatcctgctgcagcagcagcagcagctgggccacggcggccccgaggccgcccccagagccccccaggccctggagagataccccctggccgccgccgccgagagaccccccagactgggcagcgacttcggcagcagcagacccgccgccagcctggcccagccccccaccccccagcccccccccgtgaacggcatcctggtgcccaacggcttcagcaagctggaggagccccccgagctgaacagacagagccccaaccccagaagaggccacgccgtgccccccaccctggtgcccctgatgaacggcagcgccacccccctgcccaccgccctgggcctgggcggcagagccgccgccagcctggccgccgtgagcggcaccgccgccgccagcctgggcagcgcccagcccaccgacctgggcgcccacaagagacccgccagcgtgagcagcagcgccgccgtggagcacgagcagagagaggccgccgccaaggagaagcagccccccccccccgcccacagaggccccgccgacagcctgagcaccgccgccggcgccgccgagctgagcgccgagggcgccggcaagagcagaggcagcggcgagcaggactgggtgaacagacccaagaccgtgagagacaccctgctggccctgcaccagcacggccacagcggccccttcgagagcaagttcaagaaggagcccgccctgaccgccggcagactgctgggcttcgaggccaacggcgccaacggcagcaaggccgtggccagaaccgccagaaagagaaagcccagccccgagcccgagggcgaggtgggcccccccaagatcaacggcgaggcccagccctggctgagcaccagcaccgagggcctgaagatccccatgacccccaccagcagcttcgtgagcccccccccccccaccgccagcccccacagcaacagaaccaccccccccgaggccgcccagaacggccagagccccatggccgccctgatcctggtggccgacaacgccggcggcagccacgccagcaaggacgccaaccaggtgcacagcaccaccagaagaaacagcaacagcccccccagccccagcagcatgaaccagagaagactgggccccagagaggtgggcggccagggcgccggcaacaccggcggcctggagcccgtgcaccccgccagcctgcccgacagcagcctggccaccagcgcccccctgtgctgcaccctgtgccacgagagactggaggacacccacttcgtgcagtgccccagcgtgcccagccacaagttctgcttcccctgcagcagacagagcatcaagcagcagggcgccagcggcgaggtgtactgccccagcggcgagaagtgccccctggtgggcagcaacgtgccctgggccttcatgcagggcgagatcgccaccatcctggccggcgacgtgaaggtgaagaaggagagagacagctag

SEQ ID NO: 257625 - protein, 1059 aa, Artificial Sequence
  derived and/or modified sequence
MEPTVADVHLVPRTTKEVPALDAACCRAASIGVVATSLVVLTLGVLLAFLSTQGFHVDHTAELRGIRWTSSLRRETSDYHRTLTPTLEALLHFLLRPLQTLSLGLEEELLQRGIRARLREHGISLAAYGTIVSAELTGRHKGPLAERDFKSGRCPGNSFSCGNSQCVTKVNPECDDQEDCSDGSDEAHCECGLQPAWRMAGRIVGGMEASPGEFPWQASLRENKEHFCGAAIINARWLVSAAHCFNEFQDPTKWVAYVGATYLSGSEASTVRAQVVQIVKHPLYNADTADFDVAVLELTSPLPFGRHIQPVCLPAATHIFPPSKKCLISGWGYLKEDFLVKPEVLQKATVELLDQALCASLYGHSLTDRMVCAGYLDGKVDSCQGDSGGPLVCEEPSGRFFLAGIVSWGIGCAEARRPGVYARVTRLRDWILEATTKASMPLAPTMAPAPAAPSTAWPTSPESPVVSTPTKSMQALSTVPLDWVTVPKLQECGARPAMEKPTRVVGGFGAASGEVPWQVSLKEGSRHFCGATVVGDRWLLSAAHCFNHTKVEQVRAHLGTASLLGLGGSPVKIGLRRVVLHPLYNPGILDFDLAVLELASPLAFNKYIQPVCLPLAIQKFPVGRKCMISGWGNTQEGNATKPELLQKASVGIIDQKTCSVLYNFSLTDRMICAGFLEGKVDSCQGDSGGPLACEEAPGVFYLAGIVSWGIGCAQVKKPGVYTRITRLKGWILEIMSSQPLPMSPPSTTRMLATTSPRTTAGLTVPGATPSRPTPGAASRVTGQPANSTLSAVSTTARGQTPFPDAPEATTHTQLPDCGLAPAALTRIVGGSAAGRGEWPWQVSLWLRRREHRCGAVLVAERWLLSAAHCFDVYGDPKQWAAFLGTPFLSGAEGQLERVARIYKHPFYNLYTLDYDVALLELAGPVRRSRLVRPICLPEPAPRPPDGTRCVITGWGSVREGGSMARQLQKAAVRLLSEQTCRRFYPVQISSRMLCAGFPQGGVDSCSGDAGGPLACREPSGRWVLTGVTSWGYGCGRPHFPGVYTRVAAVRGWIGQHIQE

SEQ ID NO: 257626 - DNA, 3180 bp, Artificial Sequence
  derived and/or modified sequence
atggagcccaccgtggccgacgtgcacctggtgcccagaaccaccaaggaggtgcccgccctggacgccgcctgctgcagagccgccagcatcggcgtggtggccaccagcctggtggtgctgaccctgggcgtgctgctggccttcctgagcacccagggcttccacgtggaccacaccgccgagctgagaggcatcagatggaccagcagcctgagaagagagaccagcgactaccacagaaccctgacccccaccctggaggccctgctgcacttcctgctgagacccctgcagaccctgagcctgggcctggaggaggagctgctgcagagaggcatcagagccagactgagagagcacggcatcagcctggccgcctacggcaccatcgtgagcgccgagctgaccggcagacacaagggccccctggccgagagagacttcaagagcggcagatgccccggcaacagcttcagctgcggcaacagccagtgcgtgaccaaggtgaaccccgagtgcgacgaccaggaggactgcagcgacggcagcgacgaggcccactgcgagtgcggcctgcagcccgcctggagaatggccggcagaatcgtgggcggcatggaggccagccccggcgagttcccctggcaggccagcctgagagagaacaaggagcacttctgcggcgccgccatcatcaacgccagatggctggtgagcgccgcccactgcttcaacgagttccaggaccccaccaagtgggtggcctacgtgggcgccacctacctgagcggcagcgaggccagcaccgtgagagcccaggtggtgcagatcgtgaagcaccccctgtacaacgccgacaccgccgacttcgacgtggccgtgctggagctgaccagccccctgcccttcggcagacacatccagcccgtgtgcctgcccgccgccacccacatcttcccccccagcaagaagtgcctgatcagcggctggggctacctgaaggaggacttcctggtgaagcccgaggtgctgcagaaggccaccgtggagctgctggaccaggccctgtgcgccagcctgtacggccacagcctgaccgacagaatggtgtgcgccggctacctggacggcaaggtggacagctgccagggcgacagcggcggccccctggtgtgcgaggagcccagcggcagattcttcctggccggcatcgtgagctggggcatcggctgcgccgaggccagaagacccggcgtgtacgccagagtgaccagactgagagactggatcctggaggccaccaccaaggccagcatgcccctggcccccaccatggcccccgcccccgccgcccccagcaccgcctggcccaccagccccgagagccccgtggtgagcacccccaccaagagcatgcaggccctgagcaccgtgcccctggactgggtgaccgtgcccaagctgcaggagtgcggcgccagacccgccatggagaagcccaccagagtggtgggcggcttcggcgccgccagcggcgaggtgccctggcaggtgagcctgaaggagggcagcagacacttctgcggcgccaccgtggtgggcgacagatggctgctgagcgccgcccactgcttcaaccacaccaaggtggagcaggtgagagcccacctgggcaccgccagcctgctgggcctgggcggcagccccgtgaagatcggcctgagaagagtggtgctgcaccccctgtacaaccccggcatcctggacttcgacctggccgtgctggagctggccagccccctggccttcaacaagtacatccagcccgtgtgcctgcccctggccatccagaagttccccgtgggcagaaagtgcatgatcagcggctggggcaacacccaggagggcaacgccaccaagcccgagctgctgcagaaggccagcgtgggcatcatcgaccagaagacctgcagcgtgctgtacaacttcagcctgaccgacagaatgatctgcgccggcttcctggagggcaaggtggacagctgccagggcgacagcggcggccccctggcctgcgaggaggcccccggcgtgttctacctggccggcatcgtgagctggggcatcggctgcgcccaggtgaagaagcccggcgtgtacaccagaatcaccagactgaagggctggatcctggagatcatgagcagccagcccctgcccatgagcccccccagcaccaccagaatgctggccaccaccagccccagaaccaccgccggcctgaccgtgcccggcgccacccccagcagacccacccccggcgccgccagcagagtgaccggccagcccgccaacagcaccctgagcgccgtgagcaccaccgccagaggccagacccccttccccgacgcccccgaggccaccacccacacccagctgcccgactgcggcctggcccccgccgccctgaccagaatcgtgggcggcagcgccgccggcagaggcgagtggccctggcaggtgagcctgtggctgagaagaagagagcacagatgcggcgccgtgctggtggccgagagatggctgctgagcgccgcccactgcttcgacgtgtacggcgaccccaagcagtgggccgccttcctgggcacccccttcctgagcggcgccgagggccagctggagagagtggccagaatctacaagcaccccttctacaacctgtacaccctggactacgacgtggccctgctggagctggccggccccgtgagaagaagcagactggtgagacccatctgcctgcccgagcccgcccccagaccccccgacggcaccagatgcgtgatcaccggctggggcagcgtgagagagggcggcagcatggccagacagctgcagaaggccgccgtgagactgctgagcgagcagacctgcagaagattctaccccgtgcagatcagcagcagaatgctgtgcgccggcttcccccagggcggcgtggacagctgcagcggcgacgccggcggccccctggcctgcagagagcccagcggcagatgggtgctgaccggcgtgaccagctggggctacggctgcggcagaccccacttccccggcgtgtacaccagagtggccgccgtgagaggctggatcggccagcacatccaggagtag

SEQ ID NO: 257627 - DNA, 3180 bp, Artificial Sequence
  derived and/or modified sequence
atggaacctaccgtagctgatgtgcacctggtgccacgcactactaaggaggtgcctgcattggacgctgcctgttgtcgggcagccagcatcggcgttgtagcaacctccttggtcgttctaactctaggggtgctcctggcatttttgtctacccaaggtttccacgtggaccacaccgccgaattgcgtggaatcagatggacttctagcctacggcgcgaaacctctgactatcacagaaccttgactcctaccctggaggctttactgcacttcctgctgagacccctgcaaacactatccctgggcttggaggaggaattgctccaaagagggatccgggctcgcctcagagagcacggcatcagcctcgctgcttatggcaccatcgtctctgcagagctaactgggaggcacaaaggccctctcgcagagcgcgacttcaagtcgggcagatgccctggcaactctttctcctgcgggaacagtcagtgtgtgactaaagttaaccctgagtgcgacgaccaggaggactgtagtgacggtagtgacgaagcccattgcgagtgcggactgcagccggcatggagaatggcaggccgcatcgtgggcggtatggaagcatctccaggagagttcccctggcaggcctctcttcgcgagaacaaggaacatttttgcggagccgctattattaatgctcgctggctcgtcagtgcagcacactgcttcaatgaattccaagatccaactaaatgggtggcctacgtgggcgcgacctacctgtctgggtccgaggcttctaccgtgcgggcccaggtggtgcagatagtgaagcaccctttgtataatgctgatactgctgacttcgacgtcgccgtcctggaactaactagcccactgccctttggccgtcacattcagccagtttgcctgcccgcagctacacacatcttccctccttctaaaaagtgcttgattagcgggtggggatatttaaaagaagacttcttagtgaagcctgaagtcttacagaaggctaccgtggagcttttggatcaggcgctatgcgcctccctatatgggcacagccttacagaccggatggtgtgtgcaggatacttagacggtaaggtggattcctgtcagggcgacagcggaggcccactcgtgtgcgaagaaccgtcaggtcggtttttcctggctggaatcgtgtcctggggcatcgggtgtgctgaggctcggcgacctggagtctacgcacgagtgacacgtctgcgcgactggattttggaggcaacaaccaaggccagcatgcccctggctccaaccatggctccagctccagcggcacccagcactgcttggcccacttcaccggaatcccccgtggtgagcacaccaacgaagtcaatgcaggctttgtctaccgtgcccctagactgggttaccgtgccgaaactgcaggagtgcggagccaggcccgccatggagaagcccacgcgcgttgtgggtggtttcggtgcagcaagcggtgaggtgccttggcaagtaagcctgaaagaggggagtagacatttttgtggcgctactgtggtgggagaccgctggcttctttctgctgcccactgcttcaaccacacgaaagttgagcaggtgagagctcatctgggcacagcgtcactcctggggctcggaggaagccccgtgaagataggattacgtcgggtcgttctgcaccctctgtacaacccaggcattctggattttgacctagcggttttagagctggcaagtcccttagccttcaataaatatatccagccggtgtgcttgcctctggccattcagaaatttcccgtcggcagaaagtgtatgatcagtggctgggggaatacccaagaagggaacgcgaccaagcccgagttactacaaaaagctagtgtcggtatcattgatcagaaaacctgtagcgtcttatataatttcagcctcaccgacagaatgatctgtgccgggtttctggaaggcaaggtagattcgtgccagggggattctggtggccctctggcatgtgaagaggcacctggcgtcttctacctggcaggcattgtgtcatggggcatcggctgtgctcaggttaagaagccgggcgtgtatactcgaatcactcgccttaaagggtggatcctggagatcatgtcatcacagcctctccctatgagccccccaagcactacaagaatgctggccaccactagcccacggacgacagcagggctgactgtgccaggagcaaccccatcccggccaacacctggtgccgcctcccgtgttactggccagccagccaatagtactctcagcgcagtgagtaccactgcgagaggacaaaccccgtttcccgacgcccccgaagccactactcatacccagctccctgattgtgggttggcccctgcagctctgacaaggattgtgggcggttctgctgccggccggggtgaatggccttggcaggtgtctctgtggttgaggaggcgtgaacatcgctgcggtgccgtgctggtggcagagagatggctgctgtccgccgcccattgcttcgacgtgtatggggaccccaaacaatgggcagcttttctgggcaccccctttcttagcggggccgaaggccaactggaaagggttgcccgtatctataaacacccattctataacctctataccttggattatgacgtggccctgttggagctggccgggccggtcagaaggtctagactggtccgccccatatgcctcccagagcctgcgccccgcccacccgacggcacccggtgtgtgatcacagggtggggatcagtacgggagggtggatctatggcacggcagctgcagaaggcagcggtaaggcttttaagcgagcaaacctgcagacgcttttatcctgtgcagatctcctcccgcatgctgtgcgccgggttcccccagggcggcgttgattcgtgttcgggtgacgccggcggccccctcgcgtgtcgcgagccctcagggcgatgggtcctaactggcgtgacctcatgggggtacggctgtggtcgtcctcactttccaggcgtatatacaagagtggccgcagtgcgcggatggataggacagcatattcaagagtag

SEQ ID NO: 257628 - DNA, 3180 bp, Artificial Sequence
  derived and/or modified sequence
atggagcccaccgtggctgatgtgcacctggtgcccaggaccaccaaggaggtgcctgccctggatgctgcctgctgccgggccgccagcattggagtggtggccaccagcctggtggtgctgaccctgggcgtgctgctggccttcctgagcacccagggcttccacgtggaccacacagctgagctgcggggcatccgctggaccagcagcctgcggcgggagaccagtgactaccacaggaccctgacccccaccctggaggccctgctgcacttcctgctgcggcccctgcagaccctgagcctgggcctggaggaggagctgctgcagaggggcatccgggcccggctgcgggagcacggcatcagcctggccgcctacggcaccatcgtgtctgctgagctgaccggccgccacaagggccccctggccgagcgggacttcaagagcggccgctgccccggcaacagcttcagctgtggcaacagccagtgtgtgaccaaggtgaacccagaatgtgatgaccaggaggactgcagtgatggcagtgatgaggcccactgtgaatgtggcctgcagcctgcctggaggatggccggcagaattgtgggcggcatggaggccagccctggagagttcccctggcaggccagcctgcgggagaacaaggagcacttctgtggggccgccatcatcaatgcccgctggctggtgtctgctgcccactgcttcaatgagttccaggaccccaccaagtgggtggcctacgtgggcgccacctacctgagcggcagcgaggccagcacagtgcgggcccaggtggtgcagatcgtgaagcaccccctgtacaatgctgacacagctgactttgatgtggccgtgctggagctgaccagccccctgcccttcggccgccacatccagcctgtgtgcctgcctgctgccacccacatcttcccccccagcaagaagtgcctgatcagcggctggggctacctgaaggaggacttcctggtgaagccagaggtgctgcagaaggccaccgtggagctgctggaccaggccctgtgtgccagcctgtatggccacagcctgacagacaggatggtgtgtgccggctacctggatggcaaggtggacagctgccagggcgacagcggcggccccctggtgtgtgaggagcccagcggccgcttcttcctggccggcatcgtgtcctggggcatcggctgtgccgaggcccggcggcctggggtgtatgcccgggtgacccggctgcgggactggatcctggaggccaccaccaaggcctccatgcccctggcccccaccatggccccagccccagctgcccccagcacagcctggcccaccagccctgagagccctgtggtgtccacccccaccaagtccatgcaggccctgagcacagtgcccctggactgggtgacagtgcccaagctgcaggagtgtggggcccggcctgccatggagaagcccaccagggtggtgggcggctttggagctgccagcggggaggtgccctggcaggtgtccctgaaggagggcagccgccacttctgtggggccaccgtggtgggggaccgctggctgctgtctgctgcccactgcttcaaccacaccaaggtggagcaggtgcgggcccacctgggcacagccagcctgctgggcctgggcggcagccctgtgaagattggcctgcggcgggtggtgctgcaccccctgtacaaccctggcatcctggactttgacctggccgtgctggagctggccagccccctggccttcaacaagtacatccagcctgtgtgcctgcccctggccatccagaagtttcctgtgggcaggaagtgcatgatcagcggctggggcaacacccaggagggcaatgccaccaagccagagctgctgcagaaggcctctgtgggcatcatcgaccagaagacctgcagcgtgctgtacaacttcagcctgacagacaggatgatctgtgccggcttcctggagggcaaggtggacagctgccagggcgacagcggcggccccctggcctgtgaggaggcccctggggtcttctacctggccggcatcgtgtcctggggcatcggctgtgcccaggtgaagaagccaggagtgtacacccgcatcacccggctgaagggctggatcctggagatcatgagcagccagcccctgcccatgagcccccccagcaccaccaggatgctggccaccaccagccccaggaccacagctggcctgactgtgcctggggccacccccagccggcccacccctggggccgccagccgggtgacaggccagcctgccaacagcaccctgtctgctgtgtccaccacagcccggggccagacccccttcccagatgcccctgaggccaccacccacacccagctgcctgactgtggcctggccccagctgccctgaccagaattgtgggcggcagcgctgctggccgcggggagtggccctggcaggtgtccctgtggctgcggcggcgggagcaccgctgtggggctgtgctggtggccgagcgctggctgctgtctgctgcccactgctttgatgtgtatggagaccccaagcagtgggccgccttcctgggcacccccttcctgtctggagctgagggccagctggagcgggtggcccgcatctacaagcaccccttctacaacctgtacaccctggactatgatgtggccctgctggagctggccggccctgtgcggcgcagccggctggtgcggcccatctgcctgcctgagcccgccccccggcccccagatggcacccgctgtgtgatcaccggctggggctctgtgcgggagggcggctccatggcccggcagctgcagaaggctgctgtgcggctgctgtctgagcagacctgccgccgcttctaccctgtgcagatcagcagcaggatgctgtgtgccggcttcccccagggcggcgtggacagctgcagcggagatgctgggggccccctggcctgccgggagcccagcggccgctgggtgctgactggagtgacctcctggggctacggctgcggccggccccacttccctggggtgtacaccagggtggccgctgtgcggggctggattggccagcacatccaggagtag

SEQ ID NO: 257629 - DNA, 3180 bp, Artificial Sequence
  derived and/or modified sequence
atggagcccaccgtggccgacgtgcacctggtgccccggaccaccaaagaggtgccggccctcgatgctgcctgctgtcgcgccgcatcgataggcgtggtggccacgtctctagtcgtcctgactctgggcgtgctgctggcctttttatcaactcagggatttcatgtggaccacacagccgaattacgtggaatccgttggacgtccagcctgcgaagggagacctctgattaccatcgcacgttgacccccactctggaggccttattacactttttgttgagacctctccaaaccctgtctctgggattggaagaggaacttctgcaacgtggcattcgtgcgagacttagagaacatggtatctccctcgccgcatatgggacgatcgtgagcgcagaactgactgggcgccacaagggcccgttagctgagagggactttaaatctgggaggtgtccaggcaactccttttcttgcgggaactctcagtgcgtgaccaaggttaatcccgagtgcgatgatcaggaagactgctctgatggctcggatgaagcacactgcgaatgtggactacagcccgcctggcgcatggccgggcgtattgtcgggggcatggaagcatccccaggcgagtttccgtggcaggccagcctacgcgaaaataaggagcacttttgtggagccgccattataaatgctcgttggctggtgtctgctgctcattgtttcaacgaattccaggacccgacaaagtgggtggcatatgtcggcgccacatacctttccggaagcgaagcgtccacagtgcgcgcgcaggtagttcagatagtcaagcatccactttataatgccgacaccgctgacttcgatgtagctgtgttagagctcacttccccactccctttcgggaggcacatccagccagtctgtctgccagctgccactcacatcttcccaccttccaagaaatgtctcatttccggctggggctatttaaaggaggattttctggtgaagcccgaagtgctccagaaagccacagtggaactcttagaccaagcactttgcgcttcactctatgggcactcccttactgatcggatggtctgtgctggctatctcgacgggaaagtggattcctgtcagggtgacagcggtggtcccttggtctgtgaggagccgagcggaaggttctttctggcaggcatagtctcgtggggcatcgggtgtgctgaagcccgcaggcccggggtgtatgcccgggtcactcgccttcgcgattggatccttgaggctaccacaaaggcttcgatgccattggctcccacaatggccccggcccctgccgcgcccagcacagcctggccgaccagcccggaatcccccgtagtctctactcccacaaaaagcatgcaggcattgtccactgtccccctcgattgggtgactgtgcccaaactgcaggaatgtggcgcgcggcctgccatggagaagcccacaagggtagttggcggctttggcgctgcctcaggcgaggttccatggcaggtgtccctcaaggagggaagccggcacttttgtggtgctaccgtcgtgggcgacagatggctgctcagcgccgctcattgcttcaaccacacaaaagtagagcaggttcgagcccatctcggaactgccagccttctggggctcggtggttcgccagtcaaaattggcctgaggagggtcgtgcttcatcccctgtataatccaggcatcttagacttcgacctggccgttttggaactggcatcccccctggctttcaataaatatatccagccagtctgtctcccgttggctatccagaaattcccagtcgggcgcaaatgtatgatttctgggtgggggaatacacaagaagggaacgccactaagcccgaattactgcagaaagcttcagtgggtattatagatcagaagacatgtagcgtattgtataacttctctctgaccgatcgcatgatatgtgccgggtttctggagggaaaagtagactcatgccagggcgatagcggcggcccattagcctgtgaggaggcccctggcgtgttctatttggcaggtattgtttcatggggcatcggatgtgcccaggtaaagaaacccggcgtctatacgaggatcaccagactgaaaggctggatccttgaaatcatgtctagccaaccgttacctatgagccctccctctactacacggatgctggctaccactagcccccgaactacagctgggctcacagtacctggagcaaccccgtctagacctacacctggtgcagcttcaagagtcacaggccagcctgctaacagcaccctgagtgcagtttccaccaccgcccggggccagacccccttccccgatgcccctgaggcgactacccatacccaactacctgactgcggtctggcgcctgctgccttaacaaggattgtgggtggcagtgcagcgggtagaggtgagtggccatggcaggtgagcctgtggttacgccgcagagagcatcgctgtggtgccgtgctggtagccgaacgatggctgttgtcagctgcacactgcttcgatgtttacggtgaccccaaacaatgggcagcttttctgggaaccccctttctgtcaggtgccgaaggccagcttgaacgagtggcgagaatctacaagcacccgttctataatttgtacacgctggactacgacgtggcactgctcgaactggcgggaccagtaagacggagccggttggtgcgcccaatctgcctgcctgagcctgcaccccggccaccagacggcacccgctgcgtgattacgggctggggtagcgtgcgagagggagggagcatggctcggcaactccagaaagccgccgtcagattgctgagcgagcagacttgcaggaggttctatccggtgcagatttcatcacgcatgttatgcgccgggttcccacaggggggggtggattcctgtagtggtgacgccggaggacccctcgcctgtagagaaccttcaggccgttgggtgcttactggagtgacatcatggggctatgggtgtggcagaccccattttcccggagtttacacaagagtggcagctgtccgagggtggataggtcagcacatacaagagtag

SEQ ID NO: 257630 - DNA, 3180 bp, Artificial Sequence
  derived and/or modified sequence
atggaaccgacggtcgcggacgtccaccttgtacctcgaacgaccaaagaagtacccgcactggatgcagcctgctgtcgtgctgcttccatcggggtggttgccacttcactcgtggtgctaactctgggcgtactcctagctttcctttcaacccagggttttcatgtcgatcacactgccgaactcagaggcatccgatggacttcctccctgcggcgtgagacttccgactaccacaggaccctgacccctaccttggaggcactgctgcacttccttctgcgacccctgcagaccctctcactggggctggaggaggagctgctgcagaggggcattagggccaggctgcgtgagcatgggatcagtttggccgcatatggtaccatcgtctccgcggagctgacgggcagacataagggtccacttgccgagcgagactttaagtccggcagatgtccagggaattcttttagctgcggcaatagtcaatgtgtgaccaaagtgaatcctgagtgtgatgatcaggaagactgcagcgacggatcagacgaggctcactgtgaatgtggacttcagcctgcctggaggatggctggccgaatcgtgggtgggatggaggcctccccaggcgaattcccctggcaggcctccctccgcgagaacaaggagcacttctgcggtgccgcaattatcaacgcccgttggttggtgagcgcagcccattgcttcaacgagtttcaggaccccacaaaatgggtagcctacgtgggcgctacctacttgagcggatctgaggcgtccactgtacgcgctcaggtggtccagatcgtgaaacacccgctctacaatgcggacacggccgatttcgatgtagccgtgcttgagcttacctctccacttcctttcggacgtcacatccagccagtgtgtctgcccgctgcgacccacattttccctccttctaagaagtgcttaatttccggatggggttacctaaaggaggattttctcgtgaaaccagaagtcctgcagaaggcaacggtcgagctgctggaccaagccctgtgcgcaagcctgtacggccacagcttgaccgatcgtatggtgtgcgctgggtatctggacggcaaggtggatagttgccagggagactctggcggaccactcgtctgtgaggagccctctgggcgtttcttcctggcaggaatcgtgtcctggggaatcggctgcgccgaggctagaagaccaggcgtttatgccagggtgacacggctgcgcgattggatactggaggctacaacgaaggcgtctatgcccttggctcctacaatggcacctgctcccgcagctccatctacagcatggcctacgtccccggagagtccggttgtttcaactccaacgaagagtatgcaggctctgtctactgtcccattggattgggtgacagtgcctaaattgcaggagtgcggtgcacgcccagctatggaaaaacctacacgggtcgtggggggtttcggggctgcatccggtgaggtgccgtggcaggttagcctgaaggagggaagcaggcacttttgtggcgcaaccgtggtcggcgaccgatggctgctcagtgccgctcattgcttcaatcacacaaaagtggagcaagtcagggcacatctggggaccgccagcctgctcggtctcgggggttctccggtcaagatcggcctgaggcgcgtagtactgcatccattatataaccccggaatcctggacttcgacctcgctgttctagaactcgcttccccattagcctttaataaatacatccagcccgtgtgtctacctctggccattcagaaatttccagtcggaagaaaatgtatgatatcgggctggggaaacactcaagaagggaacgccaccaagcccgaattacttcagaaggcgtctgtgggcataatagatcagaaaacttgttcagtgctgtacaatttttctctcacagataggatgatctgtgctggcttcttagaaggcaaggtcgattcctgccagggcgattctggtgggcctctggcttgtgaagaggcccctggagtcttctatttagccggaattgtaagctgggggattgggtgcgcacaagtgaagaaacccggtgtttatacccgcatcacgcgtttgaaaggctggatcttagaaatcatgtcgtcccagcccctgccgatgtcgcccccatctacaactagaatgcttgcaacaacttccccacgcactaccgctgggttgaccgtgccgggtgcaacacccagtagacctacccctggtgccgctagtcgagttacggggcaacccgcaaattctacactgtccgcagttagtaccaccgcccgtggccagacccccttcccagacgccccagaggccaccacccacacccagctgcccgattgtggactcgcccctgcagccctgacgcgcattgtaggcggttccgcagccggacgaggggaatggccttggcaggtgtctctgtggctgcgcagacgcgagcacagatgtggcgcagtgttagttgcagagcgttggctgctctcagccgctcattgttttgacgtgtacggagatccaaagcaatgggcagcatttctcggaactcctttcctgtctggcgctgaggggcaacttgagcgtgtagcacgaatttataagcatccattctacaatctttacaccctcgattacgatgtggccctgttagaactggccggacccgtaagacggtcacgcctggtaaggccaatctgcctccccgaacccgctcctcgacctcctgacggtactagatgtgttattactgggtggggtagtgtacgggaaggaggttccatggctcgccagcttcagaaagcggcagtacggctcctttccgaacaaacttgtcgacgattctacccggtccagatcagcagtcggatgttgtgcgcgggattcccacaggggggtgtggactcatgctcaggcgatgccggaggacccctggcatgtcgcgaaccttccggcagatgggtgctcacaggagtgacctcctggggctacggatgtggcagaccccatttcccaggggtgtacacaagagtggcggcagtccggggttggattgggcagcatattcaggagtag

SEQ ID NO: 257631 - DNA, 3180 bp, Artificial Sequence
  derived and/or modified sequence
atggagcccactgtggctgacgtacacctcgtgcccaggacaaccaaggaagtccccgctctggatgccgcgtgctgtcgagcggccagcattggcgtggtggccaccagccttgtcgtcctcaccctgggagtccttttggccttcctctctacacagggcttccacgtggaccacacggccgagctgcggggaatccggtggaccagcagtttgcggcgggagacctcggactatcaccgcacgctgacgcccaccctggaggcactgctgcactttctgctgcgacccctccagacgctgagcctgggcctggaggaggagctattgcagcgagggatccgggcaaggctgcgggagcacggcatctccctggctgcctatggcacaattgtgtcggctgagctcacagggagacataagggacccttggcagaaagagacttcaaatcaggccgctgtccagggaactccttttcctgcgggaacagccagtgtgtgaccaaggtgaacccggagtgtgacgaccaggaggactgctccgatgggtccgacgaggcgcactgcgagtgtggcttgcagcctgcctggaggatggccggcaggatcgtgggcggcatggaagcatccccgggggagtttccgtggcaagccagccttcgagagaacaaggagcacttctgtggggccgccatcatcaacgccaggtggctggtgtctgctgctcactgcttcaatgagttccaagacccgacgaagtgggtggcctacgtgggtgcgacctacctcagcggctcggaggccagcaccgtgcgggcccaggtggtccagatcgtcaagcaccccctgtacaacgcggacacggccgactttgacgtggctgtgctggagctgaccagccctctgcctttcggccggcacatccagcccgtgtgcctcccggctgccacacacatcttcccacccagcaagaagtgcctgatctcaggctggggctacctcaaggaggacttcctggtcaagccagaggtgctgcagaaagccactgtggagctgctggaccaggcactgtgtgccagcttgtacggccattcactcactgacaggatggtgtgcgctggctacctggacgggaaggtggactcctgccagggtgactcaggaggacccctggtctgcgaggagccctctggccggttctttctggctggcatcgtgagctggggaatcgggtgtgcggaagcccggcgtccaggggtctatgcccgagtcaccaggctacgtgactggatcctggaggccaccaccaaagccagcatgcctctggcccccaccatggctcctgcccctgccgcccccagcacagcctggcccaccagtcctgagagccctgtggtcagcacccccaccaaatcgatgcaggccctcagtaccgtgcctcttgactgggtcaccgttcctaagctacaagaatgtggggccaggcctgcaatggagaagcccacccgggtcgtgggcgggttcggagctgcctccggggaggtgccctggcaggtcagcctgaaggaagggtcccggcacttctgcggagcaactgtggtgggggaccgctggctgctgtctgccgcccactgcttcaaccacacgaaggtggagcaggttcgggcccacctgggcactgcgtccctcctgggcctgggcgggagcccggtgaagatcgggctgcggcgggtagtgctgcaccccctctacaaccctggcatcctggacttcgacctggctgtcctggagctggccagccccctggccttcaacaaatacatccagcctgtctgcctgcccctggccatccagaagttccctgtgggccggaagtgcatgatctccggatggggaaatacgcaggaaggaaatgccaccaagcccgagctcctgcagaaggcgtccgtgggcatcatagaccagaaaacctgtagtgtgctctacaacttctccctcacagaccgcatgatctgcgcaggcttcctggaaggcaaagtcgactcctgccagggtgactctgggggccccctggcctgcgaggaggcccctggcgtgttttatctggcagggatcgtgagctggggtattggctgcgctcaggttaagaagccgggcgtgtacacgcgcatcaccaggctaaagggctggatcctggagatcatgtcctcccagccccttcccatgtctcccccctcgaccacaaggatgctggccaccaccagccccaggacgacagctggcctcacagtcccgggggccacacccagcagacccacccctggggctgccagcagggtgacgggccaacctgccaactcaaccttatctgccgtgagcaccactgctaggggacagacgccatttccagacgccccggaggccaccacacacacccagctaccagactgtggcctggcgccggccgcgctcaccaggattgtgggcggcagcgcagcgggccgtggggagtggccgtggcaggtgagcctgtggctgcggcgccgggaacaccgttgcggggccgtgctggtggcagagaggtggctgctgtcggcggcgcactgcttcgacgtctacggggaccccaagcagtgggcggccttcctaggcacgccgttcctgagcggcgcggaggggcagctggagcgcgtggcgcgcatctacaagcacccgttctacaatctctacacgctcgactacgacgtggcgctgctggagctggcggggccggtgcgtcgcagccgcctggtgcgtcccatctgcctgcccgagcccgcgccgcgacccccggacggcacgcgctgcgtcatcaccggctggggctcggtgcgcgaaggaggctccatggcgcggcagctgcagaaggcggccgtgcgcctcctcagcgagcagacctgccgccgcttctacccagtgcagatcagcagccgcatgctgtgtgccggcttcccgcagggtggcgtggacagctgctcgggtgacgctgggggacccctggcctgcagggagccctctggacggtgggtgctaactggggtcactagctggggctatggctgtggccggccccacttcccaggtgtctatacccgggtggcagctgtgagaggctggataggacagcacatccaggagtga

SEQ ID NO: 257632 - protein, 458 aa, Artificial Sequence
  derived and/or modified sequence
MGLCYSLRPLLFGGPGDDPCAASEPPVEDAQPAPAPALAPVRAAARDTARTLLPRGGEGSPACARPKADKPKEKRQRTEQLSAEEREAAKEREAVKEARKVSRGIDRMLRDQKRDLQQTHRLLLLGAGESGKSTIVKQMRILHVNGFNPEEKKQKILDIRKNVKDAIVTIVSAMSTIIPPVPLANPENQFRSDYIKSIAPITDFEYSQEFFDHVKKLWDDEGVKACFERSNEYQLIDCAQYFLERIDSVSLVDYTPTDQDLLRCRVLTSGIFETRFQVDKVNFHMFDVGGQRDERRKWIQCFNDVTAIIYVAACSSYNMVIREDNNTNRLRESLDLFESIWNNRWLRTISIILFLNKQDMLAEKVLAGKSKIEDYFPEYANYTVPEDATPDAGEDPKVTRAKFFIRDLFLRISTATGDGKHYCYPHFTCAVDTENIRRVFNDCRDIIQRMHLKQYELL

SEQ ID NO: 257633 - protein, 174 aa, Artificial Sequence
  derived and/or modified sequence
MFDVGGQRDERRKWIQCFNDVTAIIYVAACSSYNMVIREDNNTNRLRESLDLFESIWNNRWLRTISIILFLNKQDMLAEKVLAGKSKIEDYFPEYANYTVPEDATPDAGEDPKVTRAKFFIRDLFLRISTATGDGKHYCYPHFTCAVDTENIRRVFNDCRDIIQRMHLKQYELL

SEQ ID NO: 257634 - protein, 320 aa, Artificial Sequence
  derived and/or modified sequence
MRILHVNGFNPEEKKQKILDIRKNVKDAIVTIVSAMSTIIPPVPLANPENQFRSDYIKSIAPITDFEYSQEFFDHVKKLWDDEGVKACFERSNEYQLIDCAQYFLERIDSVSLVDYTPTDQDLLRCRVLTSGIFETRFQVDKVNFHMFDVGGQRDERRKWIQCFNDVTAIIYVAACSSYNMVIREDNNTNRLRESLDLFESIWNNRWLRTISIILFLNKQDMLAEKVLAGKSKIEDYFPEYANYTVPEDATPDAGEDPKVTRAKFFIRDLFLRISTATGDGKHYCYPHFTCAVDTENIRRVFNDCRDIIQRMHLKQYELL

SEQ ID NO: 257635 - DNA, 1377 bp, Artificial Sequence
  derived and/or modified sequence
atgggcctgtgctacagcttgcggcctctgcttttcggcggacccggggatgatccctgtgccgcctcagagccaccagttgaggatgcacagcctgctcctgcacccgcgctagcccccgtaagagccgccgcccgtgataccgcgagaaccttgttacctcgtggtggagagggatctcctgcttgcgcgcgccctaaggcggataaacccaaagagaaaaggcaaaggactgaacagctgagtgccgaagagcgcgaagcagccaaggagcgggaagccgtaaaggaggcgagaaaagtgagtcgtggaattgatcggatgctcagggaccagaaaagagatttacagcagacacaccgccttctgcttcttggggcaggagaaagcggcaaatccaccatagtcaagcagatgcgtatcctgcacgtgaatggattcaacccagaagaaaaaaagcaaaagattctagatatccggaagaacgtcaaggacgccatagtcacgattgtctctgccatgtccaccatcatccctcccgtgccacttgccaaccccgaaaaccagtttaggtcagattacatcaaaagcattgctcccattactgattttgaatattctcaggagttctttgatcatgtgaaaaagttatgggatgatgagggcgttaaggcctgctttgagcgctccaatgagtatcagctgattgattgcgcgcagtactttctggagaggatcgattctgtgtccctggtggactacacccctaccgaccaggacctcttgcggtgtcgcgtactaacaagcggaatctttgagacccgttttcaagtggataaggtgaacttccacatgttcgatgtgggcggtcagagagacgagcgtcgaaagtggatccagtgttttaatgatgtgaccgccattatctacgtggctgcttgtagctcttacaacatggtcatccgggaggacaataataccaacaggctgagagaaagtctcgatctgttcgaaagcatttggaataacagatggctccggacaatcagcatcattctcttcctgaataagcaggacatgctggcagaaaaggtcctagccggtaaaagcaagatcgaagactactttcctgagtacgccaattatacggtgcccgaagatgctacaccggacgcaggcgaagaccctaaagtcacaagggctaagttcttcatcagagatttgtttttaagaatctctacggctactggggatggtaaacattactgctacccgcatttcacctgcgccgttgacactgagaacatcagaagggttttcaatgattgtagggacatcatccagcgaatgcatctcaaacaatatgaactgctgtag

SEQ ID NO: 257636 - DNA, 6225 bp, Artificial Sequence
  derived and/or modified sequence
cggttcggtccgctctgggcgttagcaagtgatctccagccaaggcggccgccaccccttgcacacagcagaaaatgcaaaatgaccctctggggcagtgaggggctgtggccctcggccccggcctgccgcacccccttcccgcagctggcggccggcagcgccgaacagggtccgggtgcagccccctcccgcccctccgctgaggcgccggcctgaactgggcgcgggaaccaggccgccctcggcgcccagcctgccctagtcccgcgcgccgcccccgctgtgccgcgcccacatgggtctgtgctacagtctgcggccgctgcttttcgggggcccaggggacgacccctgcgcggcctcggagccgccggtggaggacgcgcagcccgccccggccccggccctggccccagtccgggcggccgcaagggacacggcccggaccctgctccctcggggcggcgaagggagcccggcatgcgctcggcccaaagcagacaagccgaaggagaagcggcagcgcaccgagcagctgagtgccgaggagcgcgaggcggccaaggagcgcgaggcggtcaaggaggcgaggaaagtgagccggggcatcgaccgcatgctgcgcgaccagaagcgcgacctgcagcagacgcaccggctcctgctgctcggggctggtgagtctgggaaaagcactatcgtcaaacagatgaggatcctgcacgtcaatgggtttaatcccgaggaaaagaaacagaaaattctggacatccggaaaaatgttaaagatgctatcgtgacaattgtttcagcaatgagtactataatacctccagttccgctggccaaccctgaaaaccaatttcgatcagactacatcaagagcatagcccctatcactgactttgaatattcccaggaattctttgaccatgtgaaaaaactttgggacgatgaaggcgtgaaggcatgctttgagagatccaacgaataccagctgattgactgtgcacaatacttcctggaaagaatcgacagcgtcagcttggttgactacacacccacagaccaggacctcctcagatgcagagttctgacatctgggatttttgagacacgattccaagtggacaaagtaaacttccacatgtttgatgttggtggccagagggatgagaggagaaaatggatccagtgctttaacgatgtcacagctatcatttacgtcgcagcctgcagtagctacaacatggtgattcgagaagataacaacaccaacaggctgagagagtccctggatctttttgaaagcatctggaacaacaggtggttacggaccatttctatcatcttgttcttgaacaaacaagatatgctggcagaaaaagtcttggcagggaaatcaaaaattgaagactatttcccagaatatgcaaattatactgttcctgaagacgcaacaccagatgcaggagaagatcccaaagttacaagagccaagttctttatccgggacctgtttttgaggatcagcacggccaccggtgacggcaaacattactgctacccgcacttcacctgcgccgtggacacagagaacatccgcagggtgttcaacgactgccgcgacatcatccagcggatgcacctcaagcagtatgagctcttgtgaggatgctgccgccaccctgcgacggagcggcgccccggactgcctgactgccagccccatgccatggtaggaggcagagtctctagttccatctcgctgccgtctgtcccgttctgtgtcgaccaccaagcctctggctacctctgtcccctcaggtttggttgtgtagcttctgttgtcattgaatacggcctcccgcagcatcccacccccaaaccaccgactctcattgccgacactgcagcagaatctctccgggtgggagccccattattcattctccctttattgattcatcgaggagaacttggtagatggggagaaaacacagttggtttttttttccacgttatcaaccgtgactgcaagagcgttcgtgcagtgccctgagccacggccgtctctgattctccctttatgaagctgcaggctgacgagagatggtcccttcccattggccttagcccaagacttggagtcgaccccaagcgacagagtgaccagaaacccttttacagtcacattcagagtcgctgctggcctcaggcatttgaattagagctactttgagcctcttaggcagaaaacctaccacattcactactgcaaaatgtgtcctgtctaaaaatgattctctaaactttccctatacttaggcatagtcttctttcttagattctctttgttgttgtccctattgctggtttattacactgtacagaccacaaaatgtaatattcttttgtataactactaaagaaaaatccttgtagatctttgtgccttcaccatggctatctatacctgtacatgaaatgtgtttgtattgtgctgaagagcttaatgtcaacattacctgctgcttactctgaaaaaaggaatgaatggtagctgtagaatttaggatattttatcaggttggcactttataaaatactccctgatttaaaaaattgtaagttatacacgttaatcatccacattctatcgacaatgtaccaacatcacaagctgttgcaaccacctgctgttacttctctgagctgtaaaaacctgaactcaattcaggggtacaaattgcaatctaatcttttcagggaaccagggatttttttctctctctctagacaatatgtttcctcattagtctgctaatgaaacacttcttcaagttccccaagtgggaacaggtccatcattcccttagtcaaaactttggacacaggctacgtcatacaagtaagcaaacagtaagagaaaaacaaaatgtggccaggcgcggtggctcacgcctgtaatcccagcactttgggaggccgaggcaggcggatcacgaggccaggagatcaagaccatcctggctaacatggcgaaaccctgtctctaccaaaaatacaaaaattagccaggcgtggtggcgggcacctgtaatctcagctactcgagaggctgaggcaggagaatctcttgaacctgggaggtggagattgcagtgagccgaggtcgtgccatcgcactccagcctggacatcaaagtgagactcaggccaaaaaaaaaaaaaaaaaaaaccttgacgtgtcaatgtttgtgtctggcctaggagaatgaggatgacagcttcacttgccttttgaagaagaaacattacaaaaccttaatctgaagtataaagtcaaaagatacggctctttctcacacttgcaagacttacaaatacagcctcaaacattatgacacaccaacaatatctagaaagtaagaactggtgtagcaatgatgcttcatattctagctgtagccacagagttgagggtagtttttgtaggtctaaaataataatctataaagatgtccaaagttaaattttcaacaatacaaatctagagaagtgacagcctacattacttcattattactcttcttttagtctttagtctttaatattttaaagtttactctataaatcagcattttgtaatcctttataaactcatccagatttaaatgctactttttcatgaagaaaggataactttatagacagtcagtgcaacacacacattttatctcatcaccgtcttactgcctccccatccactgtctcataaagccctcagctgaactaagataaataatacaatggaaattattttcagttccccttgcactgtcaaagtaaaacaagaaaactgaaaagctgcacccccagcaagaaagggaagtatgctgttgtatgcatcattactcaacaattaccctctaactaaacatcctgtttaagagtttaattcaaacaacagccagactgttaagaaaaaaaacaaaaagaataacttttatctggcttacaattattaaagcatttattttcaggtaccaaaagccatatcccattccactttttaagtttcttttgatcactgacaggcattaacagatgtagcaacgtggtctcctatagagaaaattacacttatctaaaaatctgattccattaattgatcaagtataaaaatctacgaaaacaatatgttctgcacatcacatctgtacttttttttttttaaatatattttttgagacggagtctcactctgttgcccaggctggagtgcagtggcatgatcttggctcactgcaacctccgcctcccgggctcaagggattctcctgcctcagcctcagctggtattataggcacttgctaccatgcttggctaatttttgtatttctagcggagacgaggtttcaccatgttggccaggctggtcttgaactcctgacctcaagtgatccacccgcctcagcctcccaaagtgctgggattacaggtgtgagccactgtgcccggccacatctgtacttttaagggtacagctttacagtacataggaatttgagaaccacttcacaggaagagggaaacagcccaatatttatttatgtatacacataatcccaagtgtgtgctggggccaccaggcccttcctgggggaacaaggactgtcgtgcatgtgagtgacgacattaatagcatttacatactgtacagatgcaacctttgatgatacatatatttgataaaaatgagaaaacagatttgttgtagagtacctgtccacttttatagcatgagaacagtacaatcaactatttattttgcagttactcatttcagtgattgagaatttctgtgctgtgcagagagacggcctgtaattggtctcatcatccacttgattctaacatgatctctgcccaaagttccatttcttgggctttgatatttataatggcgcctgctcttcatcttgtcttacgctttccgagcaagttcaaaccagaaagaaaaggtgaggctagaagcccaaagtgagtgagtgtgaggaccacaaggaagcccaccactccacagtagatgatcaaaaccacatcctcacgtgggaggtagcacttggagagggtgtagtctgtgggcgtgatgctaccctggaaaggagaagggaaagttatgctgagagcaccaggcacacgttgaacaccgcagtcttagaaacagcagagggaagactgccttctcaggtccccctcaggtgaggcagggaacgggccctcctcacctgagaccaagggggcccagccttctccctgcacagctcacccccgaccagcccaggctccagcaggagagacaagtaaggcccaagtgtgcctgagtggaaaatgtctgggacactgacctgtcaaaactggcccctggctcactgggttcccatcaaatatagtgggggatccataacagagattcagagaggcaccgtggagttccagggtcatcggtcagcgaggaacaaggagggaaaggtgtcttcctgccccttgatgctcaactaagcatctgttccctagaaatacatgtgtccaggtcgtctccatgggcttttctttgcagatacttttatgtggaacaacagtggcaaatgttttcatttactttgaatttgaaaatgttagggtttcctccacctttttatgaagtaaaagaacctgtcgtaccagcatcatgagctggatgcaggagcccatggctgaaaggagttaaaacgcccagtggtcattaagtgaaacatcttttatcaacctgcaaaagctgcagcgttctctgccaggtcaaatgggcatgtttagaaaataagagaagatggctgagtatagctaatgaataaatggttgtttctttagaaaattaaacacacacagagtgtaagaggagaggatacggccctccctgaaggataaagtccacctggacggtgccctgccctcgcttctcacattaactgcccaggaatgtcatgctgattggttcccggaagggtgtttggcaaggggcagtgtatggagctacgtgtagaaggagagaaatttgtgtgtggcttttgtaaattttgaccgattgcagcaattaaatagttgattactgtgttgatttaaatacttatgaaagctttcagacaaaaataaactttcacgttaccatgatgaaa

SEQ ID NO: 257637 - DNA, 1491 bp, Artificial Sequence
  derived and/or modified sequence
aagccagctgtatttacggtagcgagggctggaccggcggcggcatttacggtaacgggggccgggctcgcggaggcccgtcggttcggtccgctctgggcgttagcaagtgatctccagccaaggcggcgaagggagcccggcatgcgctcggcccaaagcagacaagccgaaggagaagcggcagcgcaccgagcagctgagtgccgaggagcgcgaggcggccaaggagcgcgaggcggtcaaggaggcgaggaaagtgagccggggcatcgaccgcatgctgcgcgaccagaagcgcgacctgcagcagacgcaccggctcctgctgctcggggctggtgagtctgggaaaagcactatcgtcaaacagatgaggatcctgcacgtcaatgggtttaatcccgaggaaaagaaacagaaaattctggacatccggaaaaatgttaaagatgctatcgtgacaattgtttcagcaatgagtactataatacctccagttccgctggccaaccctgaaaaccaatttcgatcagactacatcaagagcatagcccctatcactgactttgaatattcccaggaattctttgaccatgtgaaaaaactttgggacgatgaaggcgtgaaggcatgctttgagagatccaacgaataccagctgattgactgtgcacaatacttcctggaaagaatcgacagcgtcagcttggttgactacacacccacagaccaggacctcctcagatgcagagttctgacatctgggatttttgagacacgattccaagtggacaaagtaaacttccacatgtttgatgttggtggccagagggatgagaggagaaaatggatccagtgctttaacgatgtcacagctatcatttacgtcgcagcctgcagtagctacaacatggtgattcgagaagataacaacaccaacaggctgagagagtccctggatctttttgaaagcatctggaacaacaggtggttacggaccatttctatcatcttgttcttgaacaaacaagatatgctggcagaaaaagtcttggcagggaaatcaaaaattgaagactatttcccagaatatgcaaattatactgttcctgaagacgcaacaccagatgcaggagaagatcccaaagttacaagagccaagttctttatccgggacctgtttttgaggatcagcacggccaccggtgacggcaaacattactgctacccgcacttcacctgcgccgtggacacagagaacatccgcagggtgttcaacgactgccgcgacatcatccagcggatgcacctcaagcagtatgagctcttgtgaggatgctgccgccaccctgcgacggagcggcgccccggactgcctgactgccagccccatgccatggtaggaggcagagtctctagttccatctcgctgccgtctgtcccgttctgtgtcgaccaccaagcctctggctacctctgtcccctcag

SEQ ID NO: 257638 - DNA, 1377 bp, Artificial Sequence
  derived and/or modified sequence
atgggcctgtgctacagcctgcggcccctgctgtttggaggccctggagatgacccctgtgccgccagcgagccccctgtggaggatgcccagcctgccccagccccagccctggcccctgtgcgggccgccgcccgggacacagcccggaccctgctgccccggggcggggagggcagccctgcctgtgcccggcccaaggctgacaagcccaaggagaagaggcagaggacagagcagctgtctgctgaggagcgggaggccgccaaggagcgggaggccgtgaaggaggccaggaaggtgtcccggggcatcgacaggatgctgcgggaccagaagagggacctgcagcagacccaccggctgctgctgctgggcgctggggagagcggcaagagcaccatcgtgaagcagatgaggatcctgcacgtgaatggcttcaaccctgaggagaagaagcagaagatcctggacatcaggaagaatgtgaaggatgccatcgtgaccatcgtgtctgccatgagcaccatcatcccccctgtgcccctggccaaccctgagaaccagttcagaagtgactacatcaagagcatcgcccccatcacagactttgagtacagccaggagttctttgaccacgtgaagaagctgtgggatgatgagggcgtgaaggcctgctttgagaggagcaatgagtaccagctgattgactgtgcccagtacttcctggagagaattgacagcgtgtccctggtggactacacccccacagaccaggacctgctgcgctgccgggtgctgaccagcggcatctttgagacccgcttccaggtggacaaggtgaacttccacatgtttgatgtgggcggccagagagatgaaagaaggaagtggatccagtgcttcaatgatgtgacagccatcatctacgtggccgcctgcagcagctacaacatggtgatccgggaggacaacaacaccaaccggctgcgggagagcctggacctgtttgagagcatctggaacaaccgctggctgcggaccatcagcatcatcctcttcctgaacaagcaggacatgctggccgagaaggtgctggccggcaagagcaagattgaggactacttcccagaatatgccaactacacagtgcctgaagatgccaccccagatgctggggaggaccccaaggtgacccgggccaagttcttcatccgggacctcttcctgcgcatcagcacagccactggagatggcaagcactactgctacccccacttcacctgtgctgtggacacagagaacatcagaagagtcttcaatgactgccgggacatcatccagaggatgcacctgaagcagtatgagctgctgtag

SEQ ID NO: 257639 - DNA, 1377 bp, Artificial Sequence
  derived and/or modified sequence
atgggcctgtgctacagcctgcggcccctgctgttcggcggccccggtgatgacccctgcgctgctagcgagccccccgtggaggacgcacagcccgccccggcccctgccctggcgccagtgagggcggccgcccgtgatacagccaggactctcctgccgagggggggagaagggtctccagcgtgtgcacggcccaaggctgataaacctaaggagaagaggcaacgaacggaacagctctccgcagaggagcgtgaggccgcaaaggagcgagaagccgttaaggaggcaaggaaagttagccgcggaatcgacagaatgttgcgggatcagaagagagatctccagcagacacatcgactgctgctactgggtgcaggggaaagcggcaagagtaccattgtgaaacagatgcggattcttcatgtgaatggcttcaatcctgaggaaaagaagcagaagattctggatattagaaagaacgtaaaagatgccatagttacgatcgtgtctgctatgtctaccatcatccctccggtccccctcgcgaatccagagaaccagtttaggagtgactatatcaagtccattgctcctattaccgacttcgagtactctcaggaattttttgaccatgtgaagaaactgtgggacgatgagggcgtgaaagcgtgtttcgagcggtctaatgaatatcagcttattgattgtgcccagtatttcctggagcggattgacagcgtatctctcgtggattacacacccaccgatcaggatctattgcggtgtagagtgctgaccagcgggattttcgagacacgcttccaggtggataaggtgaattttcacatgttcgatgtgggagggcagagagacgaacggcgcaagtggattcagtgcttcaacgatgttaccgctattatttacgtggctgcatgttcgagttacaatatggtgatccgtgaggataacaacaccaaccgcctccgtgagtctttggacctgtttgagtccatttggaacaatagatggctgcgaacaatatccataatcctgttcttgaataaacaagacatgcttgccgaaaaagtgctcgcagggaagagtaaaattgaggactacttcccggagtatgctaactataccgtgcctgaagatgccacacctgacgctggcgaggatccaaaagtcacacgagccaagtttttcatccgggatctcttccttaggatttccacagcaactggtgacggaaaacactactgctacccacactttacttgtgccgttgacacggagaacatacgacgagtgttcaatgactgcagagacatcattcagcgcatgcacctgaagcagtacgagctgctgtag

SEQ ID NO: 257640 - DNA, 1377 bp, Artificial Sequence
  derived and/or modified sequence
atgggtctctgctactctctgaggcctctcctgttcggcggacccggtgacgacccatgtgcggcatcagagcccccagtcgaagatgcgcagccagcacctgcccctgctctggccccagtccgcgctgccgcacgcgataccgcccgaacactcctgccacgaggcggagaggggtcgcccgcttgtgctcgacccaaggctgataagccaaaggagaaaagacagcgaaccgagcagctcagcgccgaggaaagggaggccgcaaaggaaagggaggccgtcaaggaagcacgaaaagtgtcccggggtattgatagaatgctcagggaccaaaagagggatctgcagcaaacacaccgccttttactgttgggggcaggggaatctgggaagagtacaatcgtcaagcagatgagaatcctccacgtaaatggtttcaatccggaggagaaaaagcaaaagattttagacattcggaaaaacgtgaaggatgccatagtcacaatcgtaagtgcgatgagtaccattatccccccagtccccctagctaacccagagaaccagtttcgatcagactatataaagtcaattgcaccaatcaccgattttgaatatagtcaagaattcttcgaccatgtaaagaagttgtgggacgacgagggggttaaggcatgcttcgagcgcagcaatgagtatcaattaatcgattgcgcccaatattttctcgagaggatcgattctgtttcccttgtggattacacccccacagaccaggacctgctccgttgcagggtactgacatctggcattttcgaaacccggtttcaggtggataaggtcaactttcatatgtttgatgtaggcggtcagagagatgaacgcagaaaatggatccaatgcttcaatgacgtgaccgccatcatctacgtcgccgcttgtagtagctataatatggtgattagggaagataacaataccaatagactacgcgagagcctggacttatttgaaagcatatggaacaatcgatggctgcgcaccatatctatcatcttattcctgaacaagcaagacatgctggccgaaaaggttctggctgggaagtccaagatagaggattatttcccagagtatgctaactataccgtccccgaagacgccaccccagacgcgggtgaagaccccaaggtgaccagggccaagtttttcattcgagacctgttcctgcgaatcagcacagcaactggagatgggaagcattattgttacccacactttacctgtgccgtggatacagagaatatccggagagtgtttaatgactgccgcgacattattcaaaggatgcatctaaagcaatacgaactgctgtag

SEQ ID NO: 257641 - DNA, 1377 bp, Artificial Sequence
  derived and/or modified sequence
atgggcctgtgctacagcctgagacccctgctgttcggcggccccggcgacgacccctgcgccgccagcgagccccccgtggaggacgcccagcccgcccccgcccccgccctggcccccgtgagagccgccgccagagacaccgccagaaccctgctgcccagaggcggcgagggcagccccgcctgcgccagacccaaggccgacaagcccaaggagaagagacagagaaccgagcagctgagcgccgaggagagagaggccgccaaggagagagaggccgtgaaggaggccagaaaggtgagcagaggcatcgacagaatgctgagagaccagaagagagacctgcagcagacccacagactgctgctgctgggcgccggcgagagcggcaagagcaccatcgtgaagcagatgagaatcctgcacgtgaacggcttcaaccccgaggagaagaagcagaagatcctggacatcagaaagaacgtgaaggacgccatcgtgaccatcgtgagcgccatgagcaccatcatcccccccgtgcccctggccaaccccgagaaccagttcagaagcgactacatcaagagcatcgcccccatcaccgacttcgagtacagccaggagttcttcgaccacgtgaagaagctgtgggacgacgagggcgtgaaggcctgcttcgagagaagcaacgagtaccagctgatcgactgcgcccagtacttcctggagagaatcgacagcgtgagcctggtggactacacccccaccgaccaggacctgctgagatgcagagtgctgaccagcggcatcttcgagaccagattccaggtggacaaggtgaacttccacatgttcgacgtgggcggccagagagacgagagaagaaagtggatccagtgcttcaacgacgtgaccgccatcatctacgtggccgcctgcagcagctacaacatggtgatcagagaggacaacaacaccaacagactgagagagagcctggacctgttcgagagcatctggaacaacagatggctgagaaccatcagcatcatcctgttcctgaacaagcaggacatgctggccgagaaggtgctggccggcaagagcaagatcgaggactacttccccgagtacgccaactacaccgtgcccgaggacgccacccccgacgccggcgaggaccccaaggtgaccagagccaagttcttcatcagagacctgttcctgagaatcagcaccgccaccggcgacggcaagcactactgctacccccacttcacctgcgccgtggacaccgagaacatcagaagagtgttcaacgactgcagagacatcatccagagaatgcacctgaagcagtacgagctgctgtag

SEQ ID NO: 257642 - protein, 560 aa, Artificial Sequence
  derived and/or modified sequence
MGKWRPRGCCRGNMQCRQEVPATLTSSELFSTRNQPQPQPQPLLADAPVPWAVASRMCLTPGQGCGHQGQDEGPLPAPSPPPAMSSSRKDHLGASSSEPLPVIIVGNGPSGICLSYLLSGYTPYTKPDAIHPHPLLQRKLTEAPGVSILDQDLDYLSEGLEGRSQSPVALLFDALLRPDTDFGGNMKSVLTWKHRKEHAIPHVVLGRNLPGGAWHSIEGSMVILSQGQWMGLPDLEVKDWMQKKRRGLRNSRATAGDIAHYYRDYVVKKGLGHNFVSGAVVTAVEWGTPDPSSCGAQDSSPLFQVSGFLTRNQAQQPFSLWARNVVLATGTFDSPARLGIPGEALPFIHHELSALEAATRVGAVTPASDPVLIIGAGLSAADAVLYARHYNIPVIHAFRRAVDDPGLVFNQLPKMLYPEYHKVHQMMREQSILSPSPYEGYRSLPRHQLLCFKEDCQAVFQDLEGVEKVFGVSLVLVLIGSHPDLSFLPGAGADFAVDPDQPLSAKRNPIDVDPFTYQSTRQEGLYAMGPLAGDNFVRFVQGGALAVASSLLRKETRKPP

SEQ ID NO: 257643 - protein, 477 aa, Artificial Sequence
  derived and/or modified sequence
MSSSRKDHLGASSSEPLPVIIVGNGPSGICLSYLLSGYTPYTKPDAIHPHPLLQRKLTEAPGVSILDQDLDYLSEGLEGRSQSPVALLFDALLRPDTDFGGNMKSVLTWKHRKEHAIPHVVLGRNLPGGAWHSIEGSMVILSQGQWMGLPDLEVKDWMQKKRRGLRNSRATAGDIAHYYRDYVVKKGLGHNFVSGAVVTAVEWGTPDPSSCGAQDSSPLFQVSGFLTRNQAQQPFSLWARNVVLATGTFDSPARLGIPGEALPFIHHELSALEAATRVGAVTPASDPVLIIGAGLSAADAVLYARHYNIPVIHAFRRAVDDPGLVFNQLPKMLYPEYHKVHQMMREQSILSPSPYEGYRSLPRHQLLCFKEDCQAVFQDLEGVEKVFGVSLVLVLIGSHPDLSFLPGAGADFAVDPDQPLSAKRNPIDVDPFTYQSTRQEGLYAMGPLAGDNFVRFVQGGALAVASSLLRKETRKPP

SEQ ID NO: 257644 - DNA, 1683 bp, Artificial Sequence
  derived and/or modified sequence
atgggcaagtggagacccagaggctgctgcagaggcaacatgcagtgcagacaggaggtgcccgccaccctgaccagcagcgagctgttcagcaccagaaaccagccccagccccagccccagcccctgctggccgacgcccccgtgccctgggccgtggccagcagaatgtgcctgacccccggccagggctgcggccaccagggccaggacgagggccccctgcccgcccccagccccccccccgccatgagcagcagcagaaaggaccacctgggcgccagcagcagcgagcccctgcccgtgatcatcgtgggcaacggccccagcggcatctgcctgagctacctgctgagcggctacaccccctacaccaagcccgacgccatccacccccaccccctgctgcagagaaagctgaccgaggcccccggcgtgagcatcctggaccaggacctggactacctgagcgagggcctggagggcagaagccagagccccgtggccctgctgttcgacgccctgctgagacccgacaccgacttcggcggcaacatgaagagcgtgctgacctggaagcacagaaaggagcacgccatcccccacgtggtgctgggcagaaacctgcccggcggcgcctggcacagcatcgagggcagcatggtgatcctgagccagggccagtggatgggcctgcccgacctggaggtgaaggactggatgcagaagaagagaagaggcctgagaaacagcagagccaccgccggcgacatcgcccactactacagagactacgtggtgaagaagggcctgggccacaacttcgtgagcggcgccgtggtgaccgccgtggagtggggcacccccgaccccagcagctgcggcgcccaggacagcagccccctgttccaggtgagcggcttcctgaccagaaaccaggcccagcagcccttcagcctgtgggccagaaacgtggtgctggccaccggcaccttcgacagccccgccagactgggcatccccggcgaggccctgcccttcatccaccacgagctgagcgccctggaggccgccaccagagtgggcgccgtgacccccgccagcgaccccgtgctgatcatcggcgccggcctgagcgccgccgacgccgtgctgtacgccagacactacaacatccccgtgatccacgccttcagaagagccgtggacgaccccggcctggtgttcaaccagctgcccaagatgctgtaccccgagtaccacaaggtgcaccagatgatgagagagcagagcatcctgagccccagcccctacgagggctacagaagcctgcccagacaccagctgctgtgcttcaaggaggactgccaggccgtgttccaggacctggagggcgtggagaaggtgttcggcgtgagcctggtgctggtgctgatcggcagccaccccgacctgagcttcctgcccggcgccggcgccgacttcgccgtggaccccgaccagcccctgagcgccaagagaaaccccatcgacgtggaccccttcacctaccagagcaccagacaggagggcctgtacgccatgggccccctggccggcgacaacttcgtgagattcgtgcagggcggcgccctggccgtggccagcagcctgctgagaaaggagaccagaaagcccccctag

SEQ ID NO: 257645 - DNA, 1434 bp, Artificial Sequence
  derived and/or modified sequence
atgagcagcagcagaaaggaccacctgggcgccagcagcagcgagcccctgcccgtgatcatcgtgggcaacggccccagcggcatctgcctgagctacctgctgagcggctacaccccctacaccaagcccgacgccatccacccccaccccctgctgcagagaaagctgaccgaggcccccggcgtgagcatcctggaccaggacctggactacctgagcgagggcctggagggcagaagccagagccccgtggccctgctgttcgacgccctgctgagacccgacaccgacttcggcggcaacatgaagagcgtgctgacctggaagcacagaaaggagcacgccatcccccacgtggtgctgggcagaaacctgcccggcggcgcctggcacagcatcgagggcagcatggtgatcctgagccagggccagtggatgggcctgcccgacctggaggtgaaggactggatgcagaagaagagaagaggcctgagaaacagcagagccaccgccggcgacatcgcccactactacagagactacgtggtgaagaagggcctgggccacaacttcgtgagcggcgccgtggtgaccgccgtggagtggggcacccccgaccccagcagctgcggcgcccaggacagcagccccctgttccaggtgagcggcttcctgaccagaaaccaggcccagcagcccttcagcctgtgggccagaaacgtggtgctggccaccggcaccttcgacagccccgccagactgggcatccccggcgaggccctgcccttcatccaccacgagctgagcgccctggaggccgccaccagagtgggcgccgtgacccccgccagcgaccccgtgctgatcatcggcgccggcctgagcgccgccgacgccgtgctgtacgccagacactacaacatccccgtgatccacgccttcagaagagccgtggacgaccccggcctggtgttcaaccagctgcccaagatgctgtaccccgagtaccacaaggtgcaccagatgatgagagagcagagcatcctgagccccagcccctacgagggctacagaagcctgcccagacaccagctgctgtgcttcaaggaggactgccaggccgtgttccaggacctggagggcgtggagaaggtgttcggcgtgagcctggtgctggtgctgatcggcagccaccccgacctgagcttcctgcccggcgccggcgccgacttcgccgtggaccccgaccagcccctgagcgccaagagaaaccccatcgacgtggaccccttcacctaccagagcaccagacaggagggcctgtacgccatgggccccctggccggcgacaacttcgtgagattcgtgcagggcggcgccctggccgtggccagcagcctgctgagaaaggagaccagaaagcccccctag

SEQ ID NO: 257646 - DNA, 1683 bp, Artificial Sequence
  derived and/or modified sequence
atgggcaagtggagacccagaggctgttgcagaggaaacatgcagtgtaggcaggaggtgcctgctacgctgacgagtagcgagcttttctctacgaggaaccagccccaaccacagccccagcctctgctggcagatgcgcccgtgccatgggccgttgccagcagaatgtgcctcacccccggacaaggatgtggacaccagggtcaggatgagggtccattacccgccccttcccccccgcctgccatgtccagctctcggaaggaccacttaggcgccagcagctctgaaccactccccgttattattgtcggaaacggtccaagtggaatttgcctgagctacttactgagcggatatacaccctataccaagccagatgccatccacccacaccccctattgcaacggaagctgacagaggctcccggggtgtcgatacttgaccaggatctggattacctgagcgagggcctagagggccgctctcaatcaccagttgctctactattcgatgcactcttgaggccagacactgacttcggaggcaatatgaagtccgttctgacgtggaagcatagaaaggagcacgcaatcccccacgtggtactggggaggaatctgcccggtggtgcctggcacagcatagagggttcgatggttattctttcccaaggacagtggatgggcttgcctgatttggaagtgaaagactggatgcagaaaaaaaggcggggacttcggaactccagggcgacggcgggggatattgctcactactacagggactacgttgtgaaaaaagggcttgggcataacttcgtgtccggggctgtcgttaccgctgtggagtggggcactccggacccatcttcttgtggagcccaagactcctctcccctgtttcaagtgagtggctttttgacgcggaaccaggcccagcagccgttttctctctgggcaaggaatgtcgtcctggctactggtaccttcgatagccctgctcgcctgggaatccctggggaagctctaccattcatccatcatgagttatcggcgttggaagcggccacccgcgtgggtgccgtgacccctgcgtctgaccccgttctgatcataggcgccggtctgtctgccgctgacgccgtcctatacgctagacattataacattcccgtgattcatgcgtttagaagggctgttgacgatcccggcctcgtgtttaaccagctgcctaagatgctctatccagagtaccataaagtgcatcaaatgatgagggagcagagcatcctatctccctctccgtatgaaggctaccgcagccttccacgccaccagctgttgtgttttaaagaagattgtcaggccgttttccaggacctagaaggcgttgaaaaagtctttggggtgtcattggtactggtgctcatcggatctcatcccgacctctcatttctgcctggggccggggctgatttcgctgtcgatccagaccagcccctgagtgccaagaggaatccaatcgacgtggacccatttacatatcagtccaccagacaggagggtctgtatgctatggggccacttgccggcgataacttcgtgcggttcgttcagggcggggctctcgcagtggcctcctccttactaaggaaggagactcggaaaccaccctag

SEQ ID NO: 257647 - DNA, 1434 bp, Artificial Sequence
  derived and/or modified sequence
atgtctagctcccgcaaggatcatctgggagcctctagttctgaaccactgcctgtcattatagtcggcaacggtccttcagggatttgtttatcttatctcctgtcagggtacaccccctataccaaacctgatgccattcaccctcatccattgttgcagcgcaagctgactgaggcccccggggtgtcgattttggatcaggatctcgactacctgagcgaaggcctagagggaaggagccagtcccctgtggcccttctcttcgacgcgctgttgcggccagacacagatttcgggggaaacatgaagtcagtgcttacttggaagcataggaaggagcatgccatccctcatgtcgtgttaggccgaaatttgccaggaggagcctggcattcaatcgaaggttccatggtgattttgtcgcagggccagtggatgggtttaccagacctcgaagtaaaagactggatgcaaaagaaaagacgtggactcaggaactctcgggctacagctggcgatattgctcactactatcgtgactacgtggtgaagaagggactcggacacaacttcgtctctggggccgtggtgacagcagtggagtggggcacccccgacccttcaagttgcggagctcaagatagcagccccctgtttcaggtgtcgggattcttgacgcgcaaccaggcacagcagcccttctccctgtgggctcggaatgtggtgcttgcaactggtactttcgacagtcctgcgcgtcttggaattcctggcgaggcgctaccattcattcatcatgaattgtccgctctggaagcagctaccagagttggcgccgtgaccccggctagcgatcccgttcttatcatcggggccggactttctgcggccgacgccgtgctgtacgcacgtcactacaacattcccgtgatccatgccttcagacgagcggtggacgatccaggactggtgttcaaccagctgcccaaaatgctgtatccagagtatcataaggttcaccagatgatgcgtgagcagtccattctctctccatctccttatgagggttacagaagcttaccgcgacaccagcttctctgcttcaaagaagactgtcaagcagtctttcaagaccttgaaggtgtggaaaaagtcttcggagtgtcactggtattggttttaatcggctcccacccagacctttcttttctgccaggcgcaggcgcggactttgcggtggatccagaccagccgcttagtgccaagagaaatccaattgatgtggacccatttacatatcagagcactcggcaagaagggctttatgcaatgggtcctctggcgggcgacaattttgttcggtttgtccaagggggggccttggcagttgccagctcattactcaggaaagaaacacggaagccaccctag

SEQ ID NO: 257648 - DNA, 1434 bp, Artificial Sequence
  derived and/or modified sequence
atgtcctccagccgaaaggaccatttaggtgcgtcctctagtgaacccttaccagtaatcatcgtgggaaatggcccctcagggatctgcctttcgtatctcttatccggatataccccttacactaaaccggatgccatacatcctcacccgttgctgcaacggaaactcacagaggcacctggagtctccatactcgatcaggacctggactacttaagcgaaggactggaagggagatcccagagtccagttgcgctgcttttcgatgcactgttgcgccccgacaccgattttggcggcaacatgaagagtgtcttaacgtggaagcataggaaggagcatgctattcctcacgtcgttttgggacggaacctccctggcggagcctggcactccattgaaggatctatggtcatactatcgcagggacagtggatgggactgcccgacttggaagtgaaggactggatgcagaagaagaggcggggactgcgcaactctagagccacagccggagatattgcacattactacagggactacgtggtgaaaaaggggttgggccacaacttcgtgtccggcgccgtcgtcaccgcagtcgaatggggtacacccgacccctctagttgtggagcccaggacagctctccactttttcaggtgagtggcttcttgaccagaaatcaggcccaacagccctttagcctgtgggcccgcaatgtggtgctcgccacaggaacgtttgatagtcccgcccgcctcgggatcccaggcgaggctctgccctttattcatcatgaattgagcgctctagaggcggcgacgcgcgtgggtgcggtgacgccagcgtctgaccctgttttgatcatcggcgcgggcctttctgccgcagacgctgtgctgtatgccaggcattataacatccccgtcatccacgcgtttcgcagagccgtagatgacccgggacttgtgtttaaccagctaccaaagatgctgtaccccgagtaccataaggtgcaccagatgatgcgagaacagagcatcctttcaccttcgccgtatgaaggatacaggtcactaccacgccaccagctgctgtgcttcaaggaggattgccaagcagtcttccaagacctcgagggcgtggagaaagttttcggcgtgagcctcgtcctggtcctcataggaagccacccggacctgagcttccttccgggggcgggcgctgacttcgccgtggatcctgatcagcccctgagcgcaaaacgaaatcccatcgatgtcgacccgttcacctaccaatcaacacggcaggaagggctttacgccatggggccactggctggcgacaactttgttagatttgtccagggaggcgcactcgctgtggcctcatccctcctgaggaaggaaacccgcaagcccccttag

SEQ ID NO: 257649 - DNA, 1683 bp, Artificial Sequence
  derived and/or modified sequence
atgggcaagtggaggccccggggctgctgccggggcaacatgcagtgccggcaggaggtgcctgccaccctgaccagcagcgagctgttcagcaccaggaaccagccccagccccagccccagcccctgctggctgatgcccctgtgccctgggccgtggccagcaggatgtgcctgaccccaggccagggctgcggccaccagggccaggatgagggccccctgcctgcccccagccccccaccagccatgagcagcagcaggaaggaccacctgggcgccagcagcagcgagcccctgcctgtgatcatcgtgggcaatggccccagcggcatctgcctgagctacctgctgagcggctacaccccctacaccaagccagatgccatccacccccaccccctgctgcagaggaagctgacagaggcccctggggtgtccatcctggaccaggacctggactacctgtctgagggcctggagggccgcagccagagccctgtggccctgctgtttgatgccctgctgcggccagacacagactttggaggcaacatgaagtctgtgctgacctggaagcacaggaaggagcacgccatcccccacgtggtgctgggcaggaacctgcccggcggggcctggcacagcattgagggctccatggtgatcctgagccagggccagtggatgggcctgcctgacctggaggtgaaggactggatgcagaagaagagaagaggcctgaggaacagccgggccacagctggggacatcgcccactactacagagattatgtggtgaagaagggcctgggccacaactttgtgtctggagctgtggtgacagctgtggagtggggcaccccagaccccagcagctgtggggcccaggacagcagccccctcttccaggtgtctggcttcctgaccaggaaccaggcccagcagcccttcagcctgtgggccagaaatgtggtgctggccaccggcacctttgacagccctgcccggctgggcatccctggagaggccctgcccttcatccaccacgagctgagcgccctggaggccgccaccagggtgggcgctgtgaccccagccagtgaccctgtgctgatcatcggggccggcctgtctgctgctgatgctgtgctgtatgcccggcactacaacatccctgtgatccacgccttcagaagagctgtggatgatcctggcctggtgttcaaccagctgcccaagatgctgtacccagagtaccacaaggtgcaccagatgatgagggagcagagcatcctgagccccagcccctatgagggctaccgcagcctgcccaggcaccagctgctgtgcttcaaggaggactgccaggccgtgttccaggacctggagggcgtggagaaggtgtttggagtgtccctggtgctggtgctgattggcagccacccagacctgtccttcctgcctggagctggagctgactttgctgtggaccctgaccagcccctgagcgccaagaggaaccccattgatgtggaccccttcacctaccagagcacccggcaggagggcctgtatgccatgggccccctggccggggacaactttgtgcgctttgtgcagggcggggccctggccgtggccagcagcctgctgaggaaggagaccaggaagcccccatag

SEQ ID NO: 257650 - DNA, 1434 bp, Artificial Sequence
  derived and/or modified sequence
atgagcagcagcaggaaggaccacctgggcgccagcagcagcgagcccctgcccgtcatcatcgtgggcaatggccccagcggcatctgcctgagctacctgctgagcggctacaccccctacaccaagccagatgccatccacccccaccccctgctgcagaggaagctgacagaggcccctggggtgtccatcctggaccaggacctggactacctgtctgagggcctggagggccgcagccagagccctgtggccctgctgtttgatgccctgctgcggccagacacagactttggaggcaacatgaagtctgtgctgacctggaagcacaggaaggagcacgccatcccccacgtggtgctgggcaggaacctgcctggaggagcctggcacagcattgagggctccatggtgatcctgagccagggccagtggatgggcctgcctgacctggaggtgaaggactggatgcagaagaagaggcggggcctgaggaacagccgggccacagctggggacatcgcccactactacagagattatgtggtgaagaagggcctgggccacaactttgtgtctggagctgtggtgacagctgtggagtggggcaccccagaccccagcagctgtggggcccaggacagcagccccctcttccaggtgtctggcttcctgaccaggaaccaggcccagcagcccttcagcctgtgggccagaaatgtggtgctggccaccggcacctttgacagccctgcccggctgggcatccctggagaggccctgcccttcatccaccacgagctgagcgccctggaggccgccaccagggtgggcgctgtgaccccagccagtgaccctgtgctgatcattggagctggcctgtctgctgctgatgctgtgctgtatgcccggcactacaacatccctgtgattcatgccttccggcgggctgtggatgaccccggcctggtgttcaaccagctgcccaagatgctgtacccagagtaccacaaggtgcaccagatgatgagggagcagagcatcctgagccccagcccctatgagggctaccgcagcctgcccaggcaccagctgctgtgcttcaaggaggactgccaggccgtgttccaggacctggagggcgtggagaaggtgtttggagtgtccctggtgctggtgctgattggcagccacccagacctgtccttcctgcccggggccggggctgactttgctgtggaccctgaccagcccctgagcgccaagaggaaccccattgatgtggaccccttcacctaccagagcacccggcaggagggcctgtatgccatgggccccctggccggggacaactttgtgcgctttgtgcagggcggggccctggccgtggccagcagcctgctgaggaaggagaccaggaagccaccctag

SEQ ID NO: 257651 - DNA, 1683 bp, Artificial Sequence
  derived and/or modified sequence
atgggcaagtggcggccccggggctgctgccggggcaacatgcagtgtcggcaggaggtgcccgctaccctcacctcatcagaactgttcagcacaagaaaccaaccccagccccagccgcagccccttctggcggatgcccctgtaccttgggccgttgcgtcacggatgtgtttgacccctggccagggttgcgggcatcaaggccaggatgagggccccctccctgccccctccccgcctccagccatgtcgtcctcaagaaaagatcatctgggcgctagttcgtcggaacccctccccgtcatcattgttggaaacggccctagcggcatctgtctgtcctatctcctgagcgggtacacgccatatacaaaaccggacgcaattcatccacatccactgctccagcgtaagctgacagaggctccaggcgtctcaattcttgaccaagacctagattacctgtccgagggactggagggcaggagccagtcaccagtcgctctgctcttcgatgctctgctgcgacccgacaccgacttcggcgggaatatgaagagcgtgctgacctggaagcataggaaagagcacgccattccacatgtggtgctcggacgaaacctacccggcggagcttggcactcaattgaaggctccatggtgatcttatctcagggccaatggatgggcctacctgacctcgaagtaaaggactggatgcaaaagaagaggcgtggcctgaggaattcacgtgccacagccggggatatcgcacattattatcgagactacgtggtgaagaagggacttggacataattttgtctcgggagcagtggtgaccgcagtggaatgggggacccctgatccctcatcatgcggcgcacaggattcatcacctttattccaggtttccggttttttgacacggaaccaggctcagcaaccgttcagcctgtgggctcgaaatgtagtgcttgcgacaggtacatttgattccccagcccgcctgggaataccaggagaagccctgccattcattcaccatgagctgtctgctctggaggctgccacccgggtgggtgcagtcaccccagccagcgaccctgttctgatcattggggcaggcctctcagcagcagatgccgtgctctatgctcgtcattataacataccagtaattcatgccttcagacgagcagttgacgaccccggactagttttcaatcagctgcctaagatgctgtatcccgagtaccacaaggtccatcagatgatgcgtgaacagtcaatacttagtcccagcccttatgagggctatcggtccttgccccgtcaccagttgctgtgttttaaagaggattgtcaagccgtttttcaagatcttgagggagttgaaaaggtgtttggtgttagcttggttctggtacttatcggtagtcaccctgacctctctttcttgcccggagctggcgccgacttcgccgtcgatccagatcagcccttaagtgccaagcgcaatccaatagacgtcgatccctttacttaccagagcacacggcaagaaggtctgtacgcaatgggccccctggctggcgacaatttcgttcgatttgtgcaaggcggcgcactggcagttgccagcagtctgcttcgcaaagagactcggaagcctccttag

SEQ ID NO: 257652 - DNA, 1434 bp, Artificial Sequence
  derived and/or modified sequence
atgagcagcagccggaaggaccacctgggcgccagcagcagcgagccactgcccgtgattatcgtgggaaacggaccttcgggaatctgtctgtcttatctgctaagtgggtacactccttacaccaagccagacgccatccacccccacccactcttgcagaggaagctgacagaagccccaggtgtctcgatcctggaccaggatctggactacctatcagaagggcttgaggggcgcagccaaagcccagtggcactcctgttcgatgcacttctgcggcccgacacggactttggcggcaatatgaaaagcgtgctgacctggaagcatcggaaggagcacgccatacctcatgtggtgttaggtcggaacttacccgggggagcttggcacagcattgagggatctatggtgatcctgagccagggccaatggatgggcctaccggatctcgaggtcaaagattggatgcaaaagaagaggcgggggttgcggaactctcgcgccaccgccggggatattgcacactattacagagactacgtggtaaaaaagggcctcgggcataacttcgtcagtggcgcagttgtcaccgccgtggagtggggtacccctgacccctcttcctgcggggcccaggatagctctccccttttccaggtcagtgggtttcttactagaaaccaggcccagcagccatttagcttatgggccaggaacgtcgtccttgccacgggcacctttgactcgcccgcacgcctcggcatacccggagaagccctgccattcatccatcatgagcttagcgccctcgaagcagctacaagagtgggtgctgtcacacctgcatccgatcccgtgttaattattggtgccgggctgtctgcagccgatgctgtcctctacgctcgtcactacaacatccccgtgatccacgccttccggcgagccgtcgatgatccaggtctcgttttcaaccaattgcccaaaatgttgtatcctgaatatcataaggtgcaccaaatgatgagggaacaaagtatccttagcccatccccatacgaaggttataggtcacttccaagacatcagctgttgtgttttaaggaagattgtcaagccgtatttcaggatctggagggagtggaaaaggtgtttggagtctcattggtgctcgtgttgatcggatcccaccccgacctttcattcctgccaggagcgggggccgattttgccgttgaccctgatcagcccctgagcgctaagaggaatccaatcgacgttgatccattcacctatcagtccactaggcaagagggactgtacgccatgggaccacttgcaggtgataatttcgtgcgattcgtccaagggggagctctcgctgtggctagctctctgctgcgtaaggaaactcgcaagccaccctag

SEQ ID NO: 257653 - DNA, 1434 bp, Artificial Sequence
  derived and/or modified sequence
atgagcagcagccggaaggaccacctgggcgccagcagcagcgagccacttccggtcattatcgtcggcaacggtccctctgggatatgtctaagttatctgttgtcgggttataccccgtatactaagccggatgcgatccatccacacccgcttttgcagcggaagctgacagaggcacctggagtgagtatcttagaccaggacctcgactacctgtcagagggactggagggaaggtcccagtcaccggtggccctgcttttcgatgcactcctcagacccgacacggactttggcggcaacatgaagtcagtcctgacatggaagcaccgcaaggagcatgcgatcccccatgtggtgttgggtagaaacctaccaggtggcgcctggcacagcatcgagggctctatggtaatattgagccaggggcagtggatgggcctgcctgatttggaggtgaaggactggatgcagaagaaacggagaggactaaggaatagtcgggcgaccgcaggggatattgctcactactatagagattacgtggtgaaaaaaggcctgggccacaatttcgtgtccggagctgtggttaccgctgtggagtggggcacccctgaccccagttcatgcggcgctcaagacagctccccgctgttccaggtgagcggctttctcacgagaaaccaggcccagcagccctttagtctgtgggctcggaacgtggtgctcgcgaccgggacattcgatagccctgctaggcttggtattcctggtgaggctctcccctttatccaccatgagctctcagcgctcgaggcagccacccgggtaggagctgtaacaccggcctccgatcccgttctgataataggcgccggtctcagcgcggcggacgcagtcttgtacgccaggcactacaacatccctgtaatccatgcattccgtagggccgtggacgaccccggccttgtgtttaatcaactgccgaaaatgttgtacccggagtatcataaggtgcatcagatgatgcgagaacagagcattttgtccccatcaccatatgagggctacagatcgctgccgaggcaccagcttctgtgtttcaaagaggactgccaagcagtcttccaggatcttgagggcgtggagaaggtattcggcgtgtccctcgtgttggtcttgataggttcacaccctgacctatccttcctgcctggagcaggcgcagacttcgccgtagatcctgatcagccacttagcgccaagaggaatcccatagatgtggatccctttacttatcagtctacccgccaggagggcctgtacgctatggggccattggcgggggataacttcgtgaggtttgtgcaggggggagcactcgcagttgcaagctctctactgagaaaagagactcgcaaaccaccctag

SEQ ID NO: 257654 - DNA, 2391 bp, Artificial Sequence
  derived and/or modified sequence
ggagcaactcagcaattctgttaccgataatcacctaacaggtaaacaagatggcagggaggaaagtccacgtctcgccccacagttccccatatcagcaaatcttcaaattctagaacaaggtcagggtcagcaggggcagggcaggtttggaggaaggccaggccaagcccaggagaagagacagggtccagggaagcccacctccttcctgggtctcccctccagacccccaagacccccagcctcaggccttctcaagccccagccttaaggagttgagcactccagggtggggggtctctgatcctgggtgcctgtctctctctgcctcagtttacacattcaaaaccactgggaagccacagaccaggcaccgtgggatggggaagtggagaccgagaggctgctgccggggaaatatgcagtgcagacaagaggttcctgctactctcacctcatcagagttgttttctaccaggaaccagccccagccccagccccagcccctgctggcagatgctccggtaccctgggctgtggcttccaggatgtgcctgactccagggcagggctgtggccaccagggccaggacgagggtccgctgccagccccaagccccccaccagccatgagctcctccagaaaggaccacctcggcgccagcagctcagagcccctcccggtcatcattgtgggtaacggcccctctggtatctgcctgtcctacctgctctccggctacacaccctacacgaagccagatgccatccacccacaccccctgctgcagaggaagctcaccgaggccccgggggtctccatcctggaccaggacctggactacctgtccgaaggcctcgaaggccgatcccaaagccccgtggccctgctctttgatgcccttctacgcccagacacagactttgggggaaacatgaagtcggtcctcacctggaagcaccggaaggagcacgccatcccccacgtggttctgggccggaacctccccgggggagcctggcactccatcgaaggctccatggtgatcctgagccaaggccagtggatggggctcccggacctggaggtcaaggactggatgcagaagaagcgaagaggtcttcgcaacagccgggccactgccggggacatcgcccactactacagggactacgtggtcaagaagggtctggggcataactttgtgtccggtgctgtagtcacagccgtggagtgggggacccccgatcccagcagctgtggggcccaggactccagccccctcttccaggtgagcggcttcctgaccaggaaccaggcccagcagcccttctcgctgtgggcccgcaacgtggtcctcgccacaggcacgttcgacagcccggcccggctgggcatccccggggaggccctgcccttcatccaccatgagctgtctgccctggaggccgccacaagggtgggtgcggtgaccccggcctcagaccctgtcctcatcattggcgcggggctgtcagcggccgacgcggtcctctacgcccgccactacaacatcccggtgatccatgccttccgccgggccgtggacgaccctggcctggtgttcaaccagctgcccaagatgctgtaccccgagtaccacaaggtgcaccagatgatgcgggagcagtccatcctgtcgcccagcccctatgagggttaccgcagcctccccaggcaccagctgctgtgcttcaaggaagactgccaggccgtgttccaggacctcgagggtgtcgagaaggtgtttggggtctccctggtgctggtcctcatcggctcccaccccgacctctccttcctgcctggggcaggggctgactttgcagtggatcctgaccagccgctgagcgccaagaggaaccccattgacgtggaccccttcacctaccagagcacccgccaggagggcctgtacgccatggggccgctggccggggacaacttcgtgaggtttgtgcaggggggcgccttggctgtggccagctccctgctaaggaaggagaccaggaagccaccctaacactcggccagacccgctggctcccaggccctgagaggacagagatgaccacatccctgctggatgcaggacccgtccaaagatgccccggggaggggtgtcagcccacgttgctggcctttggggtcaagaggagtagggatcccaggctgccctggacttagaccagtgtctgaggtggtaacagcggccgcaggccagggttggcctagacctgggatttgtggggaaagctgctggtgtgaccagctgagcacccagccaggagacctgcagccctgcgccttccagaagcaggtcccaaataaagccagtgcccacctgc

SEQ ID NO: 257655 - DNA, 2231 bp, Artificial Sequence
  derived and/or modified sequence
ggagcaactcagcaattctgttaccgataatcacctaacaggtaaacaagatggcagggaggaaagtccacgtctcgccccacagttccccatatcagcaaatcttcaaattctagaacaaggtcagggtcagcaggggcagggcaggtttggaggaaggccaggccaagcccaggagaagagacagggtccagggaagcccacctccttcctgggtctcccctccagacccccaagacccccagcctcaggccttctcaagccccagccttaaggagttgagcactccagggtggggggtctctgatcctgggtgcctgtctctctctgcctcagtttacacattcaaaaccactgggaagccacagaccaggcaccgtgggatggggaagtggagaccgagaggctgctgccggggaaatatgcagtgcagacaagaggtccgctgccagccccaagccccccaccagccatgagctcctccagaaaggaccacctcggcgccagcagctcagagcccctcccggtcatcattgtgggtaacggcccctctggtatctgcctgtcctacctgctctccggctacacaccctacacgaagccagatgccatccacccacaccccctgctgcagaggaagctcaccgaggccccgggggtctccatcctggaccaggacctggactacctgtccgaaggcctcgaaggccgatcccaaagccccgtggccctgctctttgatgcccttctacgcccagacacagactttgggggaaacatgaagtcggtcctcacctggaagcaccggaaggagcacgccatcccccacgtggttctgggccggaacctccccgggggagcctggcactccatcgaaggctccatggtgatcctgagccaaggccagtggatggggctcccggacctggaggtcaaggactggatgcagaagaagcgaagaggtcttcgcaacagccgggccactgccggggacatcgcccactactacagggactacgtggtcaagaagggtctggggcataactttgtgtccggtgctgtagtcacagccgtggagtgggggacccccgatcccagcagctgtggggcccaggactccagccccctcttccaggtgagcggcttcctgaccaggaaccaggcccagcagcccttctcgctgtgggcccgcaacgtggtcctcgccacaggcacgttcgacagcccggcccggctgggcatccccggggaggccctgcccttcatccaccatgagctgtctgccctggaggccgccacaagggtgggtgcggtgaccccggcctcagaccctgtcctcatcattggcgcggggctgtcagcggccgacgcggtcctctacgcccgccactacaacatcccggtgatccatgccttccgccgggccgtggacgaccctggcctggtgttcaaccagctgcccaagatgctgtaccccgagtaccacaaggtgcaccagatgatgcgggagcagtccatcctgtcgcccagcccctatgagggttaccgcagcctccccaggcaccagctgctgtgcttcaaggaagactgccaggccgtgttccaggacctcgagggtgtcgagaaggtgtttggggtctccctggtgctggtcctcatcggctcccaccccgacctctccttcctgcctggggcaggggctgactttgcagtggatcctgaccagccgctgagcgccaagaggaaccccattgacgtggaccccttcacctaccagagcacccgccaggagggcctgtacgccatggggccgctggccggggacaacttcgtgaggtttgtgcaggggggcgccttggctgtggccagctccctgctaaggaaggagaccaggaagccaccctaacactcggccagacccgctggctcccaggccctgagaggacagagatgaccacatccctgctggatgcaggacccgtccaaagatgccccggggaggggtgtcagcccacgttgctggcctttggggtcaagaggagtagggatcccaggctgccctggacttagaccagtgtctgaggtggtaacagcggccgcaggccagggttggcctagacctgggatttgtggggaaagctgctggtgtgaccagctgagcacccagccaggagacctgcagccctgcgccttccagaagcaggtcccaaataaagccagtgcccacctgc

SEQ ID NO: 257656 - DNA, 1940 bp, Artificial Sequence
  derived and/or modified sequence
acttccctctggcctctcagagcctcttggatccccacagggtaatgggtgtcccgatctcgcgggggactctgtgatccgtgttcccctgaccctcctagtgcacaacttggccgggctcactgggctcctgcaccactgcctgtcaggtccgctgccagccccaagccccccaccagccatgagctcctccagaaaggaccacctcggcgccagcagctcagagcccctcccggtcatcattgtgggtaacggcccctctggtatctgcctgtcctacctgctctccggctacacaccctacacgaagccagatgccatccacccacaccccctgctgcagaggaagctcaccgaggccccgggggtctccatcctggaccaggacctggactacctgtccgaaggcctcgaaggccgatcccaaagccccgtggccctgctctttgatgcccttctacgcccagacacagactttgggggaaacatgaagtcggtcctcacctggaagcaccggaaggagcacgccatcccccacgtggttctgggccggaacctccccgggggagcctggcactccatcgaaggctccatggtgatcctgagccaaggccagtggatggggctcccggacctggaggtcaaggactggatgcagaagaagcgaagaggtcttcgcaacagccgggccactgccggggacatcgcccactactacagggactacgtggtcaagaagggtctggggcataactttgtgtccggtgctgtagtcacagccgtggagtgggggacccccgatcccagcagctgtggggcccaggactccagccccctcttccaggtgagcggcttcctgaccaggaaccaggcccagcagcccttctcgctgtgggcccgcaacgtggtcctcgccacaggcacgttcgacagcccggcccggctgggcatccccggggaggccctgcccttcatccaccatgagctgtctgccctggaggccgccacaagggtgggtgcggtgaccccggcctcagaccctgtcctcatcattggcgcggggctgtcagcggccgacgcggtcctctacgcccgccactacaacatcccggtgatccatgccttccgccgggccgtggacgaccctggcctggtgttcaaccagctgcccaagatgctgtaccccgagtaccacaaggtgcaccagatgatgcgggagcagtccatcctgtcgcccagcccctatgagggttaccgcagcctccccaggcaccagctgctgtgcttcaaggaagactgccaggccgtgttccaggacctcgagggtgtcgagaaggtgtttggggtctccctggtgctggtcctcatcggctcccaccccgacctctccttcctgcctggggcaggggctgactttgcagtggatcctgaccagccgctgagcgccaagaggaaccccattgacgtggaccccttcacctaccagagcacccgccaggagggcctgtacgccatggggccgctggccggggacaacttcgtgaggtttgtgcaggggggcgccttggctgtggccagctccctgctaaggaaggagaccaggaagccaccctaacactcggccagacccgctggctcccaggccctgagaggacagagatgaccacatccctgctggatgcaggacccgtccaaagatgccccggggaggggtgtcagcccacgttgctggcctttggggtcaagaggagtagggatcccaggctgccctggacttagaccagtgtctgaggtggtaacagcggccgcaggccagggttggcctagacctgggatttgtggggaaagctgctggtgtgaccagctgagcacccagccaggagacctgcagccctgcgccttccagaagcaggtcccaaataaagccagtgcccacctgc

SEQ ID NO: 257657 - DNA, 1683 bp, Artificial Sequence
  derived and/or modified sequence
atgggcaagtggcgaccacgcggatgttgtaggggcaacatgcagtgccgacaggaggtgcccgctaccctcacatccagtgagctgttctcaactagaaaccagccccagcctcaaccacaaccactattggctgacgcgccagttccatgggctgtggcctcccggatgtgtctgacccctggtcagggatgcggacatcaagggcaggacgaaggccctctgcctgccccatcaccacctcctgcaatgagctctagtaggaaggaccatctgggcgcatcctcatctgaaccacttccagtgattatcgttggtaacggaccctccggaatatgcttgtcttacctgctgagcgggtacacaccgtataccaaaccggacgcaattcatcctcaccctctgctgcagcggaagctgacggaggcccctggcgtgagcattcttgatcaggatctggactatctttcagagggactggaaggcagaagccagtcccctgttgcactcctgtttgatgccctgctgagaccagacaccgatttcggtgggaatatgaaaagcgttctgacatggaagcacaggaaggagcacgcgatacctcatgtcgtgctggggaggaacttgccagggggtgcttggcatagtatcgagggctccatggtcattttgtctcaagggcagtggatgggcttacccgacctggaggtcaaagactggatgcagaagaagcggcgaggactaaggaatagccgtgctaccgcaggagatattgcccactattaccgggactatgttgtcaagaaggggcttgggcacaacttcgtcagtggcgctgtggtcaccgccgttgaatggggcactcccgatccctcatcctgtggcgcacaggattcatcaccactgttccaggtatcgggtttcttgacaagaaatcaggctcaacagccattctcactgtgggcacggaacgtcgtgctggcaactgggaccttcgactctcctgccagactgggaattcccggagaggcactgccctttattcatcacgaactcagtgctctggaagccgctacaagggtcggcgctgtcactccagcctcagatcccgtgctgattatcggcgcaggtcttagtgctgccgacgctgtgctgtatgccagacactacaatatcccagtgattcatgcgtttcgcagagccgtggacgacccaggcctggtgttcaaccagcttcccaaaatgctgtacccagaatatcacaaggtgcaccagatgatgagggaacaatcaatcttgtcccccagtccctacgagggctaccgcagtctgcctcgccatcaacttctatgctttaaagaagactgccaggccgtgttccaggatctcgagggagtggagaaagtcttcggggtgtctctggtgcttgtcctcattggctcccatccagacctgagtttcctgcccggagctggtgcggattttgctgtggaccctgaccagccactgtcagccaaacggaatcccatcgatgtggatcccttcacctaccaatctacacgccaggaaggcttatacgcaatgggcccactggccggagataatttcgtaagattcgtccaggggggtgctctagccgtggccagttccttgctcaggaaagagaccaggaagcccccatag

SEQ ID NO: 257658 - DNA, 1434 bp, Artificial Sequence
  derived and/or modified sequence
atgtcatcaagtcggaaagaccacctaggagcctcctcttccgagcccctgcctgtgattattgtgggcaacgggccatccggcatctgtctgtcttacctactgagcggatataccccgtatactaaaccagatgccattcacccacatccactgctgcagagaaagctgacagaagcacctggagtgtccatcctcgaccaggatttggactacttatctgaaggcctggaaggtcggtcacagtctcccgtggccttgcttttcgacgccctgcttagacccgatactgacttcggaggcaatatgaaaagcgttctaacgtggaagcatcgcaaagaacatgccatcccccatgtggtcctcgggaggaacctcccaggaggtgcatggcactccatcgaggggtcgatggtgatcctgtcccaaggccagtggatgggcctgccagacctcgaagtgaaagactggatgcagaaaaaaagacggggactgcgcaactctcgagcgaccgctggggacattgcccactattatagggactatgtggtcaagaagggactagggcataacttcgtgagtggggcagtcgtgaccgcagtagagtggggaacacccgacccctcttcctgcggggcacaggatagctcacccttatttcaggtgagtggctttctaactaggaaccaggcccaacaacctttctctctctgggctcggaatgtagtgctggcgactggaactttcgattcccccgctaggctcgggatccctggagaggctctgcctttcatacaccacgaattatctgccttggaagctgctactagggtcggggctgtgactccagcttccgacccagttctcatcatcggcgcagggctgtccgccgcagatgcagttttatacgcacggcattataacatccctgtaattcatgcattcaggagggcagtggatgacccgggtttggtgtttaaccagctccctaagatgttgtaccctgagtaccataaggtccaccaaatgatgcgggagcagtccatcctgagtccctccccttacgagggatataggtctctgcctagacatcaattactgtgctttaaagaagattgtcaggccgtgtttcaggacttagagggggtcgagaaggtttttggtgtgtctctggtgcttgtacttatcggctctcaccctgacctttcctttctgcccggagccggagccgattttgcagtggaccctgaccagcccctgagcgcaaagcgaaatccaattgatgtagaccccttcacctatcaaagcacccgccaagagggcctctacgctatgggccctctggccggagacaattttgtaaggttcgtccaaggaggcgcattagccgtggcgagctccctgttgaggaaagaaacccgcaagccaccatag

SEQ ID NO: 257659 - DNA, 1434 bp, Artificial Sequence
  derived and/or modified sequence
atgtctagcagcagaaaagatcatctgggtgcaagcagctcggaacctctcccggtgatcattgtggggaatggcccaagcggcatttgtttgtcataccttctctctggctacaccccctatacaaaaccagatgctattcaccctcatcccctgctccagaggaaattgactgaggctccgggagttagtattctggatcaggacttagactacctgagcgagggcttagaaggacggtcccagtctccagtggcacttttatttgacgctcttctgcgacccgacacagattttggcggaaacatgaagtcagtgctcacctggaaacacaggaaggagcatgctatcccccacgtcgtcttgggtagaaatctccctgggggtgcatggcacagtatagaagggtctatggtcattctgagccaaggacaatggatgggcctgcccgatctcgaggtcaaggactggatgcagaagaagcggagggggctgcgaaatagtagagcaaccgctggcgatatcgcccactattatcgcgattatgttgtcaaaaaaggcctgggccataacttcgtgtctggggctgtagtcacagcggtcgaatgggggacccctgaccccagctcctgcggggctcaggactctagtccactatttcaagtttccggctttctcaccaggaatcaggctcagcagcctttcagtttgtgggcaaggaatgttgtgttagccactggtacattcgactcccccgctcgcttgggcatccctggtgaagccctgccttttatccaccatgagttgtctgcgctggaagccgcaacgcgggtgggagccgttaccccggcatcagatcctgtgttaataatcggggcaggactttccgccgcagatgccgtcctgtacgctaggcactataatattccagtgatccatgcctttcgcagagctgtcgacgatcctggcctggtattcaaccaactcccaaagatgctctatccagagtaccataaagtgcaccagatgatgcgggaacagtctatcttaagcccttccccatacgagggatatcgcagtctaccgaggcaccagctgctgtgttttaaggaagattgccaggccgtcttccaggatctggaaggcgttgagaaggtgtttggcgtgtcactcgtcctcgtacttataggtagccacccagacttgtcgtttctgcccggagccggtgcagactttgccgtggatccagaccagccacttagtgcgaagaggaaccccatagatgtagacccattcacttaccagtccacacgccaggaaggactgtatgccatggggcctctggccggtgataattttgttcgtttcgtgcagggaggagccctggccgtcgccagcagcctgctgaggaaagaaacgcgcaaaccaccttag

SEQ ID NO: 257660 - protein, 578 aa, Artificial Sequence [sequence omitted]

SEQ ID NO: 257661 - DNA, 1737 bp, Artificial Sequence
  derived and/or modified sequence
atggagctggagaacatcgtggccaacagcctgctgctgaaggccagacagggcggctacggcaagaagagcggcagaagcaagaagtggaaggagatcctgaccctgccccccgtgagccagtgcagcgagctgagacacagcatcgagaaggactacagcagcctgtgcgacaagcagcccatcggcagaagactgttcagacagttctgcgacaccaagcccaccctgaagagacacatcgagttcctggacgccgtggccgagtacgaggtggccgacgacgaggacagaagcgactgcggcctgagcatcctggacagattcttcaacgacaagctggccgcccccctgcccgagatcccccccgacgtggtgaccgagtgcagactgggcctgaaggaggagaaccccagcaagaaggccttcgaggagtgcaccagagtggcccacaactacctgagaggcgagcccttcgaggagtaccaggagagcagctacttcagccagttcctgcagtggaagtggctggagagacagcccgtgaccaagaacaccttcagacactacagagtgctgggcaagggcggcttcggcgaggtgtgcgcctgccaggtgagagccaccggcaagatgtacgcctgcaagaagctgcagaagaagagaatcaagaagagaaagggcgaggccatggccctgaacgagaagagaatcctggagaaggtgcagagcagattcgtggtgagcctggcctacgcctacgagaccaaggacgccctgtgcctggtgctgaccatcatgaacggcggcgacctgaagttccacatctacaacctgggcaaccccggcttcgacgagcagagagccgtgttctacgccgccgagctgtgctgcggcctggaggacctgcagagagagagaatcgtgtacagagacctgaagcccgagaacatcctgctggacgacagaggccacatcagaatcagcgacctgggcctggccaccgagatccccgagggccagagagtgagaggcagagtgggcaccgtgggctacatggcccccgaggtggtgaacaacgagaagtacaccttcagccccgactggtggggcctgggctgcctgatctacgagatgatccagggccacagccccttcaagaagtacaaggagaaggtgaagtgggaggaggtggaccagagaatcaagaacgacaccgaggagtacagcgagaagttcagcgaggacgccaagagcatctgcagaatgctgctgaccaagaaccccagcaagagactgggctgcagaggcgagggcgccgccggcgtgaagcagcaccccgtgttcaaggacatcaacttcagaagactggaggccaacatgctggagccccccttctgccccgacccccacgccgtgtactgcaaggacgtgctggacatcgagcagttcagcgtggtgaagggcatctacctggacaccgccgacgaggacttctacgccagattcgccaccggctgcgtgagcatcccctggcagaacgagatgatcgagagcggctgcttcaaggacatcaacaagagcgagagcgaggaggccctgcccctggacctggacaagaacatccacacccccgtgagcagacccaacagaggcttcttctacagactgttcagaagaggcggctgcctgaccatggtgcccagcgagaaggaggtggagcccaagcagtgctag

SEQ ID NO: 257662 - DNA, 1737 bp, Artificial Sequence
  derived and/or modified sequence
atggagctggagaacatagtggccaacagtctccttttaaaggctcgccaggggggatatggcaagaagtcaggaagaagcaaaaagtggaaggaaatcctaaccttacctccggtgagtcagtgtagcgagctgaggcactcaattgaaaaggactactcatctttgtgtgataaacagccaataggccgcagactgtttagacagttctgcgacaccaagccgacactcaagcggcacattgaatttctggatgcagtggctgagtatgaggttgcagacgatgaagatcgctcagattgcggcttgagcattctcgatcgattcttcaatgacaagttagccgcccccctgcccgagatccctccggacgtggtgaccgagtgtcggctagggctgaaggaggagaaccccagcaaaaaagcttttgaggagtgtacacgagttgcccacaattaccttaggggcgagccattcgaggaataccaggagtccagctatttctcccagtttctgcaatggaaatggttggagcgccagccagtcactaagaacacgttccggcattatcgggttttggggaaaggaggttttggcgaagtgtgtgcctgtcaagtgcgcgcaacaggcaagatgtacgcttgtaaaaagctgcaaaaaaagagaatcaagaagcgtaaaggcgaggccatggcactgaatgaaaaacggattcttgagaaagtacagagtaggtttgttgtgagtctggcttatgcgtacgaaacaaaggatgctctctgtctggttctgacaatcatgaatggaggtgacctgaagtttcacatctataacttaggcaacccgggcttcgacgaacagagagcggtattttatgccgcagagctctgttgcggcctggaggacctccagcgcgagcggatcgtctatagggacttgaagcctgaaaatattctgctagacgatagggggcacataagaatctctgacctgggtctcgccactgaaattccggagggtcagagagtccgcggtcgggtcggcactgtagggtacatggcacctgaggtcgtgaacaatgagaaatatacttttagtcctgactggtgggggctgggctgtctcatctacgagatgatccagggccacagtccatttaaaaaatacaaggagaaagttaagtgggaagaggtcgatcagcgaatcaagaacgatacggaggagtatagtgaaaaattctccgaggatgcgaagtccatctgccgtatgctgctgacgaagaacccttccaaaagactgggctgccgcggggagggcgcagccggagttaaacaacaccccgtatttaaagacatcaattttcgccgcctggaggctaacatgctggaacctcctttttgtcccgacccacacgcggtgtactgtaaggatgtgttagacattgaacagttctcagtagtgaaaggaatctacctggacacagcagacgaggatttttacgccaggtttgcaaccggctgtgtctcgattccctggcaaaacgagatgatcgaaagcggctgctttaaggacattaataagagcgagtccgaagaagctctgccattagacttggacaagaatattcacacaccggtgagcaggccgaaccgagggtttttttaccggttgttccgaagagggggttgcttgaccatggtcccctccgagaaggaagttgagcctaagcaatgttag

SEQ ID NO: 257663 - DNA, 1737 bp, Artificial Sequence
  derived and/or modified sequence
atggagctggagaacatcgtggccaacagcctgctgctgaaggcccggcagggcggctacggcaagaagagcggccgcagcaagaagtggaaggagatcctgaccctgccccctgtgtcccagtgcagcgagctgcggcacagcattgagaaggactacagcagcctgtgtgacaagcagcccatcggccggcggctcttccggcagttctgtgacaccaagcccaccctgaagaggcacatcgagttcctggatgctgtggccgagtatgaggtggctgatgatgaggacagaagtgactgtggcctgagcatcctggaccgcttcttcaatgacaagctggccgcccccctgcctgagatccccccagatgtggtgacagagtgccgcctgggcctgaaggaggagaaccccagcaagaaggcctttgaagaatgtaccagggtggcccacaactacctgcggggggagccctttgaggagtaccaggagagcagctacttcagccagttcctgcagtggaagtggctggagcggcagcctgtgaccaagaacaccttccgccactacagagtgctgggcaaaggaggctttggagaggtgtgtgcctgccaggtgcgggccaccgggaagatgtatgcctgcaagaagctgcagaagaagaggatcaagaagaggaaaggagaggccatggccctgaatgagaagaggatcctggagaaggtgcagagcagatttgtggtgtccctggcctatgcctatgagaccaaggatgccctgtgcctggtgctgaccatcatgaatggaggagacctgaagttccacatctacaacctgggcaaccctggctttgatgagcagagagctgtgttctatgctgctgagctgtgctgcggcctggaggacctgcagcgggagcgcatcgtgtacagagacctgaagccagagaacatcctgctggatgaccggggccacatccgcatcagtgacctgggcctggccacagagatccctgagggccagagggtgcggggccgggtgggcaccgtgggctacatggcccctgaggtggtgaacaatgagaagtacaccttctccccagactggtggggcctgggctgcctgatctatgagatgatccagggccacagccccttcaagaagtacaaggagaaggtgaagtgggaggaggtggaccagaggatcaagaatgacacagaggagtacagcgagaagttctctgaagatgccaagagcatctgcaggatgctgctgaccaagaaccccagcaagaggctgggctgccgcggggagggcgctgctggggtgaagcagcaccctgtgttcaaggacatcaacttccggcggctggaggccaacatgctggagccccccttctgcccagacccccatgctgtgtactgcaaggatgtgctggacatcgagcagttctctgtggtgaagggcatctacctggacacagcagatgaggacttctacgccaggtttgccaccggctgtgtgtccatcccctggcagaatgagatgattgaaagtggctgcttcaaggacatcaacaagtctgagagcgaggaggccctgcccctggacctggacaagaacatccacacccctgtgtcccggcccaacagaggcttcttctaccgcctcttcagaagaggaggctgcctgaccatggtgcccagcgagaaggaggtggagcccaagcagtgctag

SEQ ID NO: 257664 - DNA, 2202 bp, Artificial Sequence
  derived and/or modified sequence
cagggcactgaggagggagttgcgcgcgcgaggcgagggcgatggggccaagaagaaccggggcgatagcgcggcagcggtgacagctgggacccgccgcggtcgggctgccccctcccctcgccccgaccgctcccctgctggtgagggcctgcggaggcggcggcggcggcgcccttggtggcagtggtggcggcggagcagcctcccgggatcgtgtccggagctcgaggagagggtggtgcccggcgagctatgcacgggggcggcggcgtctcctcctgttccgcctcctcagtctcctcggtctcgcagaatccgccggcggcggcggcgccaggacatggagctcgagaacatcgtggccaactcgctgctgctgaaagcgcgtcaaggaggatatggcaaaaaaagtggtcgtagtaaaaaatggaaggagatactgacactgcctcctgtcagccagtgcagtgagcttagacattccattgaaaaggattatagcagtctttgtgacaagcaaccgataggaagacgtctcttcaggcagttctgtgataccaaacccactctaaagaggcacattgaattcttggatgcagtggcagaatatgaagttgccgatgatgaggaccgaagtgattgtggactgtcaatcttagatagattcttcaatgataagttggcagcccctttaccagaaatacctccagatgttgtgacagaatgtagattgggactgaaggaggagaacccttccaaaaaagcctttgaggaatgtactagagttgcccataactacctaagaggggaaccatttgaagaataccaagaaagctcatatttttctcagtttttacaatggaaatggctggaaaggcaacccgtaacaaagaacacatttagacattacagagttctaggaaaaggcggatttggagaggtttgcgcctgtcaagtgcgagccacaggaaaaatgtatgcctgcaaaaagctacaaaaaaaaagaataaagaagaggaaaggtgaagctatggctctaaatgagaaaagaattctggagaaagtgcaaagtagattcgtagttagtttagcctacgcttatgaaaccaaagatgccttgtgcttggtgctcaccattatgaatggaggggatttgaagtttcacatttacaacctgggcaatcccggctttgatgagcagagagccgttttctatgctgcagagctgtgttgcggcttggaagatttacagagggaaagaattgtatacagagacttgaagcctgagaatattctccttgatgatcgtggacacatccggatttcagacctcggtttggccacagagatcccagaaggacagagggttcgaggaagagttggaacagtcggctacatggcacctgaagttgtcaataatgaaaagtatacgtttagtcccgattggtggggacttggctgtctgatctatgaaatgattcagggacattctccattcaaaaaatacaaagagaaagtcaaatgggaggaggtcgatcaaagaatcaagaatgataccgaggagtattctgagaagttttcagaggatgccaaatctatctgcaggatgttactcaccaagaatccaagcaagcggctgggctgcaggggcgagggagcggctggggtgaagcagcaccccgtgttcaaggacatcaacttcaggaggctggaggcaaacatgctggagccccctttctgtcctgatcctcatgccgtttactgtaaggacgtcctggatatcgagcagttctcggtggtgaaagggatctacctggacaccgcagatgaagacttctatgctcggtttgctaccgggtgtgtctccatcccctggcagaatgagatgatcgaatctgggtgtttcaaagacatcaacaaaagtgaaagtgaggaagctttgccattagatctagacaagaacatacataccccggtttccagaccaaacagaggcttcttctatagactcttcagaagagggggctgcctgaccatggtccccagtgagaaggaagtggaacccaagcaatgctgagcaccccggtgcggaccacagagcagaccctggcgccaggaaggagcatgtgttagcgtctcgtcccacctggaattgtaataaatacatctaaataaaacatgccttgggagtgtacagac

SEQ ID NO: 257665 - DNA, 1737 bp, Artificial Sequence
  derived and/or modified sequence
atggagctggagaacatcgtggccaacagcctgctgctgaaggccagacagggaggatacggaaaaaaaagcggcaggtctaaaaaatggaaggaaatcctaaccctgccacctgtcagccagtgtagcgaactgcgccatagcattgagaaggattactcttccctctgcgacaaacagcctatcgggcggcgcctgtttcggcagttctgtgatactaaacccactctgaagcgacatatcgaatttctcgatgcagtcgctgagtacgaagtagcagacgacgaagaccgatctgattgcgggctgtcgatactggatcgctttttcaacgataaactggctgccccgttacccgagatcccccccgatgtggtcactgagtgtaggctgggtttgaaagaggagaatccaagcaagaaggccttcgaagaatgcacaagggtggcccataactacctgcgcggggaaccattcgaagaataccaggagtcttcttactttagtcagttccttcagtggaaatggctggagcgccaacctgttaccaaaaacactttcagacattacagagtccttgggaaaggggggttcggcgaggtttgcgcatgtcaggttcgggctacggggaagatgtatgcctgtaagaaactacagaagaaacgtatcaagaagcgcaagggagaggccatggctctgaatgagaagaggatcttggagaaggtccaatctagattcgtggtatcattggcttatgcttatgaaaccaaggacgcactgtgcctggtcttaaccattatgaacgggggggacctgaaattccacatctacaatctgggtaacccggggttcgatgaacagcgcgcagttttctatgcggcagagctctgttgcggactggaggacttgcagcgggaaagaattgtgtatagggaccttaaacccgaaaatattctcctcgacgaccgcggacacatcagaatctctgatctcggcctggccaccgagattcccgaaggccaacgggtcagaggccgcgtcggcactgtgggatacatggcgccggaggtggttaacaacgaaaaatacacattcagtccagattggtgggggctggggtgtctgatctacgagatgatccaaggacattccccgttcaagaagtacaaagagaaggtcaagtgggaggaagttgatcagcgtattaagaacgacactgaggagtatagcgaaaaattcagcgaggatgctaaatctatctgccgaatgctactcaccaagaacccaagcaaacggctgggctgccgtggcgagggagccgccggcgtgaaacagcacccggtttttaaggatatcaattttcggcgcctggaggccaatatgctcgagcctcccttctgtccagacccccatgcagtctactgcaaagatgtgttggacatcgagcagttcagtgtggtaaaaggcatatacctggataccgctgatgaagatttttatgcccgatttgccacaggctgtgtgagcataccatggcaaaacgaaatgatcgaatccggatgctttaaggatattaataagagcgagtcagaagaagccctcccgctggatttagataagaacatccatactccggtttcacggcccaatcggggcttcttctaccgcctttttcgccgggggggatgcctgactatggttccatctgagaaagaggtagagcccaagcagtgctag

SEQ ID NO: 257666 - DNA, 1737 bp, Artificial Sequence
  derived and/or modified sequence
atggaactcgaaaatattgtcgccaatagcctgctgctgaaagcaagacagggcggatacgggaagaagtctggcaggagcaaaaaatggaaggaaattctgactttgccgccagtgtcccagtgctctgaactgcggcactctatcgagaaagattactcttcactgtgtgacaaacagcctatcggacggagactgttcagacagttttgcgacacaaaacccactctgaagcgccacatcgaatttcttgatgccgtggccgaatatgaggtggccgacgatgaggacaggtccgattgcggtctaagcattttggaccgcttcttcaacgacaaacttgctgctcctctcccagagatcccacctgatgtcgtgactgaatgtcgactgggcctcaaggaggagaacccctccaagaaagcctttgaggagtgcactcgggtcgcccataattatcttcggggtgaaccatttgaggaatatcaggaaagttcatacttttctcagtttctgcagtggaagtggctcgaacgccagccggtgaccaaaaatacgttccgtcactacagagtcctcgggaaagggggattcggggaggtttgcgcctgccaggttcgagctactggtaaaatgtatgcttgcaaaaagctgcaaaagaagaggattaagaagaggaaaggagaagccatggcattaaatgagaagaggatactggaaaaggtgcagagccggttcgtcgtgagcctcgcgtatgcatacgagaccaaagacgctctgtgcctggtcttgacgatcatgaatggtggagatttgaaattccatatatataacctggggaatcccggtttcgacgagcaacgagctgtcttctacgcagccgaactctgctgcggactggaagacttacagagggaaaggattgtttatcgcgatctgaagcctgagaacattctgctggatgacaggggccatattcgcatttccgatctgggcctggccaccgaaatccctgaaggacagcgcgtccggggtcgggttggcactgtcggctatatggcgcctgaagtcgtcaacaacgagaaatacacctttagccccgattggtggggtcttggatgtctcatttatgaaatgatccagggccacagtccattcaaaaaatataaggagaaggttaagtgggaggaagtggatcagagaattaagaatgacacagaggagtattccgaaaaattctctgaggacgcgaagtccatttgccgcatgttgcttacgaagaacccctcgaagcgcttgggatgccgaggggaaggcgcagccggtgttaaacagcacccagttttcaaagatatcaactttcgtaggctggaggccaacatgcttgaaccgccattttgccccgatcctcacgccgtgtattgtaaggatgtgttggatattgaacagttctctgtggtgaagggaatataccttgacaccgcggacgaagatttttatgcaaggtttgctaccgggtgcgtttccatcccttggcaaaatgaaatgatagaatcgggatgcttcaaggatatcaataagtccgagtctgaggaagctctgcccctggacctcgataagaacattcacacccccgtctcgagaccaaaccgaggcttcttctacaggttgttccgaagggggggatgtctgacaatggtaccttccgaaaaagaagtggagcccaagcagtgctag

SEQ ID NO: 257667 - protein, 417 aa, Artificial Sequence
  derived and/or modified sequence
MAQKEGGRTVPCCSRPKVAALTAGTLLLLTAIGAASWAIVAVLLRSDQEPLYPVQVSSADARLMVFDKTEGTWRLLCSSRSNARVAGLSCEEMGFLRALTHSELDVRTAGANGTSGFFCVDEGRLPHTQRLLEVISVCDCPRGRFLAAICQDCGRRKLPVDRIVGGRDTSLGRWPWQVSLRYDGAHLCGGSLLSGDWVLTAAHCFPERNRVLSRWRVFAGAVAQASPHGLQLGVQAVVYHGGYLPFRDPNSEENSNDIALVHLSSPLPLTEYIQPVCLPAAGQALVDGKICTVTGWGNTQYYGQQAGVLQEARVPIISNDVCNGADFYGNQIKPKMFCAGYPEGGIDACQGDSGGPFVCEDSISRTPRWRLCGIVSWGTGCALAQKPGVYTKVSDFREWIFQAIKTHSEASGMVTQL

SEQ ID NO: 257668 - DNA, 498 bp, Artificial Sequence
  derived and/or modified sequence
atgagccatcctcaggccactagtaatcttcagcacaccgtatccaattccgacaacattgggtcttccgctggccggtggacctgggttcctctgacgtggacggatacaagcaaaatgtctatgcgaggcctgctggatttattcagtttccactcctgtattctgaaaaacggctctgagcccgaggaaccacaggattccgctaaaaccgatacccagctcagcccagctacacttgctctggagagggaggagcattctagccgtcacgtcccatccgtgctctctaaaacaatgagccgggcttctgccgagctgacatgtaccgccgggcgacagggacctggaccacccggcagccatagtcaagcacctcatatgcttccccagcccgagccgctcctggcctgtgccccggctatgtggtgtagaagggagccccagccaatcgggggtctgcagcctccccatctgcgtttacatttagaatcatag

SEQ ID NO: 257669 - DNA, 498 bp, Artificial Sequence
  derived and/or modified sequence
atgagccacccccaggccaccagcaacctgcagcacaccgtgagcaacagtgacaatattggcagcagcgcgggtcggtggacatgggtgcccctgacgtggacagatacatctaagatgtcaatgcgcggcctcctagatttgttcagtttccactcctgtatccttaaaaacggttctgagccggaagaaccccaggactccgccaaaaccgatacacaactctctccagctacattggccctggagcgagaggaacatagttctaggcacgtgccttctgtcctctccaaaacgatgagtcgagcctccgccgaactgacttgtaccgctggccggcaggggcctggcccccccggcagccactcacaggccccgcatatgctcccacagcccgagcccctgctagcctgcgcacccgccatgtggtgtagacgcgagccacaaccaatagggggactccagcctcctcatttacgacttcacctggaatcctag

SEQ ID NO: 257670 - DNA, 498 bp, Artificial Sequence
  derived and/or modified sequence
atgtcacatccccaggccacgtctaatctgcagcacacagtgagcaactctgacaatatcggctcttccgccggaagatggacctgggtgcccctcacttggactgacacgagtaagatgtcaatgagaggcctgttagacctgtttagcttccatagttgcattctcaagaacggctcggaacccgaggaacctcaagactcagctaaaactgatactcaattgtctcccgctactctggctctggaacgtgaggaacacagttcaaggcatgtgcccagtgtgttatcgaagaccatgagtcgggcatcagccgaactgacatgtacagcagggcgtcagggcccaggtcccccaggtagccacagccaggctccccacatgcttccccaaccagaacctctgttggcctgcgcacccgcaatgtggtgcagaagagagccccaacccatcggagggctgcagcctccccatttgcgactgcacctggagtcttag

SEQ ID NO: 257671 - DNA, 1124 bp, Artificial Sequence
  derived and/or modified sequence
acaagagctaggacaggaggagccgcagagctcgtaattgctgcggggaggacaggccagctctggaagaaaacagacagggtcttgctctgttgcccaggccaagtgcaatggcatgatctcagctcactgcagcctcccgattgttccgatgaaacttttaaccacgtggtttgttatgcatgtcacacccacaggccacttcaaacttgcagcacacagtgagcaactcggacaatatagggtccagtgctgggaggtggacctgggtcccattaacctggacagacacctccaagatgagcatgagggggctgctggatctgttctcctttcacagctgtatcctgaagaatggcagtgagccggaagagccacaggattcggcaaagacggacacacagctgagtccggctaccctggcgttggagcgcgaggagcacagcagccgccacgtcccttccgtcttgtcaaagaccatgagccgagcgtccgcagagctgacctgcactgcagggcgacagggcccggggccgcctgggtcccacagccaggctccccacatgcttccccagccggagcccctcctggcctgtgctccagccatgtggtgtagacgtgaaccccagcccatcggagggttgcagcccccacatctgcgattgcatctggaatcatgactcaaggactttttttttttaaagacagggtctcgctctgttgcccaggctggagtgtagtggtgtgatcttggctcactgtagccttgacctcccagactcaagaaatcctcctacctcaacctcctgagtagctaggaccacaggcgtgcaccaccacacctgactaatttttttgtttgtttgttttgttttgttttgttttgtagagacgggtcttgctatgttgcccaggctggtcttgaactcctaggctcaagcaatcttcctgcctctgcctcctaaaatgctgggattacaggtgggattacagagcaccatggcactctgccagactcaaggactcaggtcggaccaatcaacagcagccttgaggctgtggccggcccctccgcgaaccaggggaacttcactctccattagaagtcctaagttggctgctca

SEQ ID NO: 257672 - DNA, 1254 bp, Artificial Sequence
  derived and/or modified sequence
atggctcagaaggaggggggaaggaccgtgccttgctgctccagaccaaaggtagcagctctcacagcggggaccctgctgcttctgactgctattggagccgcgtcgtgggcaatcgttgccgtcctcttaagaagtgatcaggaacccctatacccggtgcaagtgagttcagccgatgcaaggcttatggtctttgacaagacggagggtacttggcgcctcttatgctcaagcagatcgaacgcgcgtgtggccgggctgtcatgtgaggagatgggatttctccgagcactgactcatagcgagctcgatgttaggactgctggcgctaacggcacaagtggcttcttttgcgtcgacgagggaaggctgccacacacccagcggttgctcgaggtgatctccgtatgcgattgtccccgaggaagatttctggccgccatttgtcaagattgcgggcggagaaagctgcccgttgaccggattgtgggtgggcgcgatacctcgttagggagatggccctggcaggtaagtttgagatatgacggcgcccatctctgcggaggaagccttttgagcggagactgggtcctgaccgcagcgcactgttttccggagcgtaaccgggtgctgtccaggtggcgggtgttcgctggagccgtggcacaagctagcccacacggtctccagctcggcgtccaggctgtggtctatcacggcgggtacctcccctttagagatcctaattctgaagagaactctaatgacatcgctttagtgcacctctcaagtccattgccactcacagagtacatccagccagtgtgtctccccgctgctggtcaggccctggttgatggcaaaatctgcacagttactgggtggggcaacacacaatactacgggcaacaggccggggtgttacaggaggcgcgagtccccataatttccaacgacgtttgcaatggtgctgatttctacggaaatcaaataaagccaaaaatgttctgtgcgggctaccccgaaggtgggatagacgcttgccagggtgactcggggggtccctttgtatgcgaggacagcattagccgaacaccaaggtggagactgtgtggaatcgtttcctggggcaccggttgtgcattagcccagaagcctggtgtgtataccaaggtcagcgattttcgggaatggatcttccaagctatcaagacacactcggaggctagcggtatggtgacacagctttag

SEQ ID NO: 257673 - DNA, 1254 bp, Artificial Sequence
  derived and/or modified sequence
atggcacagaaggaaggggggcgcacagtgccttgctgcagtaggccaaaagttgcggccctcaccgctggcacattattgttgctgacagcaatcggggcagcaagttgggccattgtcgctgttctgctgcgttcggaccaggagcctctctatcccgtccaggtgtcaagcgctgacgcaagacttatggtgttcgacaaaaccgagggaacgtggaggctcctgtgttcatcccgctcgaatgctcgcgtggccggactgtcctgtgaggaaatgggtttcttgagggctctgacccacagcgagctggacgttcggacagcaggagctaatggtacatcaggctttttttgcgtcgacgaggggcggcttccccacactcaaaggctcctagaagtgatctctgtatgcgattgcccccggggtagatttcttgctgctatatgtcaagattgcggtcggagaaaactgcccgtcgataggatcgtgggcgggcgggacaccagcctgggtcgctggccatggcaggtctccctgcggtacgatggggcccacctttgtggtgggtcactgctgtcaggagattgggttctgaccgccgcgcattgttttccagagcgcaaccgtgtcctctcccgctggcgggtcttcgctggggccgtggcacaggcttcgccacatggtttgcaactcggggtgcaggctgtggtgtatcacggaggctatctgcctttccgagacccgaactcagaagaaaactccaacgacatcgctctggtccacctttcttctccattgccactcaccgagtacattcagcccgtatgcctcccggctgcaggccaggctttggtggatgggaagatctgcaccgtaacaggctggggcaacacacaatactatggccaacaggccggcgtcctacaagaggccagagtacctattataagcaacgatgtgtgcaacggcgctgacttttatgggaaccagataaagccaaaaatgttctgcgcgggctaccccgagggcgggatcgatgcctgccagggtgacagcggcggcccattcgtgtgcgaagactctatctcccgaacaccacgatggcgactgtgcggcattgtctcatggggtaccggctgcgcactcgctcagaaacccggcgtctacacgaaagtctccgacttccgggagtggatcttccaggccattaagacgcactctgaagcatctggcatggtaacccagttatag

SEQ ID NO: 257674 - DNA, 2363 bp, Artificial Sequence
  derived and/or modified sequence
tcgagcccgctttccagggaccctacctgagggcccacaggtgaggcagcctggcctagcaggccccacgccaccgcctctgcctccaggccgcccgctgctgcggggccaccatgctcctgcccaggcctggagactgacccgaccccggcactacctcgaggctccgcccccacctgctggaccccagggtaaggacaagggcccccagactcacagttccagccctgaggacaggggttccctcatccccccacccagcctaatgcccacctcctaatagaggggttcctggggacctgaagagggggcactatgacgtccccccaagcacctaggtgttctgtcctgctcttccttcagactcagccgttggaccccagtcctttcctccccagacccaggagttccagccctcaggcccctcctccctcatactagggagtcctggcccccaaattcctcctttcccaagacttatgatttcaggtcctcagctgtctcctccctcaaaccgggatcctcagtcccctgctccaccaggctcaggcatgggggtccccatccctgcaaatccaggcgtccccccgctgctggtcagacactgaccccatccttgaacccagcccaatctgcgtccgtgatcacggcgtgctctggccaaggcccagtccctacagcctgcctggatggacgcctgggactgggggcgccaggactgggctgggctgggctcccccaggccctgcctccccgtccatctcctcacaggtcccaccctggcccaggaggtcagccagggaatcattaacaagaggcagtgacatggcgcagaaggagggtggccggactgtgccatgctgctccagacccaaggtggcagctctcactgcggggaccctgctacttctgacagccatcggggcggcatcctgggccattgtggctgttctcctcaggagtgaccaggagccgctgtacccagtgcaggtcagctctgcggacgctcggctcatggtctttgacaagacggaagggacgtggcggctgctgtgctcctcgcgctccaacgccagggtagccggactcagctgcgaggagatgggcttcctcagggcactgacccactccgagctggacgtgcgaacggcgggcgccaatggcacgtcgggcttcttctgtgtggacgaggggaggctgccccacacccagaggctgctggaggtcatctccgtgtgtgattgccccagaggccgtttcttggccgccatctgccaagactgtggccgcaggaagctgcccgtggaccgcatcgtgggaggccgggacaccagcttgggccggtggccgtggcaagtcagccttcgctatgatggagcacacctctgtgggggatccctgctctccggggactgggtgctgacagccgcccactgcttcccggagcggaaccgggtcctgtcccgatggcgagtgtttgccggtgccgtggcccaggcctctccccacggtctgcagctgggggtgcaggctgtggtctaccacgggggctatcttccctttcgggaccccaacagcgaggagaacagcaacgatattgccctggtccacctctccagtcccctgcccctcacagaatacatccagcctgtgtgcctcccagctgccggccaggccctggtggatggcaagatctgtaccgtgacgggctggggcaacacgcagtactatggccaacaggccggggtactccaggaggctcgagtccccataatcagcaatgatgtctgcaatggcgctgacttctatggaaaccagatcaagcccaagatgttctgtgctggctaccccgagggtggcattgatgcctgccagggcgacagcggtggtccctttgtgtgtgaggacagcatctctcggacgccacgttggcggctgtgtggcattgtgagttggggcactggctgtgccctggcccagaagccaggcgtctacaccaaagtcagtgacttccgggagtggatcttccaggccataaagactcactccgaagccagcggcatggtgacccagctctgaccggtggcttctcgctgcgcagcctccagggcccgaggtgatcccggtggtgggatccacgctgggcctaggatgggacgtttttcttcttgggcccggtccacaggtccaaggacaccctccctccagggtcctctcttccacagtggcgggcccactcagccccgagaccacccaacctcaccctcctgacccccatgtaaatattgttctgctgtctgggactcctgtctaggtgcccctgatgacgggatgctctttaaataataaagatggttttgatt

SEQ ID NO: 257675 - DNA, 1783 bp, Artificial Sequence
  derived and/or modified sequence
tcgagcccgctttccagggaccctacctgagggcccacaggtgaggcagcctggcctagcaggccccacgccaccgcctctgcctccaggccgcccgctgctgcggggccaccatgctcctgcccaggcctggagactgacccgaccccggcactacctcgaggctccgcccccacctgctggaccccagggtcccaccctggcccaggaggtcagccagggaatcattaacaagaggcagtgacatggcgcagaaggagggtggccggactgtgccatgctgctccagacccaaggtggcagctctcactgcggggaccctgctacttctgacagccatcggggcggcatcctgggccattgtggctgttctcctcaggagtgaccaggagccgctgtacccagtgcaggtcagctctgcggacgctcggctcatggtctttgacaagacggaagggacgtggcggctgctgtgctcctcgcgctccaacgccagggtagccggactcagctgcgaggagatgggcttcctcagggcactgacccactccgagctggacgtgcgaacggcgggcgccaatggcacgtcgggcttcttctgtgtggacgaggggaggctgccccacacccagaggctgctggaggtcatctccgtgtgtgattgccccagaggccgtttcttggccgccatctgccaagactgtggccgcaggaagctgcccgtggaccgcatcgtgggaggccgggacaccagcttgggccggtggccgtggcaagtcagccttcgctatgatggagcacacctctgtgggggatccctgctctccggggactgggtgctgacagccgcccactgcttcccggagcggaaccgggtcctgtcccgatggcgagtgtttgccggtgccgtggcccaggcctctccccacggtctgcagctgggggtgcaggctgtggtctaccacgggggctatcttccctttcgggaccccaacagcgaggagaacagcaacgatattgccctggtccacctctccagtcccctgcccctcacagaatacatccagcctgtgtgcctcccagctgccggccaggccctggtggatggcaagatctgtaccgtgacgggctggggcaacacgcagtactatggccaacaggccggggtactccaggaggctcgagtccccataatcagcaatgatgtctgcaatggcgctgacttctatggaaaccagatcaagcccaagatgttctgtgctggctaccccgagggtggcattgatgcctgccagggcgacagcggtggtccctttgtgtgtgaggacagcatctctcggacgccacgttggcggctgtgtggcattgtgagttggggcactggctgtgccctggcccagaagccaggcgtctacaccaaagtcagtgacttccgggagtggatcttccaggccataaagactcactccgaagccagcggcatggtgacccagctctgaccggtggcttctcgctgcgcagcctccagggcccgaggtgatcccggtggtgggatccacgctgggcctaggatgggacgtttttcttcttgggcccggtccacaggtccaaggacaccctccctccagggtcctctcttccacagtggcgggcccactcagccccgagaccacccaacctcaccctcctgacccccatgtaaatattgttctgctgtctgggactcctgtctaggtgcccctgatgacgggatgctctttaaataataaagatggttttgatt

SEQ ID NO: 257676 - DNA, 1254 bp, Artificial Sequence
  derived and/or modified sequence
atggcccagaaggagggcggccgcacagtgccctgctgcagccggcccaaggtggccgccctgacagctggcaccctgctgctgctgacagccatcggggccgcctcctgggccatcgtggccgtgctgctgcggagtgaccaggagcccctgtaccctgtgcaggtgagcagcgcagatgcccggctgatggtgtttgacaagacagagggcacctggaggctgctgtgcagcagccgcagcaatgcccgggtggccggcctgagctgtgaggagatgggcttcctgcgggccctgacccacagcgagctggatgtgaggacagctggggccaacggcaccagcggcttcttctgtgtggatgagggccgcctgccccacacccagaggctgctggaggtgatctctgtgtgtgactgcccccggggccgcttcctggccgccatctgccaggactgtggccgcaggaagctgcctgtggacagaattgtgggcggccgggacaccagcctgggccgctggccctggcaggtgtccctgcgctatgatggagcccacctgtgtggcggcagcctgctgagcggggactgggtgctgacagctgcccactgcttccctgagaggaacagagtgctgagccgctggagggtgtttgctggagctgtggcccaggccagcccccacggcctgcagctgggcgtgcaggccgtggtgtaccacggcggctacctgcccttccgggaccccaacagcgaggagaacagcaatgacatcgccctggtgcacctgagcagccccctgcccctgacagagtacatccagcctgtgtgcctgcctgctgctggccaggccctggtggatggcaagatctgcaccgtgacaggctggggcaacacccagtactacggccagcaggccggcgtgctgcaggaggcccgggtgcccatcatcagcaatgatgtgtgcaatggagctgacttctacggcaaccagatcaagcccaagatgttctgtgccggctacccagagggcggcattgatgcctgccagggcgacagcggcggcccctttgtgtgtgaggacagcatcagcaggaccccccgctggaggctgtgtggcatcgtgtcctggggcaccggctgtgccctggcccagaagccaggagtgtacaccaaggtgtctgacttccgggagtggatcttccaggccatcaagacccacagcgaggccagcggcatggtgacccagctgtag

SEQ ID NO: 257677 - DNA, 1254 bp, Artificial Sequence
  derived and/or modified sequence
atggcccagaaggagggcggccggaccgtgccctgctgcagccggcccaaggtggctgctctgactgccggaactctgctgctgttaacagcaatcggcgcagcctcatgggcaattgtcgcagtgctactgagatcagaccaggagcccctctaccccgtacaagtaagttcggctgatgcgagacttatggtgttcgataagacagaaggtacctggaggctgttatgtagttccagatcaaatgcgagagtagccggtctttcttgtgaggagatgggatttctcagagccctcacccactctgaactggacgttcgcactgctggagccaacggaaccagcggatttttctgtgtggacgaaggaaggctgcctcacactcaacgtctgttggaagtgatcagcgtctgcgattgtccccgtggcaggtttttagccgctatttgccaagattgcggtcgtagaaaactgcccgttgacaggatcgtcggcggcagagacactagcctaggaaggtggccttggcaggtgagcctgagatacgacggtgctcacctatgcggcggtagcctgctgtctggcgactgggtgctcacagccgcacactgcttcccagagagaaacagggtgctgtcacgctggagagtctttgcgggcgcagtggcccaagcctctccacatggattgcagctaggtgtgcaggccgtcgtgtatcacggtggttatttgccatttcgggaccccaacagcgaggagaattcaaacgacatagccttggtgcatctttccagccctctgcctctcactgaatacatccagcctgtgtgtttgcccgccgcgggtcaagccctggtggacgggaaaatatgcaccgtaacaggatggggaaacacccagtactatggccagcaagctggagtgctgcaggaagcccgcgtgcctataatatccaacgacgtctgcaacggcgctgacttttatgggaaccagatcaaaccgaagatgttctgtgctggataccctgagggtggaattgatgcctgccagggtgactctggcggcccgttcgtctgtgaagactcgatttccaggactcctaggtggcggctatgcggaattgtctcatggggcaccgggtgtgcgttggcacaaaaaccgggggtttatactaaagtgtcagattttcgagaatggatttttcaggccatcaagacacatagcgaagccagtggtatggtgacacaactgtag

SEQ ID NO: 257678 - DNA, 1254 bp, Artificial Sequence
  derived and/or modified sequence
atggcccagaaggagggcggccggaccgtgccctgctgcagccggcccaaggtggccgcacttaccgccgggacactgctgctcctcacggctataggggcagcttcttgggcaatagtcgccgtgctcctcagatctgaccaggagcccctgtatccagtccaagtaagcagcgcggacgccagactgatggttttcgataaaaccgaagggacttggcggctgctctgctcctccagatcaaacgctcgcgtagccggactgtcgtgcgaggaaatgggatttctcagggcactgacacacagcgaactcgacgtgaggactgccggcgctaatggtaccagtggattcttttgcgtggatgaagggagattgccccatacccagagactcttggaggtgatatccgtgtgtgattgtcctcgcggtcgttttctggccgccatttgtcaggattgtggtcgaagaaaactgcccgttgacaggatagttgggggccgcgataccagtctcggcagatggccttggcaggtctccctgcggtacgacggcgcacacttatgtggtgggtcccttctgagcggcgactgggtgctgactgcagcccattgcttcccagagagaaatagagtgctgtcgcggtggagggtgttcgctggggccgtcgctcaagcctccccccacggccttcaacttggcgtacaagctgtcgtgtatcacggaggctatctaccctttcgtgatccaaattcagaagagaactccaatgatatcgctctggtgcatttatcgagccccttacctttaacagagtatatacagcccgtttgcctcccggcagccggtcaggctttggtggatggcaaaatttgcacagtgaccgggtggggcaatacccaatattacgggcagcaggcgggtgtgctgcaagaagcccgcgttcctataattagtaatgatgtgtgcaatggcgccgacttctacgggaaccagattaaacctaaaatgttctgtgccggctaccccgagggaggcatagacgcctgccagggtgacagtggcggcccgttcgtctgcgaggactctataagcaggacaccgagatggcgcctctgcggcatcgtgagctggggaaccgggtgtgctctggctcagaaacccggcgtgtataccaaggtttccgattttagagagtggatctttcaggccattaagacacattctgaagcctcagggatggtgactcagctgtag

SEQ ID NO: 257679 - DNA, 1254 bp, Artificial Sequence
  derived and/or modified sequence
atggcccagaaagagggcggacggacagttccttgttgtagcagacccaaagtggccgctctcacagctggcacactgctactgctgaccgccataggggctgcctcctgggccattgttgccgtgctgctccgctccgaccaagagcctttgtatcccgtacaggtatctagcgccgatgcacgcctcatggtattcgacaagacggaaggcacatggaggctgttgtgtagcagccggagtaacgccagggtagcaggactgtcttgcgaggagatgggtttccttagggctctgacgcacagcgagctagacgttcgaactgccggagccaacggtaccagcggttttttttgcgtggatgaaggaaggcttccccacacacagaggcttctggaggtgatatccgtttgcgattgccccagagggaggtttctggctgcgatttgtcaggactgtgggagacgaaagctgcctgtggatcgtatagtgggcggtagagataccagcctggggagatggccttggcaggtttccctgagatacgatggcgctcacttatgcgggggaagcctgctcagcggtgactgggtcctgacagccgcacattgtttcccagaacgtaatagagtgctctccagatggcgcgtctttgcaggggctgtggctcaggccagtcctcatggcctgcagctgggagtgcaagcagtcgtgtaccatggcggttacctccccttccgagacccgaacagcgaagagaactcaaacgatatcgctctagtgcacctgtccagccccttgcctttaaccgagtatattcagcctgtttgcttaccagccgcaggacaagcactcgtcgatggaaagatttgtactgttacgggatgggggaatacgcagtactacggccaacaggcaggagtattgcaggaagcccgagtgccaattattagtaacgacgtctgtaacggggctgacttttacggcaatcagattaagcccaagatgttttgcgccggttaccccgaaggcggaatagatgcatgccagggggacagcgggggacccttcgtatgcgaagacagcatcagcagaacccctcggtggaggctgtgtggtatcgtgtcatggggtacaggttgcgcactagcacagaagcccggagtttatactaaagtaagcgattttcgcgaatggatcttccaggctatcaagacccattccgaagccagcggaatggtgactcagctgtag

SEQ ID NO: 257680 - DNA, 1254 bp, Artificial Sequence
  derived and/or modified sequence
atggcccagaaggagggtggcaggaccgtcccctgttgctccaggcccaaagtggccgctctgactgctggtacactgcttctgctcaccgcgataggcgctgcgagttgggccatagtagctgttctgctacgcagcgaccaggagccattgtacccagtgcaagtgtcttctgcagacgccagactgatggtgttcgataagactgaaggcacatggaggctgctgtgctcttctcgatccaacgcaagagttgcgggtttgtcctgtgaggagatgggcttccttcgagcccttacacacagtgagctggacgttcgcaccgccggagcgaacgggacgagtggattcttttgtgtcgacgaaggcagactccctcatactcagaggctgctagaagtcatcagcgtgtgcgactgcccaaggggacggtttcttgctgcaatttgccaagattgtgggaggagaaagttgcctgtcgataggatcgtagggggacgagacacatcccttggtcgatggccgtggcaggtgagcctacgctatgacggcgcacatctgtgcggtggttccctcctaagcggcgactgggtgctcaccgccgctcactgtttcccagagcggaaccgggtcttgtcacgctggcgagtctttgcaggcgcagtagcccaggccagtccacacggcctgcagctgggagtgcaagccgtcgtgtatcacggaggctatcttccgtttagggatcccaactcagaagagaattctaacgacatagctttggtacacctatcctccccgctgccccttacggaatacattcagcccgtgtgcctcccggcagcgggacaggcactggtagacgggaagatttgcacggtaacaggttggggcaacactcaatactatggccagcaggccggagtacttcaggaagctcgagtccccattatttcaaacgacgtgtgcaacggtgctgacttttatggaaatcagatcaagcccaaaatgttttgcgctggttacccagagggaggaattgacgcctgtcagggtgattccgggggacccttcgtgtgtgaggacagtatatccaggacccccagatggagactctgtgggatcgtttcttgggggacggggtgtgcccttgcccagaaacccggagtgtataccaaggtttccgatttcagagagtggatcttccaggctatcaaaacccattccgaggcgtctggaatggtgacccagctttag

SEQ ID NO: 257681 - DNA, 1254 bp, Artificial Sequence
  derived and/or modified sequence
atggcccagaaggagggcggcagaaccgtgccctgctgcagcagacccaaggtggccgccctgaccgccggcaccctgctgctgctgaccgccatcggcgccgccagctgggccatcgtggccgtgctgctgagaagcgaccaggagcccctgtaccccgtgcaggtgagcagcgccgacgccagactgatggtgttcgacaagaccgagggcacctggagactgctgtgcagcagcagaagcaacgccagagtggccggcctgagctgcgaggagatgggcttcctgagagccctgacccacagcgagctggacgtgagaaccgccggcgccaacggcaccagcggcttcttctgcgtggacgagggcagactgccccacacccagagactgctggaggtgatcagcgtgtgcgactgccccagaggcagattcctggccgccatctgccaggactgcggcagaagaaagctgcccgtggacagaatcgtgggcggcagagacaccagcctgggcagatggccctggcaggtgagcctgagatacgacggcgcccacctgtgcggcggcagcctgctgagcggcgactgggtgctgaccgccgcccactgcttccccgagagaaacagagtgctgagcagatggagagtgttcgccggcgccgtggcccaggccagcccccacggcctgcagctgggcgtgcaggccgtggtgtaccacggcggctacctgcccttcagagaccccaacagcgaggagaacagcaacgacatcgccctggtgcacctgagcagccccctgcccctgaccgagtacatccagcccgtgtgcctgcccgccgccggccaggccctggtggacggcaagatctgcaccgtgaccggctggggcaacacccagtactacggccagcaggccggcgtgctgcaggaggccagagtgcccatcatcagcaacgacgtgtgcaacggcgccgacttctacggcaaccagatcaagcccaagatgttctgcgccggctaccccgagggcggcatcgacgcctgccagggcgacagcggcggccccttcgtgtgcgaggacagcatcagcagaacccccagatggagactgtgcggcatcgtgagctggggcaccggctgcgccctggcccagaagcccggcgtgtacaccaaggtgagcgacttcagagagtggatcttccaggccatcaagacccacagcgaggccagcggcatggtgacccagctgtag

SEQ ID NO: 257682 - protein, 500 aa, Artificial Sequence
  derived and/or modified sequence
MEVSTNPSSNIDPGDYVEMNDSITHLPSKVVIQDITMELHCPLCNDWFRDPLMLSCGHNFCEACIQDFWRLQAKETFCPECKMLCQYNNCTFNPVLDKLVEKIKKLPLLKGHPQCPEHGENLKLFSKPDGKLICFQCKDARLSVGQSKEFLQISDAVHFFTEELAIQQGQLETTLKELQTLRNMQKEAIAAHKENKLHLQQHVSMEFLKLHQFLHSKEKDILTELREEGKALNEEMELNLSQLQEQCLLAKDMLVSIQAKTEQQNSFDFLKDITTLLHSLEQGMKVLATRELISRKLNLGQYKGPIQYMVWREMQDTLCPGLSPLTLDPKTAHPNLVLSKSQTSVWHGDIKKIMPDDPERFDSSVAVLGSRGFTSGKWYWEVEVAKKTKWTVGVVRESIIRKGSCPLTPEQGFWLLRLRNQTDLKALDLPSFSLTLTNNLDKVGIYLDYEGGQLSFYNAKTMTHIYTFSNTFMEKLYPYFCPCLNDGGENKEPLHILHPQ

SEQ ID NO: 257683 - DNA, 1503 bp, Artificial Sequence
  derived and/or modified sequence
atggaggtgtccactaatccctcatccaacatcgaccctggtgattatgtggaaatgaacgattcaattacgcatctcccgtccaaggtagtcattcaggacataactatggaactccattgtccgctgtgtaacgactggtttagggaccctctcatgctcagctgcggacacaatttctgtgaagcctgcattcaggatttctggcgtttacaggcaaaagaaaccttctgccctgaatgcaagatgttatgtcaatataacaattgtacctttaatcccgtcctcgataagctggtggaaaaaattaagaaactgcctctgcttaagggccatccacagtgccccgagcatggtgaaaatctcaagcttttttccaagccagatggaaagctgatctgtttccagtgcaaggatgcccgactgagcgtggggcagtccaaagaattcttacagatctcagatgccgtgcacttctttactgaggaactcgcaattcagcagggtcagttggaaacgacgcttaaagaattgcagacattgagaaacatgcaaaaggaagctatcgccgcacataaggagaacaagctccatttgcagcagcacgtgtccatggagttcctgaagcttcatcagtttctacactccaaggagaaggacatattgaccgagttgagggaggagggaaaggccctgaacgaggaaatggagctgaatcttagtcagctgcaggagcaatgcttactcgcaaaagacatgctggtttccatccaggcaaagaccgaacagcaaaatagcttcgactttctcaaggatatcaccaccctgttacactccctggaacaaggaatgaaagtcctcgcgacgagggaactgatttctcggaaacttaacctcggccagtacaagggtcccattcagtacatggtctggcgagaaatgcaggacactctctgtcctggcctttcccctctcactcttgacccgaagactgcccatcccaatctcgtgctgagcaaaagccaaacttctgtgtggcacggagacataaagaagattatgccagatgatcccgagaggttcgatagctctgttgcagtgctgggttcaagaggctttaccagcggcaagtggtactgggaggtggaagtcgccaagaagactaagtggactgtgggcgtcgtacgggagtcgataatccggaagggcagttgtcctctgaccccggagcagggcttctggctgctccggcttaggaaccagactgacctcaaggcactggatctgccttccttttccctgactctgacaaataacctggataaagtcgggatctacttggactacgaaggaggccagctaagtttttacaacgctaagactatgactcacatttacaccttctcaaacacttttatggaaaaactgtatccttacttttgcccttgtcttaatgacgggggcgaaaataaagagccgctccacattttacaccctcaatag

SEQ ID NO: 257684 - DNA, 1503 bp, Artificial Sequence
  derived and/or modified sequence
atggaggttagtaccaatccatcttcaaacatcgacccaggtgattacgtggagatgaatgattctattactcacctgccaagtaaagtggtaattcaggatatcacgatggagttgcattgcccattgtgtaatgattggttccgcgacccactgatgctttcctgtgggcacaacttttgtgaagcgtgtatacaagatttctggcggctgcaggccaaagagacattttgtcctgagtgcaagatgctgtgtcaatacaataactgcacgtttaacccagtactagataagcttgtagagaagattaaaaaattgcccctgctgaaaggccatccccagtgccctgagcacggcgagaaccttaagctgttctcaaagccagacggtaaactcatttgttttcagtgtaaggatgccaggctttctgttggacagagcaaggaattcctgcagatcagcgatgccgtgcacttctttaccgaggagctcgcaattcagcaaggccagctggagaccaccttaaaagagcttcaaacactacgaaacatgcagaaagaggctatcgcagcacataaggaaaacaagctgcaccttcagcagcacgtttcaatggaattcctgaagctccatcagttcctccattcaaaggaaaaagacatacttaccgaactgcgcgaagaggggaaagcacttaacgaagagatggagctgaatctcagccaacttcaagagcagtgcctcctcgcgaaggacatgctcgtgtcaattcaagctaagacagagcagcagaactcattcgatttccttaaggatatcaccacgctgctgcacagtctcgagcagggaatgaaagttctggcgactcgcgagttaatttcccgtaagctcaacttgggccagtataaaggccctatccagtacatggtgtggagggagatgcaggacaccctctgccctgggctgagtccactgaccctggacccgaagaccgcccatccaaacttagtcttgtctaagtctcagacctccgtttggcatggcgatataaagaaaatcatgccggacgatcccgagcggtttgactcaagcgttgccgtcctgggcagccggggttttaccagcggaaagtggtattgggaggttgaagttgctaaaaagacaaagtggactgtgggcgtggtccgggagagcattattagaaagggatcatgcccgctcaccccggaacagggcttttggctcctgaggctaaggaaccagacagatctaaaggcactggacttgcccagtttcagcctgaccctgaccaacaacctcgataaggtcggcatctacctagattacgaaggtggccagttgagcttttacaatgccaaaacaatgactcacatctacactttttctaacacctttatggagaaactttatccttatttctgtccctgtctcaacgacggcggtgaaaacaaggagccgctgcacattctgcacccgcagtag

SEQ ID NO: 257685 - DNA, 1503 bp, Artificial Sequence
  derived and/or modified sequence
atggaggtgtccaccaaccccagcagcaacattgatcctggggactatgtggagatgaatgacagcatcacccacctgcccagcaaggtggtgatccaggacatcaccatggagctgcactgccccctgtgcaatgactggttccgggaccccctgatgctgagctgtggccacaacttctgtgaggcctgcatccaggacttctggaggctgcaggccaaggagaccttctgcccagagtgcaagatgctgtgccagtacaacaactgcaccttcaaccctgtgctggacaagctggtggagaagatcaagaagctgcccctgctgaagggccacccccagtgcccagagcacggggagaacctgaagctgttcagcaagccagatggcaagctgatctgcttccagtgcaaggatgcccggctgtctgtgggccagagcaaggagttcctgcagatcagtgatgctgtgcacttcttcacagaggagctggccatccagcagggccagctggagaccaccctgaaggagctgcagaccctgaggaacatgcagaaggaggccatcgccgcccacaaggagaacaagctgcacctgcagcagcacgtgtccatggagttcctgaagctgcaccagttcctgcacagcaaggagaaggacatcctgacagagctgcgggaggagggcaaggccctgaatgaggagatggagctgaacctgagccagctgcaggagcagtgcctgctggccaaggacatgctggtgtccatccaggccaagacagagcagcagaacagctttgacttcctgaaggacatcaccaccctgctgcacagcctggagcagggcatgaaggtgctggccacccgggagctgatcagcaggaagctgaacctgggccagtacaagggccccatccagtacatggtgtggagggagatgcaggacaccctgtgccccggcctgagccccctgaccctggaccccaagacagcccaccccaacctggtgctgagcaagagccagacctctgtgtggcatggagacatcaagaagatcatgccagatgatcctgagagatttgacagctctgtggccgtgctgggcagccggggcttcaccagcggcaagtggtactgggaggtggaggtggccaagaagaccaagtggacagtgggcgtggtgcgggagagcatcatcaggaagggcagctgccccctgaccccagagcagggcttctggctgctgcggctgaggaaccagacagacctgaaggccctggacctgcccagcttcagcctgaccctgaccaacaacctggacaaggtgggcatctacctggactatgaaggaggccagctgtccttctacaatgccaagaccatgacccacatctacaccttcagcaacaccttcatggagaagctgtacccctacttctgcccctgcctgaatgatggaggagagaacaaggagcccctgcacatcctgcacccccagtag

SEQ ID NO: 257686 - DNA, 1503 bp, Artificial Sequence
  derived and/or modified sequence
atggaggtgagcaccaaccccagcagcaacatcgaccccggcgactacgtcgaaatgaatgattccattactcatttaccatccaaggtggtgattcaagatattaccatggaactgcactgccctctatgtaatgattggtttcgggaccctctgatgctctcatgtggccacaatttctgcgaggcctgtattcaggatttctggcgcctgcaagccaaagagacattctgtcccgagtgcaagatgctgtgccagtacaataactgcacctttaaccccgtgttggacaaactggtggagaaaataaagaagctgcccctcctgaaaggtcatcctcagtgcccggagcatggcgagaacttaaagctgtttagcaagcctgatggtaaactaatatgcttccaatgcaaggacgctcggctctccgtcggacaatctaaggagtttttacaaatttccgacgccgtgcacttctttactgaggagctggcaattcaacagggacagttagaaacaacactgaaggaactgcaaacactacgcaatatgcagaaggaggccatcgcggcccataaagaaaacaaactgcacctacaacagcatgtcagcatggaatttctgaaactgcaccaatttcttcactcaaaggagaaagatatactgacggagctacgcgaagaaggaaaggcgttaaatgaagaaatggaactgaatctgagtcaactccaggaacagtgcctactggccaaggacatgctcgtctctattcaagccaagaccgagcagcagaacagtttcgacttcctgaaagacatcaccacactgctgcacagcctggaacaggggatgaaggtattagctacgcgggagctcatttcccgcaagctgaatctagggcagtacaagggacccatccaatacatggtctggagagagatgcaggataccctgtgtccaggactgagccctttgaccttagatcctaagaccgctcatccaaatctggtgttgtctaagtcccagacgtcagtttggcacggtgatatcaaaaaaattatgcctgatgatcccgaaagatttgatagctccgtggcggtgttaggatccaggggctttacctctggtaaatggtattgggaagtagaggtggccaagaaaaccaaatggacagttggtgtggtgcgggagtccataatcagaaaaggcagctgcccactgacccctgaacaaggattttggctcttgcggctaagaaatcaaactgacctgaaagctctcgacctgccctctttttcactgacactaactaacaatctcgataaggtcggcatatatctagactacgaaggcggccaactgagcttctataacgccaagacaatgacacatatttataccttctcgaacacgtttatggagaagctgtatccatacttttgtccatgcctcaatgacggaggagaaaataaggagccacttcacatactccacccacagtag

SEQ ID NO: 257687 - DNA, 1503 bp, Artificial Sequence
  derived and/or modified sequence
atggaggtgagcaccaaccccagcagcaacatcgaccccggcgactacgtggagatgaacgatagtatcacacacttgccctctaaggtggtaatccaggacatcacaatggagctgcattgcccactctgcaatgactggtttcgcgatccgcttatgctctcctgcgggcataatttttgtgaggcctgtattcaggatttttggcgcctgcaggctaaagaaaccttctgtcccgagtgcaagatgctatgccagtacaataattgcaccttcaatccggtgctggataaacttgtggaaaaaattaaaaaactgcctctcttgaagggacatccccagtgcccagaacatggcgagaatcttaagctgttcagtaaacccgatggaaagctgatttgcttccagtgtaaagatgctcgcctgtcagtggggcagagcaaggaatttctgcagataagtgatgccgtacatttttttacggaggagctggccatacaacaggggcagctggaaacgacacttaaggagttgcagaccctgaggaatatgcaaaaagaagcaatcgccgcacataaagaaaacaagttacacctgcagcagcacgtaagtatggagtttcttaaactgcaccagtttctgcactccaaagagaaagacatcctcaccgagctgcgcgaagaagggaaggctctgaacgaagagatggaattaaacctgagtcaacttcaggagcaatgccttttggctaaagatatgctcgtgagtattcaggcaaaaactgagcaacagaactccttcgatttcttgaaggacatcacaaccttgctgcactctcttgagcaaggcatgaaagtactggccaccagggagctgatttcacgcaagttaaatttgggccagtataagggcccaatccaatatatggtttggcgggagatgcaggacactttgtgtcccgggctctccccactcacgctggatccgaagacagcccaccctaatctggtgctgtccaagagccagactagtgtgtggcacggcgacattaaaaagatcatgccggatgatcctgagcgctttgacagctctgtggccgtgctggggtcaagaggttttacttctggcaaatggtactgggaggttgaggtggctaaaaagactaagtggacagtgggagtggtccgggagtctataattcgcaaaggcagctgccctcttacccccgagcagggattttggctgctgcgtcttagaaatcagacggatcttaaagcattggatctgcctagcttcagcctgactctaacaaacaatctggacaaagttgggatatacttggactatgaaggcgggcaacttagtttctacaatgctaaaactatgacccacatttacacattttctaacacattcatggaaaagctgtacccctacttttgtccctgtctcaatgatggcggcgaaaacaaggagccgcttcacattttacacccccagtag

SEQ ID NO: 257688 - DNA, 1503 bp, Artificial Sequence
  derived and/or modified sequence
atggaggtatctaccaacccaagtagcaacatcgacccgggagattacgtcgaaatgaacgattcaataacccatctgcctagcaaagtggtcattcaggatattacaatggaattgcactgccctctctgcaatgattggtttcgagaccctttgatgctgagttgcgggcataacttctgtgaggcatgtatacaggacttttggagactgcaggcaaaagaaacattttgcccagaatgtaaaatgttgtgtcagtataataactgcacctttaatcccgttctggacaagctagtggaaaagattaagaaactgcccctactgaaggggcatccccagtgcccggagcacggggaaaacctgaaattgttttctaagcccgatgggaagctaatatgtttccaatgtaaggacgccagactttcagtgggccagtcaaaggaatttttgcagatctcagacgctgttcacttcttcacggaagaattggcaattcagcaaggacagctcgagactacattgaaggagttgcaaactctgaggaatatgcagaaggaggctatcgctgcacataaagagaacaaactgcaccttcagcagcatgtgtctatggagttcctaaaactgcaccagttcctccacagtaaggagaaagatatcctcacagaactgcgggaggagggaaaggctctcaacgaggagatggagctcaacctgagtcagttacaggagcaatgccttttagccaaggatatgctggtaagtatccaggccaagactgagcagcagaatagttttgactttctgaaagatatcacaaccttactgcactctttggaacagggaatgaaggtcctggctactcgtgaactgattagtcgaaagctgaatctgggtcagtacaaaggccctatccagtatatggtctggcgagagatgcaggacaccttatgcccagggctatcgcccctcactctggatcctaaaaccgcacaccctaatctggtgttgtcaaaatcccagaccagcgtgtggcatggtgacatcaagaagataatgcctgacgatcccgaaagattcgacagtagcgtggctgtgctgggcagccgaggatttacttcagggaaatggtactgggaggtcgaggtcgccaagaaaacgaagtggacagtgggcgtcgtccgcgaatccattatcaggaagggaagctgccctctcacccccgagcagggattttggctcctgcgcttgaggaaccagaccgatctgaaagccttggatctcccttcattctccttaacactgacgaacaacctggataaggtggggatctacttggattacgagggtggtcagttgtcattctacaatgccaaaacaatgacccacatctatacctttagtaatacctttatggaaaagctgtacccatatttttgtccttgtctgaatgatggcggagagaacaaggagcctctgcacatcctgcatcctcaatag

SEQ ID NO: 257689 - DNA, 1503 bp, Artificial Sequence
  derived and/or modified sequence
atggaggtgtccacaaatccttcaagcaacatcgacccaggagattacgtggagatgaatgactccatcacacatctgccgtccaaggtagtgatccaggacatcacaatggaactgcactgccccttgtgcaacgattggtttcgcgatcccctaatgctatcttgcggacataatttctgtgaagcatgtattcaggacttttggcgcctccaagccaaagagaccttctgtcctgagtgtaaaatgctctgccagtataacaattgcacatttaacccagttttagataaactcgtggagaaaataaagaagctgccactgttgaaaggacaccctcagtgcccggaacacggggaaaatctgaagttgtttagcaaacccgacggaaaactgatttgcttccagtgtaaagatgccaggttgtcagtggggcagagcaaggaattcctgcagatctctgatgccgtgcacttctttactgaggaacttgccattcaacagggccaactggagactacattgaaagaactgcagacactgcgtaacatgcaaaaagaggctattgcagctcataaagaaaacaagctgcacttacaacaacatgtgtccatggaattcttgaagcttcatcagttcctgcactctaaagaaaaggatatactgacagagctgagggaagaagggaaagctctgaacgaggagatggagcttaacctctcacagctgcaggagcagtgcctgcttgccaaggacatgctggtatcgatccaggcaaagaccgaacagcaaaactccttcgacttcttgaaagatatcaccaccttgctccatagtctggagcaggggatgaaggtcctggcaacaagagagctgattagccgaaaactgaacttgggacagtataaaggacccattcagtacatggtttggcgcgagatgcaagataccctctgccccggtctgtcgcccctaacgctcgatccaaagacggctcatcccaacttggtgctgtctaagagccaaacctctgtgtggcacggcgatatcaaaaagatcatgcctgacgacccggaaagatttgatagtagcgtggccgtgcttggctcccgaggttttaccagtggcaagtggtactgggaagtggaggtggcaaaaaagacgaaatggaccgtgggcgtggtccgcgagtccattatacggaaggggagctgccctctgacacctgagcaaggattctggctgctgagactacgcaatcagacagatctaaaagccctggacctgccttcgtttagccttacattaacgaataacctggataaagtgggaatctatctggattatgaggggggacaactttcattttataacgcaaaaacaatgactcatatctacactttttctaacacctttatggagaaattatatccatatttttgcccctgcctgaacgatggcggagaaaataaagagcccttgcacattctccacccccaatag

SEQ ID NO: 257690 - DNA, 1901 bp, Artificial Sequence
  derived and/or modified sequence
ggggagctatgaaccttaagattagaccactaactcgaatctaaatgagctgcccttgtctcctacaaaagaaaagttgggcaggtagggtattctaatgagggtttctctttctcttaagcaaatgatgatcaaagttaactgacaaactgtcacggaatctgccagacctcactctggccttgctgcttctctccagctcctgaacttttctttcttccatcatgctctgagcccattccttgaaaactaaaaggtccctgactcccagtctgcagccatcctgggcctgctgagctctgattcaagtgcctgcctctgccccttggtgggctgaagcttcatggaggtatccaccaacccctcctccaacatcgatccaggcgactatgttgaaatgaatgattcaatcacccacctaccctctaaagtggtgatacaagatattactatggagctacactgccctctgtgcaatgattggttccgagacccactgatgctaagctgtggccacaacttctgtgaagcctgtatccaagacttttggaggctgcaagcaaaggaaacattctgtcctgagtgtaagatgctatgtcagtataacaactgtacattcaaccctgtactggacaagttggtagagaagattaagaagttacccttactcaagggccatccacagtgcccagagcatggagagaacctgaaactgttcagtaaaccagatgggaaactgatctgctttcaatgcaaggatgctcggttgtctgtggggcagtctaaggagttcctgcaaatctctgatgctgtccatttcttcacggaggagcttgccatccaacagggtcaactggagacaactctgaaggagcttcagaccctgaggaacatgcagaaggaagctattgctgctcacaaggaaaacaagctacatctgcagcaacatgtgtccatggagtttctaaagctgcatcagttcctgcacagcaaagaaaaggacattttaactgagctccgggaagaggggaaagccttgaatgaggagatggagttgaatctgagccagcttcaggagcaatgtctcttagccaaggatatgttggtgagcattcaggcaaagacggaacaacagaactccttcgactttctcaaagacatcacaactctcttacatagcttggagcaaggaatgaaggtgctggcaaccagagagcttatttccagaaagctgaacctgggccagtacaaaggtcctatccagtacatggtatggagggaaatgcaggacactctctgcccaggcctgtctccactaactctggaccctaaaacagctcacccaaatctggtgctctccaaaagccaaaccagcgtctggcatggtgacattaagaagataatgcctgatgatcctgagaggtttgactcaagtgtggctgtactgggctcaagaggcttcacctctggaaagtggtactgggaagtagaagtagcaaagaagacaaaatggacagttggagttgtcagagaatccatcattcggaagggcagctgtcctctaactcctgagcaaggattctggcttttaagactaaggaaccaaactgatctaaaggctctggatttgccttctttcagtctgacactgactaacaacctcgacaaggtgggcatatacctggattatgaaggaggacagttgtccttctacaatgctaaaaccatgactcacatttacaccttcagtaacactttcatggagaaactttatccctacttctgcccctgccttaatgatggtggagagaataaagaaccattgcacatcttacatccacagtaatgagtcataatattatacaaattcagagtgttattaaagaggtattgaaatattt

SEQ ID NO: 257691 - DNA, 2486 bp, Artificial Sequence
  derived and/or modified sequence
agtgttttagcctatccagttccgggagtttgcacgcagacgctctgcttcgtgaccttggctctgctctgtgggcgccgcccccagcctgggcgcgtccatcgtcgagtaccttctcctctgcctccccctccctctgcttctatctctctccaattgccctccctggcctgcggccgcccggtcctccttcccagcccagtgcagccaggcacccgggttcggcttgctcaggtctctgtccgggactgggaagccacggagggccgggaaagtggcacactcctggagctcaagcttcctactctctcatcgctgaataactaccgggcaggactgggtggaacagacagcatatttaggtcattgatgggctgctgggtggatggagctggaaagtgatgggcactgctttctggggctgcccaggttccttccgagggctcgcttttcctgggcagagcgggaaagaggaggggcaggccggtcgcgaaacgcaaatagtcgagaatagcgatccggggagaagcaggtgtctgtggggcccaagagaagtaccatctcgagcatccttagtccagaaatggggagctatgaaccttaagattagaccactaactcgaatctaaatgagctgcccttgtctcctacaaaagaaaagttgggcaggtagggtattctaatgagggtttctctttctcttaagcaaatgatgatcaaagttaactgacaaactgtcacggaatctgccagacctcactctggccttgctgcttctctccagctcctgaacttttctttcttccatcatgctctgagcccattccttgaaaactaaaaggtccctgactcccagtctgcagccatcctgggcctgctgagctctgattcaagtgcctgcctctgccccttggtgggctgaagcttcatggaggtatccaccaacccctcctccaacatcgatccaggcgactatgttgaaatgaatgattcaatcacccacctaccctctaaagtggtgatacaagatattactatggagctacactgccctctgtgcaatgattggttccgagacccactgatgctaagctgtggccacaacttctgtgaagcctgtatccaagacttttggaggctgcaagcaaaggaaacattctgtcctgagtgtaagatgctatgtcagtataacaactgtacattcaaccctgtactggacaagttggtagagaagattaagaagttacccttactcaagggccatccacagtgcccagagcatggagagaacctgaaactgttcagtaaaccagatgggaaactgatctgctttcaatgcaaggatgctcggttgtctgtggggcagtctaaggagttcctgcaaatctctgatgctgtccatttcttcacggaggagcttgccatccaacagggtcaactggagacaactctgaaggagcttcagaccctgaggaacatgcagaaggaagctattgctgctcacaaggaaaacaagctacatctgcagcaacatgtgtccatggagtttctaaagctgcatcagttcctgcacagcaaagaaaaggacattttaactgagctccgggaagaggggaaagccttgaatgaggagatggagttgaatctgagccagcttcaggagcaatgtctcttagccaaggatatgttggtgagcattcaggcaaagacggaacaacagaactccttcgactttctcaaagacatcacaactctcttacatagcttggagcaaggaatgaaggtgctggcaaccagagagcttatttccagaaagctgaacctgggccagtacaaaggtcctatccagtacatggtatggagggaaatgcaggacactctctgcccaggcctgtctccactaactctggaccctaaaacagctcacccaaatctggtgctctccaaaagccaaaccagcgtctggcatggtgacattaagaagataatgcctgatgatcctgagaggtttgactcaagtgtggctgtactgggctcaagaggcttcacctctggaaagtggtactgggaagtagaagtagcaaagaagacaaaatggacagttggagttgtcagagaatccatcattcggaagggcagctgtcctctaactcctgagcaaggattctggcttttaagactaaggaaccaaactgatctaaaggctctggatttgccttctttcagtctgacactgactaacaacctcgacaaggtgggcatatacctggattatgaaggaggacagttgtccttctacaatgctaaaaccatgactcacatttacaccttcagtaacactttcatggagaaactttatccctacttctgcccctgccttaatgatggtggagagaataaagaaccattgcacatcttacatccacagtaatgagtcataatattatacaaattcagagtgttattaaagaggtattgaaatattt

SEQ ID NO: 257692 - DNA, 1503 bp, Artificial Sequence
  derived and/or modified sequence
atggaggtgagcaccaaccccagcagcaacatcgaccccggcgactacgtggagatgaacgacagcatcacccacctgcccagcaaggtggtgatccaggacatcaccatggagctgcactgccccctgtgcaacgactggttcagagaccccctgatgctgagctgcggccacaacttctgcgaggcctgcatccaggacttctggagactgcaggccaaggagaccttctgccccgagtgcaagatgctgtgccagtacaacaactgcaccttcaaccccgtgctggacaagctggtggagaagatcaagaagctgcccctgctgaagggccacccccagtgccccgagcacggcgagaacctgaagctgttcagcaagcccgacggcaagctgatctgcttccagtgcaaggacgccagactgagcgtgggccagagcaaggagttcctgcagatcagcgacgccgtgcacttcttcaccgaggagctggccatccagcagggccagctggagaccaccctgaaggagctgcagaccctgagaaacatgcagaaggaggccatcgccgcccacaaggagaacaagctgcacctgcagcagcacgtgagcatggagttcctgaagctgcaccagttcctgcacagcaaggagaaggacatcctgaccgagctgagagaggagggcaaggccctgaacgaggagatggagctgaacctgagccagctgcaggagcagtgcctgctggccaaggacatgctggtgagcatccaggccaagaccgagcagcagaacagcttcgacttcctgaaggacatcaccaccctgctgcacagcctggagcagggcatgaaggtgctggccaccagagagctgatcagcagaaagctgaacctgggccagtacaagggccccatccagtacatggtgtggagagagatgcaggacaccctgtgccccggcctgagccccctgaccctggaccccaagaccgcccaccccaacctggtgctgagcaagagccagaccagcgtgtggcacggcgacatcaagaagatcatgcccgacgaccccgagagattcgacagcagcgtggccgtgctgggcagcagaggcttcaccagcggcaagtggtactgggaggtggaggtggccaagaagaccaagtggaccgtgggcgtggtgagagagagcatcatcagaaagggcagctgccccctgacccccgagcagggcttctggctgctgagactgagaaaccagaccgacctgaaggccctggacctgcccagcttcagcctgaccctgaccaacaacctggacaaggtgggcatctacctggactacgagggcggccagctgagcttctacaacgccaagaccatgacccacatctacaccttcagcaacaccttcatggagaagctgtacccctacttctgcccctgcctgaacgacggcggcgagaacaaggagcccctgcacatcctgcacccccagtag

SEQ ID NO: 257693 - protein, 583 aa, Artificial Sequence
  derived and/or modified sequence
MDLLPPKPKYNPLRNESLSSLEEGASGSTPPEELPSPSASSLGPILPPLPGDDSPTTLCSFFPRMSNLRLANPAGGRPGSKGEPGRAADDGEGIVGAAMPDSGPLPLLQDMNKLSGGGGRRTRVEGGQLGGEEWTRHGSFVNKPTRGWLHPNDKVMGPGVSYLVRYMGCVEVLQSMRALDFNTRTQVTREAISLVCEAVPGAKGATRRRKPCSRPLSSILGRSNLKFAGMPITLTVSTSSLNLMAADCKQIIANHHMQSISFASGGDPDTAEYVAYVAKDPVNQRACHILECPEGLAQDVISTIGQAFELRFKQYLRNPPKLVTPHDRMAGFDGSAWDEEEEEPPDHQYYNDFPGKEPPLGGVVDMRLREGAAPGAARPTAPNAQTPSHLGATLPVGQPVGGDPEVRKQMPPPPPCPGRELFDDPSYVNVQNLDKARQAVGGAGPPNPAINGSAPRDLFDMKPFEDALRVPPPPQSVSMAEQLRGEPWFHGKLSRREAEALLQLNGDFLVRESTTTPGQYVLTGLQSGQPKHLLLVDPEGVVRTKDHRFESVSHLISYHMDNHLPIISAGSELCLQQPVERKL

SEQ ID NO: 257694 - protein, 473 aa, Artificial Sequence
  derived and/or modified sequence
MNKLSGGGGRRTRVEGGQLGGEEWTRHGSFVNKPTRGWLHPNDKVMGPGVSYLVRYMGCVEVLQSMRALDFNTRTQVTREAISLVCEAVPGAKGATRRRKPCSRPLSSILGRSNLKFAGMPITLTVSTSSLNLMAADCKQIIANHHMQSISFASGGDPDTAEYVAYVAKDPVNQRACHILECPEGLAQDVISTIGQAFELRFKQYLRNPPKLVTPHDRMAGFDGSAWDEEEEEPPDHQYYNDFPGKEPPLGGVVDMRLREGAAPGAARPTAPNAQTPSHLGATLPVGQPVGGDPEVRKQMPPPPPCPGRELFDDPSYVNVQNLDKARQAVGGAGPPNPAINGSAPRDLFDMKPFEDALRVPPPPQSVSMAEQLRGEPWFHGKLSRREAEALLQLNGDFLVRESTTTPGQYVLTGLQSGQPKHLLLVDPEGVVRTKDHRFESVSHLISYHMDNHLPIISAGSELCLQQPVERKL

SEQ ID NO: 257695 - DNA, 1752 bp, Artificial Sequence
  derived and/or modified sequence
atggacctgctgccccccaagcccaagtacaaccccctgagaaacgagagcctgagcagcctggaggagggcgccagcggcagcaccccccccgaggagctgcccagccccagcgccagcagcctgggccccatcctgccccccctgcccggcgacgacagccccaccaccctgtgcagcttcttccccagaatgagcaacctgagactggccaaccccgccggcggcagacccggcagcaagggcgagcccggcagagccgccgacgacggcgagggcatcgtgggcgccgccatgcccgacagcggccccctgcccctgctgcaggacatgaacaagctgagcggcggcggcggcagaagaaccagagtggagggcggccagctgggcggcgaggagtggaccagacacggcagcttcgtgaacaagcccaccagaggctggctgcaccccaacgacaaggtgatgggccccggcgtgagctacctggtgagatacatgggctgcgtggaggtgctgcagagcatgagagccctggacttcaacaccagaacccaggtgaccagagaggccatcagcctggtgtgcgaggccgtgcccggcgccaagggcgccaccagaagaagaaagccctgcagcagacccctgagcagcatcctgggcagaagcaacctgaagttcgccggcatgcccatcaccctgaccgtgagcaccagcagcctgaacctgatggccgccgactgcaagcagatcatcgccaaccaccacatgcagagcatcagcttcgccagcggcggcgaccccgacaccgccgagtacgtggcctacgtggccaaggaccccgtgaaccagagagcctgccacatcctggagtgccccgagggcctggcccaggacgtgatcagcaccatcggccaggccttcgagctgagattcaagcagtacctgagaaacccccccaagctggtgaccccccacgacagaatggccggcttcgacggcagcgcctgggacgaggaggaggaggagccccccgaccaccagtactacaacgacttccccggcaaggagccccccctgggcggcgtggtggacatgagactgagagagggcgccgcccccggcgccgccagacccaccgcccccaacgcccagacccccagccacctgggcgccaccctgcccgtgggccagcccgtgggcggcgaccccgaggtgagaaagcagatgccccccccccccccctgccccggcagagagctgttcgacgaccccagctacgtgaacgtgcagaacctggacaaggccagacaggccgtgggcggcgccggcccccccaaccccgccatcaacggcagcgcccccagagacctgttcgacatgaagcccttcgaggacgccctgagagtgcccccccccccccagagcgtgagcatggccgagcagctgagaggcgagccctggttccacggcaagctgagcagaagagaggccgaggccctgctgcagctgaacggcgacttcctggtgagagagagcaccaccacccccggccagtacgtgctgaccggcctgcagagcggccagcccaagcacctgctgctggtggaccccgagggcgtggtgagaaccaaggaccacagattcgagagcgtgagccacctgatcagctaccacatggacaaccacctgcccatcatcagcgccggcagcgagctgtgcctgcagcagcccgtggagagaaagctgtag

SEQ ID NO: 257696 - DNA, 1752 bp, Artificial Sequence
  derived and/or modified sequence
atggaccttctaccccctaagcccaaatacaatccactccggaacgaaagtttgtcgtcgctggaggaaggagctagcggttccacacctcccgaggagctcccatctccgtctgctagttccctgggtcccatcctaccaccactgcctggagatgattctccaacaaccctttgttccttcttccccagaatgtctaaccttagattggctaacccagccggggggcgtcctggttccaaaggcgaaccaggcagggccgcagacgacggagagggaatcgtgggggcggccatgcccgactctggtcctttacccctccttcaggacatgaacaaactgagtgggggaggcggtagacggacgcgggtggagggaggccagctcgggggagaagagtggaccaggcatgggagtttcgtcaataagcctaccagggggtggctgcaccccaacgataaggtgatggggcctggagtaagttacctagtccgatatatgggttgcgtggaagttctccaaagcatgagggccctcgacttcaacacccgtacgcaggtaacgcgggaggccatttctctggtgtgcgaggcggttccgggagccaaaggtgccacacggcgacgaaagccatgcagccgaccactgtcttctattctggggcgctccaatcttaagttcgcggggatgcccatcaccctcacagtgtctaccagttcactgaatctgatggctgccgattgtaagcaaataatagccaatcaccacatgcagtccatctccttcgcatcaggcggcgatcccgacactgctgaatacgtagcttatgtggccaaggacccagtgaaccaaagagcctgccacatcctcgaatgtcccgagggtttggctcaggatgtgatttctaccatcgggcaggccttcgagctgcgattcaaacagtatctgcggaacccgcccaagctggtgactccacatgacagaatggccggtttcgacggtagcgcttgggatgaagaggaagaggagcccccagaccaccaatactacaatgacttccctggcaaggagccccctcttggtggagttgtagatatgaggctcagagaaggagctgcgccgggggccgcccgtccaacagcccctaatgcacaaaccccttctcatttgggagccacattacctgtcggccaacccgtggggggggaccccgaggtgcgtaaacagatgcctccaccaccaccttgtcccggacgggaactcttcgacgatccctcttatgtgaatgttcagaacctcgacaaggcacgacaggccgtgggcggtgctggccccccaaatcccgcaatcaatggctcagcccccagggacctattcgacatgaagccatttgaagatgcactccgcgtcccccctccaccccagagcgttagcatggctgagcagctcaggggcgagccatggttccacggaaagctctcccgcagggaagccgaagcattactccagctcaacggagacttcctcgtaagggagtccactaccacacccggacagtacgtgctgaccgggcttcaaagtggtcagccaaagcacctgctactcgtggaccccgaaggtgtggttcgcactaaagatcaccggtttgaaagcgtgtctcatctaatttcataccacatggataatcacctgcccattatttccgccggttccgagttgtgtctgcaacaacctgtggaaagaaagctctag

SEQ ID NO: 257697 - DNA, 1752 bp, Artificial Sequence
  derived and/or modified sequence
atggacctgctgccccccaagcccaagtacaaccccctgagaaatgaaagcctgagcagcctggaggagggcgccagcggcagcaccccacctgaggagctgcccagccccagcgccagcagcctgggccccatcctgccccccctgcctggagatgacagccccaccaccctgtgcagcttcttccccaggatgagcaacctgcggctggccaacccagctgggggccggcccggcagcaaaggagagcccggccgggcagcagatgatggagagggcatcgtgggcgccgccatgccagacagcggccccctgcccctgctgcaggacatgaacaagctgagcggcggcggcggccgccgcaccagggtggagggcggccagctgggcggggaggagtggaccaggcatggcagctttgtgaacaagcccacccggggctggctgcaccccaatgacaaggtgatgggccctggggtgtcctacctggtgcgctacatgggctgtgtggaggtgctgcagagcatgagggccctggacttcaacaccaggacccaggtgacccgggaggccatcagcctggtgtgtgaggccgtgcctggggccaagggggccaccaggaggaggaagccctgcagccggcccctgagcagcatcctgggccgcagcaacctgaagtttgctggcatgcccatcaccctgactgtgtccaccagcagcctgaacctgatggctgctgactgcaagcagatcatcgccaaccaccacatgcagagcatcagctttgccagcggcggggaccctgacacagcagaatatgtggcctacgtggccaaggaccctgtgaaccagagggcctgccacatcctggagtgcccagagggcctggcccaggatgtgatcagcaccatcggccaggcctttgagctgcgcttcaagcagtacctgagaaatccacccaagctggtgacccctcatgacaggatggccggctttgatggcagcgcctgggatgaggaggaggaggagcccccagaccaccagtactacaatgacttccctgggaaggagccccccctgggcggcgtggtggacatgaggctgcgggagggcgccgcccctggggccgcccggcccacagccccaaatgcccagacccccagccacctgggcgccaccctgcctgtgggccagcctgtgggcggggaccctgaggtgaggaagcagatgcctcctcctccaccctgccccggccgggagctgtttgatgaccccagctatgtgaatgtgcagaacctggacaaggcccggcaggccgtgggcggggccggcccccccaacccagccatcaatggaagtgccccccgggacctgtttgacatgaagccctttgaagatgccctgcgggtgcccccaccaccccagagcgtgtccatggccgagcagctgcggggggagccctggttccacggcaagctgagcagaagagaggccgaggccctgctgcagctgaatggagacttcctggtgcgggagagcaccaccaccccaggccagtatgtgctgaccggcctgcagagcggccagcccaagcacctgctgctggtggaccctgagggcgtggtgaggaccaaggaccacagatttgaatctgtgagccacctgatctcctaccacatggacaaccacctgcccatcatctctgctggcagcgagctgtgcctgcagcagcctgtggagaggaagctgtag

SEQ ID NO: 257698 - DNA, 1752 bp, Artificial Sequence
  derived and/or modified sequence
atggacctgctgccccccaagcccaagtacaaccccctgcggaacgaatcgctgagctctctagaggagggtgcgtccggttctacccccccagaagagctgccttctccttctgcgagttctctcggaccaattttgcctcccttgcccggtgatgacagccctaccactctttgttcgttcttcccacgcatgagcaatctccgcttggcaaatccagcgggaggccggcccggttctaagggcgagccgggcagggcagccgatgatggtgaggggatcgttggcgccgccatgccagatagcggtcccctgccacttttgcaagatatgaataaacttagcggcggcggtgggcggaggactcgggtggagggagggcagctagggggtgaagagtggacccgtcatggttctttcgttaacaagcccacacgcggttggctgcacccaaatgataaggtgatgggccccggagtgagctacctggttaggtatatgggttgtgtggaagtactccaaagcatgagagctctcgactttaacaccaggacacaagttacccgggaggcgatctctcttgtctgtgaagccgtgcccggggccaaaggagccacccgaagaaggaagccatgtagcaggcctctctcttcaatcctggggaggagtaatctgaaatttgcgggcatgcccattacactcaccgtgagtacatcttcactgaatctgatggctgcagactgtaagcagattatagccaatcaccacatgcagtcaatctcctttgcctctgggggggaccccgataccgccgaatatgtagcctatgttgcaaaggaccctgtgaaccagcgagcctgtcacatccttgagtgtcctgaggggctggcacaagacgtgatcagcactatcggacaggcatttgagctgaggtttaagcagtatcttagaaatccgccaaagctcgtcactccccacgatagaatggccggattcgacggcagcgcctgggatgaggaggaggaggagccccccgatcaccagtattacaacgattttcccggcaaggagccccccctggggggggttgtagatatgagacttagggagggagctgctcccggcgctgcacggcccactgcccccaatgcccagaccccgagccacctcggagctacactgccagtgggccagcctgttggtggtgaccccgaagtgcgaaagcagatgccgcccccgcccccatgtcccgggcgtgagctgttcgatgatccttcttacgtgaacgtacagaacttggacaaggccaggcaggccgtgggtggggcgggtcctcctaaccctgccattaatggctccgccccgcgggacttgttcgacatgaagccatttgaggatgccctgagggtgccaccccctccgcagtcagtcagcatggcagagcagctgcgtggtgaaccatggtttcacgggaagctgagccggcgggaggctgaagcgcttcttcagctgaacggagacttcctagtgagagaatcgactactactcctgggcagtatgtgctcactggcctccagtcagggcagcctaagcacctgctactcgtggaccccgagggtgtggtgcgcactaaagatcaccggttcgaatcagtgagtcatctgatttcttaccatatggacaaccacctacccattatatccgcggggtcagaattgtgcctgcagcagcccgtggaacgaaaactatag

SEQ ID NO: 257699 - DNA, 1752 bp, Artificial Sequence
  derived and/or modified sequence
atggatttgttaccaccaaagcccaaatacaaccctctcaggaacgagtctctttcatccctcgaggagggggcttccggaagcacgccccctgaagagctacccagtccaagtgccagcagcctgggaccaatattgccacccttaccaggagacgacagcccgaccactctctgctctttcttccctcgcatgagcaatctgagacttgcgaatcccgctgggggtaggcctgggtccaaaggcgagcctggccgagcagcagatgatggagaggggattgtgggggcagctatgccagactctgggccactgccactgctccaggatatgaacaaattaagcggcggtggagggaggcgaacgagagttgagggtgggcagttgggcggagaggagtggaccaggcacggttcctttgtgaataagcccactcgagggtggctgcacccaaatgacaaagtgatgggacccggtgtctcatacctcgtcagatacatggggtgcgtggaggttctgcaatctatgagagcactggactttaatacaaggacccaggtgactagagaggctattagcctggtgtgtgaagccgtgccaggtgccaaaggcgcaacacgacggagaaagccttgttcccgccctctgtcctccattctgggaagatcaaacctgaagttcgcaggtatgcccattacgctcaccgtttccacatcatcgctgaatctcatggcagccgattgcaagcagatcatcgcgaaccatcatatgcagtccatctctttcgcctccgggggagatcctgatactgctgaatacgttgcatatgttgccaaggaccccgtaaatcagagagcatgccatatactcgagtgtccggagggtttagcccaggatgtcatctcaactataggacaagcgtttgagttacggtttaaacagtatctacgcaatcccccaaaactggtgactccgcacgatagaatggcaggcttcgacggtagtgcttgggacgaggaggaagaggagcccccagaccaccagtactataatgatttcccgggtaaggagcctcctctgggaggggtggtggacatgcgcctgcgagaaggagcagcacccggagcggctcggcctacagccccaaatgcacagactccttctcatttgggagcaaccctgcccgtggggcaacccgttggtggggacccagaggtcaggaagcagatgccacccccacccccttgtcccggaagggagttatttgacgatccctcatacgttaatgttcaaaatctcgacaaggctcggcaagccgtagggggagccggtccaccaaatcccgcaattaacgggtccgcccctcgcgatctcttcgatatgaaaccatttgaggacgctttacgtgtgccgccaccaccccaatccgtctcaatggccgagcagctgcgaggcgaaccttggttccacgggaaactcagccgacgcgaagccgaggccctcttgcagctgaatggcgattttcttgtaagagagtccacaactacaccgggacagtacgtccttacggggttgcagtcagggcagccgaaacacctgctgctagtagaccctgaaggcgtggtaagaaccaaggaccaccgttttgagagcgtgagccatctaatcagctatcacatggataaccatttgcccattataagcgcaggatcagagctctgtctgcagcagccagtagagcgaaagctttag

SEQ ID NO: 257700 - DNA, 3472 bp, Artificial Sequence
  derived and/or modified sequence
gaggctccacgttgggcggggatggggcctgaaactgtctgggtctgagctggggagcggaagccacttgtccctctccctccccaggacttctgtgactcctgggccacagaggtccaaccaggctaagggcctggggataccccctgcctggcccccttgcccaaactggcaggggggccaggctgggcagcagcccctctttcacctcaactatggatctcctgccccccaagcccaagtacaatccactccggaatgagtctctgtcatcgctggaggaaggggcttctgggtccacccccccggaggagctgccttccccatcagcttcatccctggggcccatcctgcctcctctgcctggggacgatagtcccactaccctgtgctccttcttcccccggatgagcaacctgaggctggccaacccggctggggggcgcccagggtctaagggggagccaggaagggcagctgatgatggggaggggatcgtaggggcagccatgccagactcaggccccctacccctcctccaggacatgaacaagctgagtggaggcggcgggcgcaggactcgggtggaagggggccagcttgggggcgaggagtggacccgccacgggagctttgtcaataagcccacgcggggctggctgcatcccaacgacaaagtcatgggacccggggtttcctacttggttcggtacatgggttgtgtggaggtcctccagtcaatgcgtgccctggacttcaacacccggactcaggtcaccagggaggccatcagtctggtgtgtgaggctgtgccgggtgctaagggggcgacaaggaggagaaagccctgtagccgcccgctcagctctatcctggggaggagtaacctgaaatttgctggaatgccaatcactctcaccgtctccaccagcagcctcaacctcatggccgcagactgcaaacagatcatcgccaaccaccacatgcaatctatctcatttgcatccggcggggatccggacacagccgagtatgtcgcctatgttgccaaagaccctgtgaatcagagagcctgccacattctggagtgtcccgaagggcttgcccaggatgtcatcagcaccattggccaggccttcgagttgcgcttcaaacaatacctcaggaacccacccaaactggtcacccctcatgacaggatggctggctttgatggctcagcatgggatgaggaggaggaagagccacctgaccatcagtactataatgacttcccggggaaggaaccccccttggggggggtggtagacatgaggcttcgggaaggagccgctccaggggctgctcgacccactgcacccaatgcccagacccccagccacttgggagctacattgcctgtaggacagcctgttgggggagatccagaagtccgcaaacagatgccacctccaccaccctgtccaggcagagagctttttgatgatccctcctatgtcaacgtccagaacctagacaaggcccggcaagcagtgggtggtgctgggccccccaatcctgctatcaatggcagtgcaccccgggacctgtttgacatgaagcccttcgaagatgctcttcgcgtgcctccacctccccagtcggtgtccatggctgagcagctccgaggggagccctggttccatgggaagctgagccggcgggaggctgaggcactgctgcagctcaatggggacttcctggtacgggagagcacgaccacacctggccagtatgtgctcactggcttgcagagtgggcagcctaagcatttgctactggtggaccctgagggtgtggttcggactaaggatcaccgctttgaaagtgtcagtcaccttatcagctaccacatggacaatcacttgcccatcatctctgcgggcagcgaactgtgtctacagcaacctgtggagcggaaactgtgatctgccctagcgctctcttccagaagatgccctccaatcctttccaccctattccctaactctcgggacctcgtttgggagtgttctgtgggcttggccttgtgtcagagctgggagtagcatggactctgggtttcatatccagctgagtgagagggtttgagtcaaaagcctgggtgagaatcctgcctctccccaaacattaatcaccaaagtattaatgtacagagtggcccctcacctgggcctttcctgtgccaacctgatgccccttccccaagaaggtgagtgcttgtcatggaaaatgtcctgtggtgacaggcccagtggaacagtcacccttctgggcaagggggaacaaatcacacctctgggcttcagggtatcccagacccctctcaacacccgccccccccatgtttaaactttgtgcctttgaccatctcttaggtctaatgatattttatgcaaacagttcttggacccctgaattcaatgacagggatgccaacaccttcttggcttctgggacctgtgttcttgctgagcaccctctccggtttgggttgggataacagaggcaggagtggcagctgtcccctctccctggggatatgcaacccttagagattgccccagagccccactcccggccaggcgggagatggacccctcccttgctcagtgcctcctggccggggcccctcaccccaaggggtctgtatatacatttcataaggcctgccctcccatgttgcatgcctatgtactctacgccaaagtgcagcccttcctcctgaagcctctgccctgcctccctttctgggagggcggggtgggggtgactgaatttgggcctcttgtacagttaactctcccaggtggattttgtggaggtgagaaaaggggcattgagactataaagcagtagacaatccccacataccatctgtagagttggaactgcattcttttaaagttttatatgcatatattttagggctgtagacttactttcctattttcttttccattgcttattcttgagcacaaaatgataatcaattattacatttatacatcacctttttgacttttccaagcccttttacagctcttggcattttcctcgcctaggcctgtgaggtaactgggatcgcaccttttataccagagacctgaggcagatgaaatttatttccatctaggactagaaaaacttgggtctcttaccgcgagactgagaggcagaagtcagcccgaatgcctgtcagtttcatggaggggaaacgcaaaacctgcagttcctgagtaccttctacaggcccggcccagcctaggcccggggtggccacaccacagcaagccggccccccctcttttggccttgtggataagggagagttgaccgttttcatcctggcctccttttgctgtttggatgtttccacgggtctcacttataccaaagggaaaactcttcattaaagtccgtatttcttcta

SEQ ID NO: 257701 - protein, 431 aa, Artificial Sequence
  derived and/or modified sequence
MSVNVNRSVSDQFYRYKMPRLIAKVEGKGNGIKTVIVNMVDVAKALNRPPTYPTKYFGCELGAQTQFDVKNDRYIVNGSHEANKLQDMLDGFIKKFVLCPECENPETDLHVNPKKQTIGNSCKACGYRGMLDTHHKLCTFILKNPPENSDSGTGKKEKEKKNRKGKDKENGSVSSSETPPPPPPPNEINPPPHTMEEEEDDDWGEDTTEEAQRRRMDEISDHAKVLTLSDDLERTIEERVNILFDFVKKKKEEGVIDSSDKEIVAEAERLDVKAMGPLVLTEVLFNEKIREQIKKYRRHFLRFCHNNKKAQRYLLHGLECVVAMHQAQLISKIPHILKEMYDADLLEEEVIISWSEKASKKYVSKELAKEIRVKAEPFIKWLKEAEEESSGGEEEDEDENIEVVYSKAASVPKVETVKSDNKDDDIDIDAI

SEQ ID NO: 257702 - protein, 200 aa, Artificial Sequence
  derived and/or modified sequence
MSVNVNRSVSDQFYRYKMPRLIAKVEGKGNGIKTVIVNMVDVAKALNRPPTYPTKYFGCELGAQTQFDVKNDRYIVNGSHEANKLQDMLDGFIKKFVLCPECENPETDLHVNPKKQTIGNSCKACGYRGMLDTHHKLCTFILKNPPENSDSGTGKKEKEKKNRKGKDKENGSVSSSETPPPPPPPNEINPPPHTMEEEED

SEQ ID NO: 257703 - protein, 146 aa, Artificial Sequence
  derived and/or modified sequence
MSVNVNRSVSDQFYRYKMPRLIAKVEGKGNGIKTVIVNMVDVAKALNRPPTYPTKYFGCELGAQTQFDVKNDRYIVNGSHEANKLQDMLDGFIKKFVLCPECENPETDLHVNPKKQTIGNSCKACGYRGMLDTHHKLCTFILKNPP

SEQ ID NO: 257704 - protein, 69 aa, Artificial Sequence
  derived and/or modified sequence
MSVNVNRSVSDQFYRYKMPRLIAKVEGKGNGIKTVIVNMVDVAKALNRPPTYPTKYFGCELGAQTQFDV

SEQ ID NO: 257705 - protein, 109 aa, Artificial Sequence
  derived and/or modified sequence
MSVNVNRSVSDQFYRYKMPRLIAKVEGKGNGIKTVIVNMVDVAKALNRPPTYPTKYFGCELGAQTQFDVKNDRYIVNGSHEANKLQDMLDGFIKKFVLCPECENPETDL

SEQ ID NO: 257706 - protein, 101 aa, Artificial Sequence
  derived and/or modified sequence
MSVNVNRSVSDQFYRYKMPRLIAKVEGKGNGIKTVIVNMVDVAKALNRPPTYPTKYFGCELGAQTQFDVKNDRYIVNGSHEANKLQDMLDGFIKKFVLCPE

SEQ ID NO: 257707 - protein, 51 aa, Artificial Sequence
  derived and/or modified sequence
MSVNVNRSVSDQFYRYKMPRLIAKVEGKGNGIKTVIVNMVDVAKALNRPPT

SEQ ID NO: 257708 - DNA, 1296 bp, Artificial Sequence
  derived and/or modified sequence
atgagcgtgaacgtgaacagaagcgtgagcgaccagttctacagatacaagatgcccagactgatcgccaaggtggagggcaagggcaacggcatcaagaccgtgatcgtgaacatggtggacgtggccaaggccctgaacagaccccccacctaccccaccaagtacttcggctgcgagctgggcgcccagacccagttcgacgtgaagaacgacagatacatcgtgaacggcagccacgaggccaacaagctgcaggacatgctggacggcttcatcaagaagttcgtgctgtgccccgagtgcgagaaccccgagaccgacctgcacgtgaaccccaagaagcagaccatcggcaacagctgcaaggcctgcggctacagaggcatgctggacacccaccacaagctgtgcaccttcatcctgaagaacccccccgagaacagcgacagcggcaccggcaagaaggagaaggagaagaagaacagaaagggcaaggacaaggagaacggcagcgtgagcagcagcgagacccccccccccccccccccccccaacgagatcaacccccccccccacaccatggaggaggaggaggacgacgactggggcgaggacaccaccgaggaggcccagagaagaagaatggacgagatcagcgaccacgccaaggtgctgaccctgagcgacgacctggagagaaccatcgaggagagagtgaacatcctgttcgacttcgtgaagaagaagaaggaggagggcgtgatcgacagcagcgacaaggagatcgtggccgaggccgagagactggacgtgaaggccatgggccccctggtgctgaccgaggtgctgttcaacgagaagatcagagagcagatcaagaagtacagaagacacttcctgagattctgccacaacaacaagaaggcccagagatacctgctgcacggcctggagtgcgtggtggccatgcaccaggcccagctgatcagcaagatcccccacatcctgaaggagatgtacgacgccgacctgctggaggaggaggtgatcatcagctggagcgagaaggccagcaagaagtacgtgagcaaggagctggccaaggagatcagagtgaaggccgagcccttcatcaagtggctgaaggaggccgaggaggagagcagcggcggcgaggaggaggacgaggacgagaacatcgaggtggtgtacagcaaggccgccagcgtgcccaaggtggagaccgtgaagagcgacaacaaggacgacgacatcgacatcgacgccatctag

SEQ ID NO: 257709 - DNA, 1296 bp, Artificial Sequence
  derived and/or modified sequence
atgagtgtcaatgtgaaccggtccgtttccgatcagttctaccgatataaaatgcctaggctgattgcgaaggttgaaggcaaggggaatggcatcaaaacagtcatcgtcaacatggttgacgtggccaaggcactgaatcggcccccaacatatccaaccaagtacttcggatgcgagcttggtgcccagactcaattcgacgtcaaaaatgatcgctatattgttaacggcagtcatgaggcaaataaactgcaggatatgctcgatggtttcattaaaaagttcgtgttgtgcccagagtgcgaaaacccggagactgacctgcacgttaaccctaagaaacagacaatcggtaacagttgtaaggcttgcggttacaggggcatgctggatacacaccataaactgtgcacatttatcctgaaaaatccgccagagaactcagatagcgggacaggcaaaaaggagaaggagaagaagaatcggaaaggaaaggataaggaaaatggcagcgtgtccagttctgagaccccgcctcctcccccacctccaaacgagataaatcctcctccccacactatggaggaagaggaggacgacgattggggagaggatacaacagaggaggcccagcgccgtcgcatggacgaaatcagcgatcatgccaaagtcctaacactctcagacgatctggagcggaccattgaggaacgggtaaacattctttttgattttgtgaagaagaagaaggaggagggcgtaatcgattccagcgataaggaaatcgtggcagaggcggaacgtctagatgttaaggccatgggtccccttgttttgacggaggtcctattcaacgaaaagataagagaacagattaaaaagtacaggagacattttctccgtttttgccataacaacaaaaaagcccaacgttaccttttacacggattggaatgcgtagtggcgatgcaccaggctcagctgatctctaagataccccatatccttaaagaaatgtacgatgccgatctgctggaggaggaagttattatcagttggagtgagaaagcctccaaaaagtacgtctctaaggagctggctaaagaaattcgcgtgaaagctgagccctttattaaatggctcaaggaggccgaggaggaatcatcagggggcgaagaggaagacgaggacgagaacattgaagtcgtttattcaaaagcggcttcggtcccaaaagtagaaactgtgaagtccgacaacaaggatgatgatatagatatcgacgcaatctag

SEQ ID NO: 257710 - DNA, 1296 bp, Artificial Sequence
  derived and/or modified sequence
atgtctgtgaatgtgaacagatctgtgtctgaccagttctaccgctacaagatgcccaggctcatcgccaaggtggagggcaaaggaaatggcatcaagacagtcatcgtgaacatggtggatgtggccaaggccctgaacagaccacccacctaccccaccaagtacttcggctgtgagctgggcgcccagacccagtttgatgtgaagaatgaccgctacatcgtgaatggcagccatgaggccaacaagctgcaggacatgctggatggcttcatcaagaagtttgtgctgtgcccagaatgtgaaaatcctgagacagacctgcacgtgaaccccaagaagcagaccatcggcaacagctgcaaggcctgtggctaccggggcatgctggacacccaccacaagctgtgcaccttcatcctgaagaaccccccagaaaattctgattctggaacaggcaagaaggagaaggagaagaagaacaggaagggcaaggacaaggaaaatggatctgtgagcagcagcgagaccccacctcctcctcctcctccaaatgagatcaaccccccaccccacaccatggaggaggaggaggatgatgactggggcgaggacaccacagaggaggcccagaggaggaggatggatgagatcagtgaccacgccaaggtgctgaccctgagtgatgacctggagaggaccatcgaggagcgggtgaacatcctgtttgattttgtgaagaagaagaaggaggagggcgtcatcgacagcagtgacaaggagatcgtggccgaggccgagcggctggatgtgaaggccatgggccccctggtgctgacagaggtgctcttcaatgagaagatccgggagcagatcaagaagtacagaagacacttcctgcgcttctgccacaacaacaagaaggcccagcgctacctgctgcacggcctggagtgtgtggtggccatgcaccaggcccagctgatcagcaagatcccccacatcctgaaggagatgtatgatgctgacctgctggaggaggaggtgatcatctcctggagcgagaaggccagcaagaagtatgtgtccaaggagctggccaaggagatccgggtgaaggccgagcccttcatcaagtggctgaaggaggccgaggaggagagcagcggcggggaggaggaggatgaagatgaaaatattgaggtggtgtacagcaaggccgcctctgtgcccaaggtggagaccgtgaagagtgacaacaaggatgatgacatcgacattgatgccatctag

SEQ ID NO: 257711 - DNA, 1296 bp, Artificial Sequence
  derived and/or modified sequence
atgagcgtgaacgtgaaccggagcgtgagcgaccagttctaccggtacaaaatgccccgactgatcgccaaagtggaaggcaaaggcaatggaattaaaactgtaattgttaacatggtagacgttgctaaagccctcaacaggccccctacttaccccaccaaatattttgggtgtgaactaggcgctcagacccaatttgacgtcaaaaacgaccgctacatcgttaacggaagtcacgaggccaataaattgcaggacatgctggacgggttcattaagaaatttgttctttgtccggaatgtgagaatcctgagactgacctacatgtgaatccgaagaagcagaccatcggaaactcttgtaaagcctgcgggtacagaggcatgctcgatacacaccataagttatgcacgtttatactcaaaaatccccctgaaaacagtgacagcggaactgggaagaaagagaaggagaaaaagaacagaaaagggaaagataaggaaaacggcagtgtttccagttcagaaacaccgcctccccctccaccacctaacgagattaatccacccccacacacgatggaggaagaagaggacgatgactggggagaggacacaaccgaggaggcccaaaggcggcgaatggacgaaatttctgatcatgcgaaagtgctcacactgtctgacgacctggaacggactattgaggagagagtgaacatcctctttgacttcgtgaagaaaaagaaagaagagggtgtgatcgactcctccgacaaggagatcgttgctgaagctgaacgccttgacgtgaaggccatgggaccactggttctcaccgaagtactgttcaacgaaaagataagggaacaaattaagaaataccggcggcatttcctacgcttttgccataacaacaagaaagctcagcggtatctgctgcacgggcttgaatgcgtcgtcgccatgcaccaggctcagcttatcagcaagatcccccacatactgaaggaaatgtatgacgccgaccttctggaggaagaagtaataatcagttggagcgaaaaagctagcaaaaagtatgtctcaaaagagctggctaaggaaattcgcgtcaaggccgaaccatttatcaaatggcttaaagaagccgaggaggagtccagtggaggtgaagaagaggatgaggacgaaaatattgaggtagtttactccaaagctgctagcgtcccaaaggtggaaaccgtaaaaagcgacaataaagacgatgacatcgatattgacgcaatttag

SEQ ID NO: 257712 - DNA, 1296 bp, Artificial Sequence
  derived and/or modified sequence
atgagcgttaacgtcaatcgctctgtatctgaccaattctaccgctataagatgccaaggctcatcgccaaggttgaaggcaaaggaaacggcattaagaccgtgatcgtgaatatggtggacgtcgctaaggcattaaatcggccacctacttatcccaccaagtactttggttgcgaactgggagcccagactcaatttgatgtgaagaatgatcgctatattgtgaatggcagccatgaagcaaacaagctacaggacatgctggacggcttcattaagaagtttgtgctgtgtccagagtgtgagaatcctgaaacagacttacatgtgaatccgaaaaaacagaccattgggaactcctgtaaggcgtgcggctaccgcggaatgttagacactcaccacaaactgtgcacattcatcttgaagaaccctcctgagaacagtgactcagggacaggcaagaaggagaaggagaaaaagaaccggaagggaaaggataaagagaatggctcagtaagctcgtcagagaccccaccccctccacccccaccaaatgagatcaacccacctcctcatacaatggaagaggaggaggacgatgactggggtgaggataccactgaggaagcccagcggcgacgcatggatgagattagcgaccacgccaaagtgctgacacttagcgacgaccttgaacggactattgaggagagagtaaatattcttttcgactttgtcaagaagaagaaagaggaaggcgttatcgactcaagcgacaaggagatcgtggcagaagcggagcgcctcgatgttaaagctatgggaccacttgtgctgactgaggtgctgtttaacgagaagattagggagcagatcaagaagtaccgtcggcattttctccgcttctgccataacaacaaaaaggctcaaagatatctcctccatgggcttgagtgcgtagttgccatgcaccaggcccagctgattagcaagattcctcacatcctgaaggagatgtacgacgctgatctgctggaggaagaagttataatttcttggtcagagaaagccagcaagaagtatgtgtccaaggagcttgcgaaagagatcagagtcaaagctgagccctttattaaatggctgaaggaagccgaggaagagtcctctggtggcgaggaggaggatgaagacgaaaacatcgaagtcgtctactcaaaggctgcctccgtacccaaagtggaaacggtgaagtccgataacaaagatgatgatattgacattgatgccatttag

SEQ ID NO: 257713 - DNA, 5945 bp, Artificial Sequence
  derived and/or modified sequence
tctgggaaaggcggggggaggggagaggaaggaagcgagaccggggctggaggcgggccgaggccgcgagttgagcctcaggaagcagaaggggcgcggaaagatgcgattgacgtcgcaagcgaaccaatgacgagcgagctgtggcaggcctccagccaatgggcagtgaggcctgacgcggggggcggacgctggggccgagggtagcttgagcgcggcggcggcgttgttcagtcagagcgagaacattccagaggtcgcccagctccggcgctgacgggtgtggaccgcggacgtcgctgggacagcccctccccgctgctcggcggcggcacctggcccggccgctcctcgctgcgcttcgcctccgcctcctcggactcggactcgggtttatatcgcgcctcacttcatcccagtcccgggcgagcagcgttgggtttatgtctttatttgacgaaaacgagctgttgcgcagccattggtacctgtattggggaaacatagcatacaagcaagaagcttacagcctcagtggcgaaaattttttcatgtcagagaccgagaactcttgcagtcgtttatgtcatcccttcttctccagacagaagataccaaaaagttgcaatcaaagatctcttcatcttattgataaagccactaataagccaaaatgtctgtcaatgtcaaccgcagcgtgtcagaccagttctatcgctacaagatgccccgtctgattgccaaggttgagggcaaaggcaatggaatcaagacagttatagtcaacatggttgacgttgcaaaggcgcttaatcggcctccaacgtatcccaccaaatattttggttgtgagctgggagcacagacccagtttgatgttaagaatgaccgttacattgtcaatggatctcatgaggcgaataagctgcaagacatgttggatggattcattaaaaaatttgttctctgtcctgaatgtgagaatcctgaaacagatttgcatgtcaatccaaagaagcaaacaataggtaattcttgtaaagcctgtggctatcgaggcatgcttgacacacatcataaactctgcacattcattctcaaaaacccacctgagaatagtgacagtggtacaggaaagaaagaaaaagaaaagaaaaacagaaagggcaaagacaaggaaaatggctccgtatccagcagtgagacaccaccaccaccaccaccaccaaatgaaattaatcctcctccacatacaatggaagaagaggaggatgatgactggggagaagatacaactgaggaagctcaaaggcgtcgaatggatgaaatcagtgaccatgcaaaagttctgacactcagtgatgatttggaaagaacaattgaggagagggtcaatatcctctttgattttgttaagaaaaagaaagaagagggtgttattgattcatctgacaaagaaatcgttgctgaagcagaaagactggatgtaaaagccatgggccctcttgttctaactgaagttctttttaatgagaagattagagaacagattaagaaatacaggcgccatttcctacgattttgtcacaacaacaaaaaagcccaacggtaccttcttcatggtttggagtgtgtggtagcaatgcatcaagctcagcttatctccaagattccacatatcttgaaggagatgtacgatgcagaccttttagaagaagaggtcatcatcagctggtcggaaaaggcctctaagaaatatgtctccaaagaacttgccaaagagattcgtgtcaaagcagaaccatttataaaatggttgaaggaggcagaggaagaatcttctggtggcgaagaagaagatgaagatgagaacattgaggtggtgtattcgaaggctgccagtgtaccgaaagttgagactgtaaagtcagacaacaaggatgacgacatcgatattgatgccatttaaagggatggatgcaacctagcttaacagtataatgctgcaaattttcctccattatcagccagaagtgcaacatgtatgtgcaaaagctaaaatggcttaacatcatgctacactttacactaaaaatctattactgtgagtggtctgttattaagcccaatgagacatctagggagtccatacacatcagtgagcagatgtagtttgcttatttatagcatgtttctttttgaaaaactagtggtggacacatttggatcacatttatacagttataaaaataaaggtttgattttggtcgttcttcagatgtttggctctgaatgacttaagctgaagtaactggctccttactttaaatgttctgccatcatttcacctgatgagcattcttggagcctgccagatattgttaggtcctggggctgcaaagaggtcctcaacaggatgtaaagcaaacttaattgtaattaatttattcagcccattaagaaagtactaaagttttatctctgtagttcctcaaattggcatctggtaatgtacattgtgaggtagactgataatgaaatgacagtgtaacatcttaaccaagaagtaaatatgacctcagtgtcctataaataatgtaagagcaggatttgaaacttggagagctgttttctcatttcatgtacacttgccccaaattgtctttgaagtcgtgtgcattgcacgttggatgagccagggaaattattacattaacaagcattttgtgtgtacgtagtagttactttgtactgagagaacttgctttggggtgcaattaataaactgattttatttgggagaaacaaggaagggtgcacttaactagcaacctaagcatgatttttcagcttttgcccttagggtttaaattacaattccaaaatgttagacatactgtattttttcgttcagtgtggctttaattttcccctcttgcagtttgttctgtaatgccttttacatttggacacatagtttatgctttttagattttggttgctttcttgccaaaataagtgttaactgtgtttcaaacttgattttctttcctttttcttttttttttcttccagaatgtcttatttaaaaagaaagctaaaagcatacttctaagtcagagcctctattttggtgtaagacttgggatattttttacttcacattgaatatagccaggcacccaagaagtctgatggccacctgagtgcaggtgacaaggacctgacagagcccatgcagggctttagatttggacacacaagagttgataacttcctcatgaactccttgcctgatctaaactcatattatgggttctgactgtttgagtaatcatcttcaaggttaaacctcttggcagttacccttttcacaaagtgcacagtgggaatcgagaatcgatagggttaattttggagcagtggcttataccattcacctctgtttttttgtgattatttcacagataatgagaccttaataacaaataggcgtaaaaaaattttcacattgaaatgatagaaacatttgatgtaataaaacttggttggcttgatattttaaggaattgaaacctagcaatcttattggagagacaagaattggtctccagctgcctttgatcaagattcgggtgcaagtggagcaggagccatatacctggagggaatgtgctttgtcacaccaaagaggatttttttttcttcaaacttgtatgttgcctaggtttcaaattctttgccgcaaggctgatctgctttcattaactggaattctgtaggagatactggtgacctaagctaagttgcactcagcatactcagtgtcaagctaatgaggttctattataaaggttctacttttaatctgagggaaaacatgttcagggcttctagaacactaaaaaatttggcttaaaccagtgttcagtctggtgccaaacttcgaatggaatacaaattcacataatctgaactttgttcacaggttatcctaatagagtaattcttcactttgctctattgaactgtcttaaggatttgtttaaacagctaagttacttgattaaaataatgataaaattgtattttgtctttgctttaatattaaagttaacaagttttcattttataatgagatcaaagcattggaatctgccctgttttgtagccgttgctttggatttgtgttggatgtatcctgcagttacacttgccagccccactcacaaaagttgttcatttcattgggtcactggctttatttgctagtcttgtctgtgaactgagcatctgcctcagttttattacttgaaatcttggcaggtgcttaatagggaacatacatacagctatgtaactgtgaataattgtatatatctctagttaagaatgagggaatggggaggtttgctttctaaacaagtgcattctgaaattgacttaaaaatttttagtgtgggtcctaaagtttagagatgggcaaggaggtctctaatccaccgcttcccgcttgagaagggaggggtatcaaaattgagccccaagctgtttgttccagtgtaccaagcactgactttatgcctttggcctggagatggcagaagtgaaagctggccatctgcaaaaagcagataagtgagtttgaaccttttgcattttgttagctcagtcagtcctcatcgtggtcctgaggcataggtactgttgtaccaaggtcacttatctaacaaaataacccttcatgtattttaaatttatttgacaagtctgcagacaatccttatctaaccagctattttcttaattgctacagcttgacctaccagtattccggagtaaccagcaaatgcaaagttgaccttgttcctgcatcatctttttgatggttcaaatttcagcctccctgactactacaaagccagagcagtcttagtaccagaaacagtgttgcactttcgttgcatgtgctgtgtgaccccaaggggacagggagtcactttggtcatctctgtccccagtacagatcttgattcatagtgacattccataagtggggtgacagcaaatgacttgcaggtagtctcattgtaggtttgtgcaccagagtgaccctgtgagcctttgttaataggttgggagctcagggtgtttatgtccacctgtctggtctagccaaacagtttttttctgggaatcaaatttctgtggtttttatggccagaaattttaaggacttgtgtgtgctgggatatgagaatagaagctacagagttcttttcttgggacctagactgggaggtgcaatgtcaggacctccaggtgaatggtaggatctgagttgaccctgcagttcggttatgcagtcaattatttctttttaagaggaggaggattcacttgggtgttgggatcaaatttggattctgtcccaggccttactgtaaaactaggggattgcctttccatatctgctgggggtggagacccttatgtgcagcactcaatcccactggaagcctaatgctgcagtcagaagcaatgcctggctggggcagtaggggaaattccacccaattttgctatgagcctaaaacctctttaaaaacggtcagttaactaaaaaataaaaatcaagtctttaggagagtagaaaacacaattaactaaaaagcagggacatctgaaagagacgtattaagttaacatttttaaaaatccaaatgaaagtaaatggaataaatgtatcaggtaaaggacaagttgtaagcttggatttttaggtctagcaatacactgtttacaagagcatcacctaaaatgtgacaaaagatgttgaaaggatgaaaaaaggtatagtagacatacactaaccaaaaatgtagctctttgaatctcagaaaaaagtagattttaataaagtgtgaaagttgtcaatcaaa

SEQ ID NO: 257714 - DNA, 3417 bp, Artificial Sequence
  derived and/or modified sequence
gggggcggcccgatcccggcacccctcggccgtgtgtcgcttcccggctgtgcaccctccggggccgccggctctcgggggacgcgctggggatggggccagacgccccggtcgcgcgcccccctccttcgcggagctgcccggttcgccagcccccgcggaaacgcctcggagcgcggtagccatggggaccagggcgaaggttaaccgagtatttgaatagcgaggaaaagggaggccggggcgagcctggcgttcgctcgcgctctcttgcttaatggcaaattgtgggcgagcgctgcgtttaaggaagtgctgctttgaaagctgttgcgcagccattggtacctgtattggggaaacatagcatacaagcaagaagcttacagcctcagtggcgaaaattttttcatgtcagagaccgagaactcttgcagtcgtttatgtcatcccttcttctccagacagaagataccaaaaagttgcaatcaaagatctcttcatcttattgataaagccactaataagccaaaatgtctgtcaatgtcaaccgcagcgtgtcagaccagttctatcgctacaagatgccccgtctgattgccaaggttgagggcaaaggcaatggaatcaagacagttatagtcaacatggttgacgttgcaaaggcgcttaatcggcctccaacgtatcccaccaaatattttggttgtgagctgggagcacagacccagtttgatgttaagaatgaccgttacattgtcaatggatctcatgaggcgaataagctgcaagacatgttggatggattcattaaaaaatttgttctctgtcctgaatgtgagaatcctgaaacagatttgcatgtcaatccaaagaagcaaacaataggtaattcttgtaaagcctgtggctatcgaggcatgcttgacacacatcataaactctgcacattcattctcaaaaacccacctgagaatagtgacagtggtacaggaaagaaagaaaaagaaaagaaaaacagaaagggcaaagacaaggaaaatggctccgtatccagcagtgagacaccaccaccaccaccaccaccaaatgaaattaatcctcctccacatacaatggaagaagaggaggatgatgactggggagaagatacaactgaggaagctcaaaggcgtcgaatggatgaaatcagtgaccatgcaaaagttctgacactcagtgatgatttggaaagaacaattgaggagagggtcaatatcctctttgattttgttaagaaaaagaaagaagagggtgttattgattcatctgacaaagaaatcgttgctgaagcagaaagactggatgtaaaagccatgggccctcttgttctaactgaagttctttttaatgagaagattagagaacagattaagaaatacaggcgccatttcctacgattttgtcacaacaacaaaaaagcccaacggtaccttcttcatggtttggagtgtgtggtagcaatgcatcaagctcagcttatctccaagattccacatatcttgaaggagatgtacgatgcagaccttttagaagaagaggtcatcatcagctggtcggaaaaggcctctaagaaatatgtctccaaagaacttgccaaagagattcgtgtcaaagcagaaccatttataaaatggttgaaggaggcagaggaagaatcttctggtggcgaagaagaagatgaagatgagaacattgaggtggtgtattcgaaggctgccagtgtaccgaaagttgagactgtaaagtcagacaacaaggatgacgacatcgatattgatgccatttaaagggatggatgcaacctagcttaacagtataatgctgcaaattttcctccattatcagccagaagtgcaacatgtatgtgcaaaagctaaaatggcttaacatcatgctacactttacactaaaaatctattactgtgagtggtctgttattaagcccaatgagacatctagggagtccatacacatcagtgagcagatgtagtttgcttatttatagcatgtttctttttgaaaaactagtggtggacacatttggatcacatttatacagttataaaaataaaggtttgattttggtcgttcttcagatgtttggctctgaatgacttaagctgaagtaactggctccttactttaaatgttctgccatcatttcacctgatgagcattcttggagcctgccagatattgttaggtcctggggctgcaaagaggtcctcaacaggatgtaaagcaaacttaattgtaattaatttattcagcccattaagaaagtactaaagttttatctctgtagttcctcaaattggcatctggtaatgtacattgtgaggtagactgataatgaaatgacagtgtaacatcttaaccaagaagtaaatatgacctcagtgtcctataaataatgtaagagcaggatttgaaacttggagagctgttttctcatttcatgtacacttgccccaaattgtctttgaagtcgtgtgcattgcacgttggatgagccagggaaattattacattaacaagcattttgtgtgtacgtagtagttactttgtactgagagaacttgctttggggtgcaattaataaactgattttatttgggagaaacaaggaagggtgcacttaactagcaacctaagcatgatttttcagcttttgcccttagggtttaaattacaattccaaaatgttagacatactgtattttttcgttcagtgtggctttaattttcccctcttgcagtttgttctgtaatgccttttacatttggacacatagtttatgctttttagattttggttgctttcttgccaaaataagtgttaactgtgtttcaaacttgattttctttcctttttcttttttttttcttccagaatgtcttatttaaaaagaaagctaaaagcatacttctaagtcagagcctctattttggtgtaagacttgggatattttttacttcacattgaatatagccaggcacccaagaagtctgatggccacctgagtgcaggtgacaaggacctgacagagcccatgcagggctttagatttggacacacaagagttgataacttcctcatgaactccttgcctgatctaaactcatattatgggttctgactgtttgagtaatcatcttcaaggttaaacctcttggcagttacccttttcacaaagtgcacagtgggaatcgagaatcgatagggttaattttggagcagtggcttataccattcacctctgtttttttgtgattatttcacagataatgagaccttaataacaaataggcgtaaaaaaattttcacattgaaatgatagaaacatttgatgtaataaaacttggttggcttga

SEQ ID NO: 257715 - DNA, 872 bp, Artificial Sequence
  derived and/or modified sequence
gcccagctccggcgctgacgggtgtggaccgcggacgtcgctgggacagcccctccccgctgctcggcggcggcacctggcccggccgctcctcgctgcgcttcgcctccgcctcctcggactcggactcgggtttatatcgcgcctcacttcatcccagtcccgggcgagcagcgttgggtttatgtctttatttgacgaaaacgaagataccaaaaagttgcaatcaaagatctcttcatcttattgataaagccactaataagccaaaatgtctgtcaatgtcaaccgcagcgtgtcagaccagttctatcgctacaagatgccccgtctgattgccaaggttgagggcaaaggcaatggaatcaagacagttatagtcaacatggttgacgttgcaaaggcgcttaatcggcctccaacgtatcccaccaaatattttggttgtgagctgggagcacagacccagtttgatgttaagaatgaccgttacattgtcaatggatctcatgaggcgaataagctgcaagacatgttggatggattcattaaaaaatttgttctctgtcctgaatgtgagaatcctgaaacagatttgcatgtcaatccaaagaagcaaacaataggtaattcttgtaaagcctgtggctatcgaggcatgcttgacacacatcataaactctgcacattcattctcaaaaacccacctgagaatagtgacagtggtacaggaaagaaagaaaaagaaaagaaaaacagaaagggcaaagacaaggaaaatggctccgtatccagcagtgagacaccaccaccaccaccaccaccaaatgaaattaatcctcctccacatacaatggaagaagaggaggatg

SEQ ID NO: 257716 - DNA, 719 bp, Artificial Sequence
  derived and/or modified sequence
aggtcgcccagctccggcgctgacgggtgtggaccgcggacgtcgctgggacagcccctccccgctgctcggcggcggcacctggcccggccgctcctcgctgcgcttcgcctccgcctcctcggactcggactcgggtttatatcgcgcctcacttcatcccagtcccgggcgagcagcgttgggtttatgtctttatttgacgaaaacgacagaagataccaaaaagttgcaatcaaagatctcttcatcttattgataaagccactaataagccaaaatgtctgtcaatgtcaaccgcagcgtgtcagaccagttctatcgctacaagatgccccgtctgattgccaaggttgagggcaaaggcaatggaatcaagacagttatagtcaacatggttgacgttgcaaaggcgcttaatcggcctccaacgtatcccaccaaatattttggttgtgagctgggagcacagacccagtttgatgttaagaatgaccgttacattgtcaatggatctcatgaggcgaataagctgcaagacatgttggatggattcattaaaaaatttgttctctgtcctgaatgtgagaatcctgaaacagatttgcatgtcaatccaaagaagcaaacaataggtaattcttgtaaagcctgtggctatcgaggcatgcttgacacacatcataaactctgcacattcattctcaaaaacccacctg

SEQ ID NO: 257717 - DNA, 4384 bp, Artificial Sequence
  derived and/or modified sequence
ggggatggggccagacgccccggtcgcgcgcccccctccttcgcggagctgcccggttcgccagcccccgcggaaacgcctcggagcgcggtagccatggggaccagggcgaaggttaaccgagtatttgaatagcgaggaaaagggaggccggggcgagcctggcgttcgctcgcgctctcttgcttaatggcaaattgtgggcgagcgctgcgtttaaggaagtgctgctttgaagtaagccatggttgccgaagcaacgattagttgtagagaacagttccctaggttgcccttaaaaatgaagacgaacgggggtgtgcctgagaagtttgcttatccaggcggggtgggcggcggagagggctcgggttcgttcttcagcacttccaggatggccgcagaggcaaacctgctgattgccctcggtctgatggaatctcacggcggctgaggcagcacagcttgtgttttcttgtcaggcatttccctaccagtcacagcttagtcgaaatggaggcctttttatgttcccgcagattgtactgtgttacatgagaatggctgtttgcatgtgatctcagatgctttttaaggtggagttaagcagaagcataactaggatgtaaaaaggaggcgtttccatccagcgatgatgttaaacctggggggatttttgtgtgttctttccctttttctttcagagctgttgcgcagccattggtacctgtattggggaaacatagcatacaagcaagaagcttacagcctcagtggcgaaaattttttcatgtcagagaccgagaactcttgcagtcgtttatgtcatcccttcttctccagacagaagataccaaaaagttgcaatcaaagatctcttcatcttattgataaagccactaataagccaaaatgtctgtcaatgtcaaccgcagcgtgtcagaccagttctatcgctacaagatgccccgtctgattgccaaggttgagggcaaaggcaatggaatcaagacagttatagtcaacatggttgacgttgcaaaggcgcttaatcggcctccaacgtatcccaccaaatattttggttgtgagctgggagcacagacccagtttgatgttaagaatgaccgttacattgtcaatggatctcatgaggcgaataagctgcaagacatgttggatggattcattaaaaaatttgttctctgtcctgaatgtgagaatcctgaaacagatttgcatgtcaatccaaagaagcaaacaataggtaattcttgtaaagcctgtggctatcgaggcatgcttgacacacatcataaactctgcacattcattctcaaaaacccacctgagaatagtgacagtggtacaggaaagaaagaaaaagaaaagaaaaacagaaagggcaaagacaaggaaaatggctccgtatccagcagtgagacaccaccaccaccaccaccaccaaatgaaattaatcctcctccacatacaatggaagaagaggaggatgatgactggggagaagatacaactgaggaagctcaaaggcgtcgaatggatgaaatcagtgaccatgcaaaagttctgacactcagtgatgatttggaaagaacaattgaggagagggtcaatatcctctttgattttgttaagaaaaagaaagaagagggtgttattgattcatctgacaaagaaatcgttgctgaagcagaaagactggatgtaaaagccatgggccctcttgttctaactgaagttctttttaatgagaagattagagaacagattaagaaatacaggcgccatttcctacgattttgtcacaacaacaaaaaagcccaacggtaccttcttcatggtttggagtgtgtggtagcaatgcatcaagctcagcttatctccaagattccacatatcttgaaggagatgtacgatgcagaccttttagaagaagaggtcatcatcagctggtcggaaaaggcctctaagaaatatgtctccaaagaacttgccaaagagattcgtgtcaaagcagaaccatttataaaatggttgaaggaggcagaggaagaatcttctggtggcgaagaagaagatgaagatgagaacattgaggtggtgtattcgaaggctgccagtgtaccgaaagttgagactgtaaagtcagacaacaaggatgacgacatcgatattgatgccatttaaagggatggatgcaacctagcttaacagtataatgctgcaaattttcctccattatcagccagaagtgcaacatgtatgtgcaaaagctaaaatggcttaacatcatgctacactttacactaaaaatctattactgtgagtggtctgttattaagcccaatgagacatctagggagtccatacacatcagtgagcagatgtagtttgcttatttatagcatgtttctttttgaaaaactagtggtggacacatttggatcacatttatacagttataaaaataaaggtttgattttggtcgttcttcagatgtttggctctgaatgacttaagctgaagtaactggctccttactttaaatgttctgccatcatttcacctgatgagcattcttggagcctgccagatattgttaggtcctggggctgcaaagaggtcctcaacaggatgtaaagcaaacttaattgtaattaatttattcagcccattaagaaagtactaaagttttatctctgtagttcctcaaattggcatctggtaatgtacattgtgaggtagactgataatgaaatgacagtgtaacatcttaaccaagaagtaaatatgacctcagtgtcctataaataatgtaagagcaggatttgaaacttggagagctgttttctcatttcatgtacacttgccccaaattgtctttgaagtcgtgtgcattgcacgttggatgagccagggaaattattacattaacaagcattttgtgtgtacgtagtagttactttgtactgagagaacttgctttggggtgcaattaataaactgattttatttgggagaaacaaggaagggtgcacttaactagcaacctaagcatgatttttcagcttttgcccttagggtttaaattacaattccaaaatgttagacatactgtattttttcgttcagtgtggctttaattttcccctcttgcagtttgttctgtaatgccttttacatttggacacatagtttatgctttttagattttggttgctttcttgccaaaataagtgttaactgtgtttcaaacttgattttctttcctttttcttttttttttcttccagaatgtcttatttaaaaagaaagctaaaagcatacttctaagtcagagcctctattttggtgtaagacttgggatattttttacttcacattgaatatagccaggcacccaagaagtctgatggccacctgagtgcaggtgacaaggacctgacagagcccatgcagggctttagatttggacacacaagagttgataacttcctcatgaactccttgcctgatctaaactcatattatgggttctgactgtttgagtaatcatcttcaaggttaaacctcttggcagttacccttttcacaaagtgcacagtgggaatcgagaatcgatagggttaattttggagcagtggcttataccattcacctctgtttttttgtgattatttcacagataatgagaccttaataacaaataggcgtaaaaaaattttcacattgaaatgatagaaacatttgatgtaataaaacttggttggcttgatattttaaggaattgaaacctagcaatcttattggagagacaagaattggtctccagctgcctttgatcaagattcgggtgcaagtggagcaggagccatatacctggagggaatgtgctttgtcacaccaaagaggatttttttttcttcaaacttgtatgttgcctaggtttcaaattctttgccgcaaggctgatctgctttcattaactggaattctgtaggagatactggtgacctaagctaagttgcactcagcatactcagtgtcaagctaatgaggttctattataaaggttctacttttaatctgagggaaaacatgttcagggcttctagaacactaaaaaatttggcttaaaccagtgttcagtctggtgccaaacttcgaatggaatacaaattcacataatctgaactttgttcacaggttatcctaatagagtaattcttcactttgctctattgaactgtcttaaggatttgtttaaacagctaagttacttgattaaaataatgataaaattgtattttgtctttgctttaatattaaagttaacaagttttcattttataatgagatcaaa

SEQ ID NO: 257718 - DNA, 583 bp, Artificial Sequence
  derived and/or modified sequence
gtgtcgcttcccggctgtgcaccctccggggccgccggctctcgggggacgcgctggggatggggccagacgccccggtcgcgcgcccccctccttcgcggagctgcccggttcgccagcccccgcggaaacgcctcggagcgcggtagccatggggaccagggcgaagagctgttgcgcagccattggtacctgtattggggaaacatagcatacaagcaagaagcttacagcctcagtggcgaaaattttttcatgtcagagaccgagaactcttgcagtcgtttatgtcatcccttcttctccagacagaagataccaaaaagttgcaatcaaagatctcttcatcttattgataaagccactaataagccaaaatgtctgtcaatgtcaaccgcagcgtgtcagaccagttctatcgctacaagatgccccgtctgattgccaaggttgagggcaaaggcaatggaatcaagacagttatagtcaacatggttgacgttgcaaaggcgcttaatcggcctccaacgtatcccaccaaatattttggttgtgagctgggagcacagacccagtttgatgt

SEQ ID NO: 257719 - DNA, 678 bp, Artificial Sequence
  derived and/or modified sequence
gtcgcttcccggctgtgcaccctccggggccgccggctctcgggggacgcgctggggatggggccagacgccccggtcgcgcgcccccctccttcgcggagctgcccggttcgccagcccccgcggaaacgcctcggagcgcgagctgttgcgcagccattggtacctgtattggggaaacatagcatacaagcaagaagcttacagcctcagtggcgaaaattttttcatgtcagagaccgagaactcttgcagtcgtttatgtcatcccttcttctccagacagaagataccaaaaagttgcaatcaaagatctcttcatcttattgataaagccactaataagccaaaatgtctgtcaatgtcaaccgcagcgtgtcagaccagttctatcgctacaagatgccccgtctgattgccaaggttgagggcaaaggcaatggaatcaagacagttatagtcaacatggttgacgttgcaaaggcgcttaatcggcctccaacgtatcccaccaaatattttggttgtgagctgggagcacagacccagtttgatgttaagaatgaccgttacattgtcaatggatctcatgaggcgaataagctgcaagacatgttggatggattcattaaaaaatttgttctctgtcctgaatgtgagaatcctgaaacagatttg

SEQ ID NO: 257720 - DNA, 580 bp, Artificial Sequence
  derived and/or modified sequence
gacgctggggccgagggtagcttgagcgcggcggcggcgttgttcagtcagagcgagaacattccagagagctgttgcgcagccattggtacctgtattggggaaacatagcatacaagcaagaagcttacagcctcagtggcgaaaattttttcatgtcagagaccgagaactcttgcagtcgtttatgtcatcccttcttctccagacagaagataccaaaaagttgcaatcaaagatctcttcatcttattgataaagccactaataagccaaaatgtctgtcaatgtcaaccgcagcgtgtcagaccagttctatcgctacaagatgccccgtctgattgccaaggttgagggcaaaggcaatggaatcaagacagttatagtcaacatggttgacgttgcaaaggcgcttaatcggcctccaacgtatcccaccaaatattttggttgtgagctgggagcacagacccagtttgatgttaagaatgaccgttacattgtcaatggatctcatgaggcgaataagctgcaagacatgttggatggattcattaaaaaatttgttctctgtcctgaa

SEQ ID NO: 257721 - DNA, 723 bp, Artificial Sequence
  derived and/or modified sequence
agtcagagcgagaacattccagaggtgagtccggtgaaggggcggccccctgcccggtgcttcccgccccctcgacccctcgggccgctggctggcggggaaggtgcactccccgaccgcccacggctcacggcgccgtctctccgcgccaggtcgcccagctccggcgctgacgggtgtggaccgcggacgtcgctgggacagcccctccccgctgctcggcggcggcacctggcccggccgctcctcgctgcgcttcgcctccgcctcctcggactcggactcgggtttatatcgcgcctcacttcatcccagtcccgggcgagcagcgttgggtttatgtctttatttgacgaaaacgagctgttgcgcagccattggtacctgtattggggaaacatagcatacaagcaagaagcttacagcctcagtggcgaaaattttttcatgtcagagaccgagaactcttgcagtcgtttatgtcatcccttcttctccagacagaagataccaaaaagttgcaatcaaagatctcttcatcttattgataaagccactaataagccaaaatgtctgtcaatgtcaaccgcagcgtgtcagaccagttctatcgctacaagatgccccgtctgattgccaaggttgagggcaaaggcaatggaatcaagacagttatagtcaacatggttgacgttgcaaaggcgcttaatcggcctccaacgt

SEQ ID NO: 257722 - DNA, 569 bp, Artificial Sequence
  derived and/or modified sequence
gctcgggctgactcaggcttcagctgctgcatttagctgttgcgcagccattggtacctgtattggggaaacatagcatacaagcaagaagcttacagcctcagtggcgaaaattttttcatgtcagagaccgagaactcttgcagtcgtttatgtcatcccttcttctccagacagaagataccaaaaagttgcaatcaaagatctcttcatcttattgataaagccactaataagccaaaatgtctgtcaatgtcaaccgcagcgtgtcagaccagttctatcgctacaagatgccccgtctgattgccaaggttgagggcaaaggcaatggaatcaagacagttatagtcaacatggttgacgttgcaaaggcgcttaatcggcctccaacgtatcccaccaaatattttggttgtgagctgggagcacagacccagtttgatgttaagaatgaccgttacattgtcaatggatctcatgaggcgaataagctgcaagacatgttggatggattcattaaaaaatttgttctctgtcctgaatgtgagaatcctgaaacagatttg

SEQ ID NO: 257723 - DNA, 1296 bp, Artificial Sequence
  derived and/or modified sequence
atgtctgtcaatgtgaaccgctccgtctccgaccaattctacagatacaaaatgcccagactaatcgccaaagttgaggggaagggcaatgggataaagactgtaatcgtgaatatggtggatgtggcgaaagccctcaatcgtccaccaacctacccgacaaagtacttcggttgtgagttgggtgctcagactcagttcgatgtgaaaaatgatcgatatattgtaaacgggtctcatgaagcaaataagctgcaggacatgttggacggatttatcaagaaatttgttctatgcccagaatgtgaaaatccagagactgacttgcacgtgaatcctaaaaagcaaaccatcggaaattcatgtaaagcttgtggctaccgtgggatgctcgatacccaccataagctgtgcaccttcatcctgaagaaccccccagagaactcggactccggcaccggcaagaaagaaaaggagaagaaaaatcgaaagggaaaagacaaggaaaacggtagtgtctcaagctctgagacaccccctccccctcctcctcctaacgaaatcaacccaccgcctcacactatggaagaggaagaagacgacgattggggcgaagacaccactgaggaggcccagagacgaaggatggacgagatctcagatcacgccaaagtgctcacactttccgacgacctcgagaggactattgaggaacgggtgaatatcctgttcgatttcgtcaagaaaaagaaggaggaaggtgtcatagacagtagcgacaaggaaattgtcgcagaagccgaaaggctggacgtcaaggccatgggaccccttgttctgaccgaggtgctcttcaacgagaaaattcgtgagcagattaaaaagtatcgacggcactttctacgcttctgccacaacaataaaaaggcacaaagatatctcctgcatggcctggagtgcgtagtggccatgcatcaggcccagctcatcagcaagatcccgcatattctgaaggaaatgtatgatgccgacttattggaagaggaggtgattatttcatggagcgagaaagcctccaaaaaatatgtgagcaaggagctcgctaaggaaattcgagtcaaagctgagcctttcatcaagtggctgaaggaggccgaagaggaaagctctgggggagaggaagaggacgaagatgaaaatatagaagtggtctactctaaggcagcttcagtgccaaaagtggagaccgtcaagtctgataacaaggacgacgacattgatatcgacgccatttag

SEQ ID NO: 257724 - DNA, 603 bp, Artificial Sequence
  derived and/or modified sequence
atgtctgttaacgtgaataggtcagtcagtgatcaattttacaggtataagatgccacggctgatcgccaaggtcgaggggaaggggaacggaatcaagacagtgatagtgaacatggtggacgtggccaaagctctgaaccggccacctacctatccaacaaagtattttggctgcgagttaggagctcaaactcagttcgatgttaagaatgaccgatatatagtcaatggcagccatgaggccaacaagttgcaggacatgttggacggcttcattaagaaattcgtgctctgtcccgagtgtgagaaccccgaaacggaccttcatgtgaatcctaaaaagcagaccatcgggaattcttgcaaggcatgcgggtatagagggatgctggatacccaccacaagctgtgcacatttattctcaaaaacccgccggagaactcagattcaggtaccggtaaaaaggaaaaggagaagaaaaaccggaaaggaaaggacaaggaaaacggtagcgttagtagcagtgagaccccacccccgcctccaccccccaatgaaatcaatccccctccacacacgatggaggaggaggaggactag

SEQ ID NO: 257725 - DNA, 441 bp, Artificial Sequence
  derived and/or modified sequence
atgagcgttaatgttaaccgcagcgtttctgaccagttctatcgatacaagatgcctcgcttaatcgcaaaagtcgaggggaagggcaacggaataaagaccgtaatcgttaacatggtggacgttgcgaaagcactgaatcgccctcccacataccccacaaagtacttcgggtgcgagcttggagcccagactcaattcgatgtaaagaacgataggtacattgtcaacggatcgcacgaagccaacaaacttcaggatatgctcgacggattcatcaagaagttcgtcctttgcccagaatgtgagaatccggagaccgaccttcatgtgaatcccaaaaagcagactatcgggaactcctgcaaagcctgtgggtatagaggcatgcttgatacacaccacaagctttgcacctttatccttaagaatccaccgtag

SEQ ID NO: 257726 - DNA, 1296 bp, Artificial Sequence
  derived and/or modified sequence
atgtccgttaacgtgaacagaagtgtgagcgatcagttttaccgctacaagatgcctagacttattgccaaagtagaaggcaagggaaacggtattaaaaccgtcattgtcaacatggtggatgtggccaaggccctcaaccgccctcccacctacccaacgaagtacttcgggtgcgaattaggagcccagactcaatttgacgtgaaaaacgataggtatatcgtgaatggctcacacgaggccaataagctgcaggacatgctggacggcttcatcaaaaaattcgtgttgtgccctgaatgtgagaacccagagacagatctccacgttaatcctaagaagcagactattggaaactcctgcaaggcttgcgggtacaggggtatgctagacactcatcacaagctctgcactttcattttaaagaatcccccggagaacagtgacagcgggactgggaagaaggagaaggaaaagaagaaccgcaaaggcaaggacaaagagaatggatccgtgtcatcaagtgaaacacctccacctcccccccctccgaatgagattaacccacctccgcacacgatggaggaggaggaggatgatgactggggagaggacaccaccgaagaagcgcagaggagacgtatggacgaaatatcagaccacgcaaaagtcctcacgttgtcagacgacttggagcggaccatcgaggagcgggtgaatattttgttcgactttgtaaagaaaaaaaaggaagaaggcgtaatagattctagcgataaggaaatagtggccgaggcggagcgactagatgtgaaagccatggggccattagtcctaaccgaggtgcttttcaacgaaaagataagagagcaaatcaagaagtacaggaggcacttcctgagattctgccataacaacaagaaggctcagcgctatcttcttcacggattagagtgcgtggtggctatgcatcaagcccagttaatcagcaaaatccctcacatcctcaaggaaatgtatgacgcggacttactggaggaggaagtgattatcagctggtccgagaaagccagcaagaagtacgtttcgaaagagttggcaaaagaaataagggtaaaagctgaaccgtttattaagtggctgaaggaagccgaagaggagagcagcggtggagaagaggaagatgaggacgagaacattgaggttgtgtactccaaggcggcctctgtccctaaagtggagacggtgaagagtgacaacaaggatgatgacatcgacattgatgcaatttag

SEQ ID NO: 257727 - DNA, 210 bp, Artificial Sequence
  derived and/or modified sequence
atgtcagtgaacgtgaacaggagtgtttcggatcaattttatagatacaaaatgcctcggctgatcgccaaggtggaggggaagggcaatggtataaagacagtgattgtgaatatggtggacgtggctaaagcactcaaccggcctccaacatatccaactaaatacttcggatgtgaactgggggcacagactcaattcgacgtttag

SEQ ID NO: 257728 - DNA, 330 bp, Artificial Sequence
  derived and/or modified sequence
atgagcgtgaatgtaaatcgctccgtcagtgaccagttttacaggtataaaatgcccaggttgattgcaaaagttgagggcaagggtaacggcattaaaaccgtgattgtgaacatggtggacgtggcgaaagccctgaaccggcccccaacatatcctactaaatattttggttgtgagctcggcgcgcagacacagttcgacgtgaagaatgaccgatacatcgtgaacggcagccacgaagctaataaactccaggacatgctggacgggttcatcaagaagtttgtcctatgtccagagtgcgagaatccagaaaccgatctctag

SEQ ID NO: 257729 - DNA, 306 bp, Artificial Sequence
  derived and/or modified sequence
atgagcgtgaatgtcaatcggtccgtgtcagaccagttctatagatataagatgcccaggttaattgccaaagtcgaagggaagggaaatggaattaagactgtaatcgtcaatatggtcgacgtcgccaaggcacttaacaggcctccaacgtatcctacaaaatactttggctgcgagctgggagcccaaacccaatttgacgtcaaaaacgaccggtatatcgtgaacggcagccacgaggcaaacaaactgcaggacatgctggacggctttatcaaaaaattcgtgctgtgccctgaatag

SEQ ID NO: 257730 - DNA, 156 bp, Artificial Sequence
  derived and/or modified sequence
atgagcgtgaacgtcaaccgaagcgtcagcgaccagttctaccgatataaaatgcctaggctcatcgctaaagtcgagggaaagggtaacgggataaaaactgtgatcgtgaacatggtggacgtggccaaggcccttaaccgcccaccaacatag

SEQ ID NO: 257731 - DNA, 330 bp, Artificial Sequence
  derived and/or modified sequence
atgtctgtgaacgtcaataggagcgtcagtgaccagttctatagatacaaaatgcccaggttgattgctaaggtggagggcaaagggaatgggatcaagaccgtcattgtcaacatggtcgatgtggcgaaggccctcaaccgacctcctacctatcccacaaagtacttcggttgcgagttgggcgcacagacgcagttcgacgtgaagaacgatagatacatcgtcaacggtagtcacgaagcgaataagttgcaggacatgcttgacgggttcattaaaaaattcgtcctttgccccgaatgtgagaatcccgagaccgatctgtag

SEQ ID NO: 257732 - DNA, 603 bp, Artificial Sequence
  derived and/or modified sequence
atgtctgtgaatgtgaacagatctgtgtctgaccagttctaccgctacaagatgcccaggctcatcgccaaggtggagggcaaaggaaatggcatcaagacagtcatcgtgaacatggtggatgtggccaaggccctgaacagaccacccacctaccccaccaagtacttcggctgtgagctgggcgcccagacccagtttgatgtgaagaatgaccgctacatcgtgaatggcagccatgaggccaacaagctgcaggacatgctggatggcttcatcaagaagtttgtgctgtgcccagaatgtgaaaatcctgagacagacctgcacgtgaaccccaagaagcagaccatcggcaacagctgcaaggcctgtggctaccggggcatgctggacacccaccacaagctgtgcaccttcatcctgaagaaccccccagaaaattctgattctggaacaggcaagaaggagaaggagaagaagaacaggaagggcaaggacaaggaaaatggatctgtgagcagcagcgagaccccacctcctcctcctcctccaaatgagatcaaccccccaccccacaccatggaggaggaggaggactag

SEQ ID NO: 257733 - DNA, 441 bp, Artificial Sequence
  derived and/or modified sequence
atgtctgtgaatgtgaacagatctgtgtctgaccagttctaccgctacaagatgcccaggctcatcgccaaggtggagggcaaaggaaatggcatcaagacagtcatcgtgaacatggtggatgtggccaaggccctgaacagaccacccacctaccccaccaagtacttcggctgtgagctgggcgcccagacccagtttgatgtgaagaatgaccgctacatcgtgaatggcagccatgaggccaacaagctgcaggacatgctggatggcttcatcaagaagtttgtgctgtgcccagaatgtgaaaatcctgagacagacctgcacgtgaaccccaagaagcagaccatcggcaacagctgcaaggcctgtggctaccggggcatgctggacacccaccacaagctgtgcaccttcatcctgaagaaccccccatag

SEQ ID NO: 257734 - DNA, 210 bp, Artificial Sequence
  derived and/or modified sequence
atgtctgtgaatgtgaacagatctgtgtctgaccagttctaccgctacaagatgcccaggctcatcgccaaggtggagggcaaaggaaatggcatcaagacagtcatcgtgaacatggtggatgtggccaaggccctgaacagaccacccacctaccccaccaagtacttcggctgtgagctgggcgcccagacccagtttgatgtgtag

SEQ ID NO: 257735 - DNA, 330 bp, Artificial Sequence
  derived and/or modified sequence
atgtctgtgaatgtgaacagatctgtgtctgaccagttctaccgctacaagatgcccaggctcatcgccaaggtggagggcaaaggaaatggcatcaagacagtcatcgtgaacatggtggatgtggccaaggccctgaacagaccacccacctaccccaccaagtacttcggctgtgagctgggcgcccagacccagtttgatgtgaagaatgaccgctacatcgtgaatggcagccatgaggccaacaagctgcaggacatgctggatggcttcatcaagaagtttgtgctgtgcccagaatgtgaaaatcctgagacagacctgtag

SEQ ID NO: 257736 - DNA, 306 bp, Artificial Sequence
  derived and/or modified sequence
atgtctgtgaatgtgaacagatctgtgtctgaccagttctaccgctacaagatgcccaggctcatcgccaaggtggagggcaaaggaaatggcatcaagacagtcatcgtgaacatggtggatgtggccaaggccctgaacagaccacccacctaccccaccaagtacttcggctgtgagctgggcgcccagacccagtttgatgtgaagaatgaccgctacatcgtgaatggcagccatgaggccaacaagctgcaggacatgctggatggcttcatcaagaagtttgtgctgtgcccagagtag

SEQ ID NO: 257737 - DNA, 156 bp, Artificial Sequence
  derived and/or modified sequence
atgtctgtgaatgtgaacagatctgtgtctgaccagttctaccgctacaagatgcccaggctcatcgccaaggtggagggcaaaggaaatggcatcaagacagtcatcgtgaacatggtggatgtggccaaggccctgaacagaccacccacctag

SEQ ID NO: 257738 - DNA, 1296 bp, Artificial Sequence
  derived and/or modified sequence
atgagcgtgaacgtgaaccggagcgtgagcgaccagttctaccggtacaaaatgccacgattaatcgcgaaagtcgagggtaagggtaacgggattaagaccgtcattgtaaatatggtagatgttgccaaggcgcttaacagacccccaacataccccaccaaatattttggctgtgaacttggagcacagacccagtttgatgtcaagaacgaccggtacatcgtcaatggatcccatgaggccaacaagctgcaagacatgctcgatggattcattaaaaagttcgtgctttgtccagagtgtgaaaatcctgaaacagatctgcacgtcaatcccaaaaagcaaacgataggcaattcctgcaaagcctgcgggtatcgagggatgctagatacacaccacaaattgtgcacgtttatattgaaaaatccgcccgagaattccgattctggcacaggtaagaaagagaaggagaagaagaatagaaagggaaaagataaagagaacggatctgtctcctcctctgagacaccccctccccctcctccacccaatgaaatcaaccctccgccacacacaatggaagaagaggaagacgacgactggggggaggacaccacagaagaggctcagcggcgaaggatggacgagattagcgatcacgcgaaagttttgactttatcagacgacctcgagcggactattgaagaacgggtgaatatcctgtttgatttcgtgaagaaaaagaaggaggaaggagttatcgattcctctgataaggagatcgtcgctgaagcagagaggttggacgtgaaggccatgggacctttagtgctcactgaggttctgtttaacgaaaaaattcgggagcaaatcaagaaataccgcaggcatttcttgcggttctgccacaataacaagaaagcgcaaagatatctcctccacggactggagtgcgtcgtcgccatgcatcaagcccagctgatctcaaaaatcccgcacatccttaaagagatgtacgatgctgatctgttggaagaggaggtgattataagctggtccgagaaagcgagtaagaagtacgtttcgaaagagttagcaaaggagatccgtgtcaaggcagaaccgtttataaagtggctcaaggaggcagaagaagaatcaagtggcggggaggaggaagatgaggatgagaacatcgaagtggtatatagtaaagcggcctcagttcctaaggtggagactgtaaagagcgacaacaaagacgatgatatcgacattgacgctatctag

SEQ ID NO: 257739 - DNA, 603 bp, Artificial Sequence
  derived and/or modified sequence
atgagcgtgaacgtgaaccggagcgtgagcgaccagttctaccggtacaagatgccgcgcctgatcgcaaaagtggaaggcaagggcaacggcattaaaacagttatcgtgaacatggttgatgtcgctaaggctcttaatcggccacccacttatcccacaaagtacttcggctgcgagctaggcgcccaaacccaattcgatgtaaagaacgacaggtacatcgtcaacggctcacacgaagcaaacaagttacaagacatgctcgatggattcataaaaaagttcgtattatgccccgagtgtgagaaccccgagacggacttgcacgtgaatcccaagaagcaaactattggcaattcctgtaaggcatgcggatatcgagggatgttagatactcaccacaagctgtgtacatttatactcaagaatcccccagaaaacagtgactccgggaccggcaaaaaggagaaagagaagaagaataggaagggtaaagacaaagaaaacggcagtgtgagcagctccgagaccccccctcctccacctcctcccaatgagatcaaccccccgccccacaccatggaagaagaggaggattag

SEQ ID NO: 257740 - DNA, 441 bp, Artificial Sequence
  derived and/or modified sequence
atgagcgtgaacgtgaaccggagcgtgagcgaccagttctaccggtataaaatgcctagactcatcgctaaagtagaaggtaagggcaatggcattaagacagtgattgtgaatatggtggacgtcgctaaagccttaaaccggcctcctacctaccccactaagtacttcgggtgtgagctgggagcccagactcaattcgatgtcaagaacgaccgctacatcgtgaatggctcccacgaagctaataaactccaggacatgctcgatggcttcatcaagaaatttgtcttatgtcctgaatgcgagaaccctgagaccgatttacatgtaaaccccaaaaagcagacgattggtaactcatgtaaagcttgcggctacagaggcatgctggacactcatcacaagctatgtacctttatcctgaagaatcccccttag

SEQ ID NO: 257741 - DNA, 1296 bp, Artificial Sequence
  derived and/or modified sequence
atgagcgtgaacgtgaaccggagcgtgagcgaccagttctaccggtataagatgccaaggttgatagcgaaggtggagggcaagggtaatggaatcaagactgtgattgtgaatatggtcgacgtcgccaaagccctcaatcgcccacccacataccccacaaagtattttggctgtgagttaggcgcccagacgcaatttgacgtcaaaaacgacaggtatattgtaaacgggtctcacgaagccaataaactgcaggatatgctggatgggttcatcaagaaattcgtcctctgcccggagtgtgagaacccagagacagacctccacgtgaaccctaagaagcagacaatcggaaactcctgcaaggcttgtgggtaccgcggaatgctggacacgcaccacaagctatgcacatttattctcaaaaacccccccgagaacagcgactcgggtacaggtaagaaggaaaaggagaagaaaaacagaaaaggaaaagacaaggagaacggtagcgtcagtagttcggagactcctcctccaccacccccccccaatgagatcaacccaccacctcacaccatggaggaggaagaggacgatgattggggcgaagacacgacggaggaggcccagcgccggcggatggatgaaatcagcgatcacgcgaaggtgttgaccctgagtgacgatctggagaggactattgaggaacgtgtaaacatcctgttcgatttcgttaagaaaaaaaaggaagagggggtgatcgactcatctgataaggaaatcgtggctgaggccgagcgtctggatgtaaaggcaatggggcctctggtattgacagaggtgcttttcaatgagaagatccgggagcagataaagaagtacagacgacactttctgcggttttgtcataacaataagaaggctcagcgctatctgctccacgggctcgagtgcgttgtggccatgcaccaggctcaattgatttctaaaattccacatattctaaaggagatgtacgatgcagacctgcttgaagaggaggtcatcatctcttggtccgagaaggcgtccaagaaatatgtgtctaaagaattagctaaggaaattcgtgtgaaagcggaaccatttattaagtggctaaaagaggccgaggaagaaagttccgggggagaagaggaagacgaggacgagaatatcgaggtggtttactcaaaagcagcaagtgtgcccaaggtggagactgtcaagtctgacaataaggatgacgatatcgatatcgatgcaatttag

SEQ ID NO: 257742 - DNA, 210 bp, Artificial Sequence
  derived and/or modified sequence
atgagcgtgaacgtgaaccggagcgtgagcgaccagttctaccggtataaaatgccccgtctcatcgccaaagttgagggcaagggaaatggcatcaaaacagtgattgtgaacatggtagacgtagccaaagccctgaatcgcccacctacgtacccaacaaaatattttggttgtgaactcggagcacagacccagttcgatgtctag

SEQ ID NO: 257743 - DNA, 330 bp, Artificial Sequence
  derived and/or modified sequence
atgagcgtgaacgtgaaccggagcgtgagcgaccagttctaccggtacaagatgcccagactgatcgcaaaggtggagggaaagggtaatggtataaagactgtgatcgtgaatatggtcgacgtcgccaaagccctgaatagacctccgacctacccgaccaagtacttcggctgcgagcttggagcacagactcagtttgatgtaaaaaatgaccgctatatagttaatggttcccatgaagccaacaagttgcaggacatgcttgatggcttcatcaaaaagttcgtcctttgccctgagtgtgaaaaccccgaaactgatctatag

SEQ ID NO: 257744 - DNA, 306 bp, Artificial Sequence
  derived and/or modified sequence
atgagcgtgaacgtgaaccggagcgtgagcgaccagttctaccggtataagatgcccaggctgatcgcgaaagtggagggtaaaggaaatggaatcaagaccgtcatcgtcaacatggtggacgttgccaaagccctaaatcggcctccgacgtaccctaccaagtacttcgggtgtgaactgggagcccagacacagtttgacgtcaaaaacgatagatatatagtcaacggctcccacgaggctaacaagctgcaagacatgctggacggtttcatcaaaaagtttgtgctatgtcccgagtag

SEQ ID NO: 257745 - DNA, 156 bp, Artificial Sequence
  derived and/or modified sequence
atgagcgtgaacgtgaaccggagcgtgagcgaccagttctaccggtacaaaatgccgagattgatagctaaggttgaggggaaagggaatggcatcaagacagtgatagtgaacatggtggatgttgcaaaggctctgaacagaccccccacctag

SEQ ID NO: 257746 - DNA, 330 bp, Artificial Sequence
  derived and/or modified sequence
atgagcgtgaacgtgaaccggagcgtgagcgaccagttctaccggtataagatgccacggctgattgctaaggtggagggaaaggggaacggaattaaaactgtcatcgtcaacatggttgacgtggctaaggcacttaacaggccgccaacctacccaaccaaatattttggttgcgaattgggtgcccagactcagttcgacgtcaagaacgacaggtatattgtgaatggatcgcacgaggccaacaaattgcaagacatgctagacgggttcattaaaaaattcgtgctgtgtcccgaatgcgaaaacccggaaacggacttatag

SEQ ID NO: 257747 - DNA, 1296 bp, Artificial Sequence
  derived and/or modified sequence
atgtctgtgaatgtaaatagatctgtaagcgatcagttctaccgttacaaaatgccaagactgatcgccaaagtggagggtaagggcaatgggattaagacggtgattgtgaacatggtagacgtcgcgaaagcccttaaccgacctcctacctatcctactaaatacttcggttgcgagctgggtgcccagacacaatttgacgtcaaaaacgatcgctatatcgtgaacggctcccatgaagctaacaaattgcaggacatgctggacggttttataaagaagttcgtgctgtgccctgaatgcgagaacccagaaaccgatttgcacgttaatccaaaaaaacagaccataggaaactcctgcaaggcctgtggttatagagggatgttagatacccaccacaaattgtgcacattcattctgaagaaccccccagaaaatagcgattctggcaccgggaagaaggaaaaagaaaaaaagaaccgaaaaggtaaagacaaagagaatggatccgtgtcatcctccgagacccctccgcctccccctccccctaatgaaataaaccccccaccacacacaatggaagaggaagaggatgatgactggggggaagacacgactgaggaagcccaaagacgacgaatggacgagatctcggatcacgccaaggtgttgaccttgagcgacgacctggagaggacgattgaggagagggtcaacattctgtttgactttgttaagaagaagaaggaagagggcgtcatcgattcttcggataaggaaatcgtggcagaagctgagcgccttgacgtcaaggccatgggccctcttgtgctaacggaggtgctgtttaacgagaaaattcgcgagcagattaaaaaatacagaaggcactttctgcgattctgtcacaacaataagaaagctcagagatacttactccacgggttagaatgtgtggttgctatgcatcaagctcagctgatttccaagatcccccacatactgaaagagatgtatgatgccgatttactggaagaagaggtgattatctcttggtcagagaaggcttcaaagaagtacgtcagcaaagaactggcaaaagagattagggtgaaagccgaaccgtttatcaagtggctaaaggaggccgaggaggaatccagcgggggagaggaggaagacgaggatgagaacattgaggtggtgtatagcaaggccgcttctgtcccgaaggtcgaaacagtgaaatccgacaacaaagacgatgacattgacatagatgctatctag

SEQ ID NO: 257748 - DNA, 603 bp, Artificial Sequence
  derived and/or modified sequence
atgagcgtcaacgtgaaccggagcgtgtctgatcagttttacaggtacaaaatgcctcgcctgattgcaaaggtcgagggtaaagggaatgggattaaaaccgttattgtaaacatggttgatgtggctaaagctctcaaccggcctcctacttatcctactaaatacttcggatgtgaactcggtgcccagacccaatttgatgtcaagaacgaccgatacatcgtgaatgggagccacgaggctaataaactgcaggatatgttggacggttttatcaagaagttcgtgctttgccctgagtgtgaaaaccccgaaacggatctgcacgttaaccccaagaagcagactatcgggaacagctgtaaggcatgtgggtaccgagggatgcttgatactcaccataagctgtgtacctttatccttaaaaatccccctgagaacagcgactccgggacgggcaaaaaagaaaaggagaaaaagaatcggaagggcaaagataaggaaaatgggtccgtctcttcctcagagaccccaccacctcccccacctccaaacgagattaacccacccccacatacgatggaggaagaggaggattag

SEQ ID NO: 257749 - DNA, 441 bp, Artificial Sequence
  derived and/or modified sequence
atgtcagtcaatgtgaacagaagcgtctctgatcaattctacagatacaaaatgcctcgccttattgctaaggtcgagggtaagggaaacggaattaaaaccgtcatcgttaatatggtagacgtggcaaaggcccttaatcggcctccaacgtatcccacaaaatacttcggatgcgagctcggcgcacagacacaatttgacgtgaagaatgaccgttacatcgtcaatggctcacacgaggcaaataaactgcaagacatgttagatggattcattaaaaaattcgtcctttgtcccgaatgcgagaatcctgaaaccgacctgcacgttaaccccaagaaacaaactatcggtaacagctgtaaggcatgtggctatcggggaatgttagacacgcaccacaagctgtgcacttttatcctcaagaatcccccatag

SEQ ID NO: 257750 - DNA, 1296 bp, Artificial Sequence
  derived and/or modified sequence
atgagtgtgaatgttaatcgctctgtctcggaccagttctatcgttacaagatgccacggctgattgctaaggttgagggaaagggaaatgggatcaaaaccgtaatcgtcaatatggtagacgttgccaaagccctcaacagaccgcctacgtatccaacaaagtactttggctgtgagctcggcgctcagacgcaatttgatgtgaagaacgatcgatacatcgtgaacgggtcccacgaggccaacaagctccaggatatgttagatggcttcatcaagaagtttgttttgtgtcccgaatgtgagaacccagaaaccgacctgcatgtgaatcccaagaagcagacaattggaaactcgtgtaaagcttgtggctaccgaggcatgctcgacactcaccataagctctgtacatttatcttgaagaacccccctgaaaatagcgattcaggaacagggaaaaaagagaaggaaaaaaagaacaggaagggcaaggataaggaaaatggaagcgtgtcaagtagtgagacacctcctccccctcccccacccaatgagatcaatcctcccccacacacaatggaagaagaagaagatgacgactggggcgaagataccactgaggaggcacagagaaggcgcatggacgagatttcagaccacgctaaagtcttgacactttctgacgatctggaaaggactattgaagaacgagtcaatattctgtttgacttcgttaagaagaagaaggaagaaggcgtcatagactctagtgataaagagatcgtcgcagaggctgaacggctggatgtgaaggctatgggacctctagtgctgacggaggtcctgtttaacgagaagatacgcgagcagataaagaagtatagacgccatttcctccgtttctgccacaacaacaaaaaagcacagaggtatctcttgcatggtcttgagtgcgtggttgccatgcaccaggctcagctgatttccaagatccctcatattttaaaagaaatgtatgacgccgacctgctcgaagaagaagttatcatctcctggagtgaaaaagccagtaaaaaatatgtatccaaagaacttgcaaaggagattcgagtgaaggcagaaccctttatcaagtggctgaaagaagccgaggaggaatcctcaggtggtgaggaggaagatgaggacgagaatatcgaggtcgtgtacagtaaagccgcaagcgtgcctaaggtcgaaacggtcaagtccgataataaagatgacgacatcgacattgatgccatctag

SEQ ID NO: 257751 - DNA, 210 bp, Artificial Sequence
  derived and/or modified sequence
atgtccgtcaacgtgaaccggagcgtgtcagaccagttttacagatacaagatgccacgcctcattgccaaagttgaggggaagggcaacggaataaagacagtaatcgtcaatatggtggacgtagccaaggcactgaaccgcccacctacataccccacaaagtactttggatgcgagcttggtgcccaaacacaattcgacgtgtag

SEQ ID NO: 257752 - DNA, 330 bp, Artificial Sequence
  derived and/or modified sequence
atgtccgtgaacgttaaccgctcggtgtctgaccagttttatcggtacaaaatgccacgactgattgcaaaagtggagggaaagggcaacggaataaagaccgtgatagtcaatatggtggacgtggccaaagcccttaaccgacctcccacgtatcctactaaatattttgggtgtgaacttggagcacagacccagttcgacgttaagaacgaccggtacattgtgaacggaagccacgaagcaaataagctgcaggacatgttggatggcttcataaagaaatttgtgctctgccctgaatgtgaaaaccccgagaccgacctgtag

SEQ ID NO: 257753 - DNA, 306 bp, Artificial Sequence
  derived and/or modified sequence
atgtcagttaacgtgaacagatccgtttctgatcaattttataggtacaagatgcctcgcctcatcgccaaagtggaaggaaagggtaacgggatcaaaaccgtgatcgtgaatatggtggacgtcgccaaagcccttaatcgtcctcccacctatccgaccaaatatttcgggtgtgaactgggagctcaaactcagtttgatgtgaagaacgatcgttacatcgtgaacggcagccacgaggcaaacaagctacaggatatgctggacggattcataaagaaattcgtgctctgccccgagtag

SEQ ID NO: 257754 - DNA, 156 bp, Artificial Sequence
  derived and/or modified sequence
atgtccgttaacgtgaaccggagcgtctccgatcagttctacaggtacaaaatgcctagactaattgcaaaagtcgagggaaagggcaatggcatcaaaacagttatcgttaatatggttgacgtggcaaaagccctgaataggccccctacctag

SEQ ID NO: 257755 - DNA, 330 bp, Artificial Sequence
  derived and/or modified sequence
atgtccgtgaatgtgaatcgtagcgtgtcggatcagttctatagatacaagatgcctcggctgattgcaaaagtggagggaaaggggaacggcattaaaacggtgatcgtgaacatggtagatgtagccaaagcactgaacagaccacccacctacccaacgaaatacttcggatgtgaactgggagctcagactcagttcgatgtgaaaaatgatagatacatagtcaatggatcgcatgaggccaataagctgcaagatatgctggacggcttcataaaaaaatttgtgctctgcccagagtgtgagaatcctgaaaccgatctgtag

SEQ ID NO: 257756 - DNA, 603 bp, Artificial Sequence
  derived and/or modified sequence
atgagcgtgaacgtgaacagaagcgtgagcgaccagttctacagatacaagatgcccagactgatcgccaaggtggagggcaagggcaacggcatcaagaccgtgatcgtgaacatggtggacgtggccaaggccctgaacagaccccccacctaccccaccaagtacttcggctgcgagctgggcgcccagacccagttcgacgtgaagaacgacagatacatcgtgaacggcagccacgaggccaacaagctgcaggacatgctggacggcttcatcaagaagttcgtgctgtgccccgagtgcgagaaccccgagaccgacctgcacgtgaaccccaagaagcagaccatcggcaacagctgcaaggcctgcggctacagaggcatgctggacacccaccacaagctgtgcaccttcatcctgaagaacccccccgagaacagcgacagcggcaccggcaagaaggagaaggagaagaagaacagaaagggcaaggacaaggagaacggcagcgtgagcagcagcgagacccccccccccccccccccccccaacgagatcaacccccccccccacaccatggaggaggaggaggactag

SEQ ID NO: 257757 - DNA, 441 bp, Artificial Sequence
  derived and/or modified sequence
atgagcgtgaacgtgaacagaagcgtgagcgaccagttctacagatacaagatgcccagactgatcgccaaggtggagggcaagggcaacggcatcaagaccgtgatcgtgaacatggtggacgtggccaaggccctgaacagaccccccacctaccccaccaagtacttcggctgcgagctgggcgcccagacccagttcgacgtgaagaacgacagatacatcgtgaacggcagccacgaggccaacaagctgcaggacatgctggacggcttcatcaagaagttcgtgctgtgccccgagtgcgagaaccccgagaccgacctgcacgtgaaccccaagaagcagaccatcggcaacagctgcaaggcctgcggctacagaggcatgctggacacccaccacaagctgtgcaccttcatcctgaagaaccccccctag

SEQ ID NO: 257758 - DNA, 210 bp, Artificial Sequence
  derived and/or modified sequence
atgagcgtgaacgtgaacagaagcgtgagcgaccagttctacagatacaagatgcccagactgatcgccaaggtggagggcaagggcaacggcatcaagaccgtgatcgtgaacatggtggacgtggccaaggccctgaacagaccccccacctaccccaccaagtacttcggctgcgagctgggcgcccagacccagttcgacgtgtag

SEQ ID NO: 257759 - DNA, 330 bp, Artificial Sequence
  derived and/or modified sequence
atgagcgtgaacgtgaacagaagcgtgagcgaccagttctacagatacaagatgcccagactgatcgccaaggtggagggcaagggcaacggcatcaagaccgtgatcgtgaacatggtggacgtggccaaggccctgaacagaccccccacctaccccaccaagtacttcggctgcgagctgggcgcccagacccagttcgacgtgaagaacgacagatacatcgtgaacggcagccacgaggccaacaagctgcaggacatgctggacggcttcatcaagaagttcgtgctgtgccccgagtgcgagaaccccgagaccgacctgtag

SEQ ID NO: 257760 - DNA, 306 bp, Artificial Sequence
  derived and/or modified sequence
atgagcgtgaacgtgaacagaagcgtgagcgaccagttctacagatacaagatgcccagactgatcgccaaggtggagggcaagggcaacggcatcaagaccgtgatcgtgaacatggtggacgtggccaaggccctgaacagaccccccacctaccccaccaagtacttcggctgcgagctgggcgcccagacccagttcgacgtgaagaacgacagatacatcgtgaacggcagccacgaggccaacaagctgcaggacatgctggacggcttcatcaagaagttcgtgctgtgccccgagtag

SEQ ID NO: 257761 - DNA, 156 bp, Artificial Sequence
  derived and/or modified sequence
atgagcgtgaacgtgaacagaagcgtgagcgaccagttctacagatacaagatgcccagactgatcgccaaggtggagggcaagggcaacggcatcaagaccgtgatcgtgaacatggtggacgtggccaaggccctgaacagaccccccacctag

SEQ ID NO: 257762 - protein, 248 aa, Artificial Sequence
  derived and/or modified sequence
MSKCARKKYIKTNPRQMTMETVESQHDGSITASLTESKSAHVQTQTGQNSIPALAQVAAIAETDESAESEGVIDSHKRREILSRRPSYRKILNELSSDVPGVPKIEEERSEEEGTPPSIATMAVPTSIYQTSTGQYNEETELAPSHMAAATGDMPTYQIRAPTAALPQGVVMAASPGSLHSPQQLAEEATRKRELRLMKNREAARECRRKKKEYVKCLENRVAVLENQNKTLIEELKALKDLYCHKVE

SEQ ID NO: 257763 - protein, 194 aa, Artificial Sequence
  derived and/or modified sequence
MVAAIAETDESAESEGVIDSHKRREILSRRPSYRKILNELSSDVPGVPKIEEERSEEEGTPPSIATMAVPTSIYQTSTGQYNEETELAPSHMAAATGDMPTYQIRAPTAALPQGVVMAASPGSLHSPQQLAEEATRKRELRLMKNREAAKECRRRKKEYVKCLESRVAVLEVQNKKLIEELETLKDICSPKTDY

SEQ ID NO: 257764 - DNA, 747 bp, Artificial Sequence
  derived and/or modified sequence
atgagcaaatgtgctcggaaaaagtatatcaagaccaatcccagacagatgaccatggaaacagtcgagagccagcatgacggttcaattacagccagcctgaccgagtccaagtctgcccacgtccagacgcagactggtcagaattccataccggccttagcccaggtggctgccatagctgagacagatgagtccgccgagtcggaaggcgttattgactctcataaaaggcgcgagatcctctcccgcaggccgagctaccggaagatcttaaacgaactctcttctgatgtacccggcgtacccaaaatcgaggaagaacgtagtgaggaagaagggaccccgccctccatagctacgatggcagtccctacttccatctatcagaccagtactggccagtacaatgaagaaactgagctagctccttcccatatggcggccgcgaccggagatatgccaacttaccagattcgcgctccgacagccgcattgcctcagggggtggtgatggctgcctctccggggtccttgcactcaccccaacagctggccgaggaagctactagaaagagggaattgagacttatgaagaacagggaagctgcacgagaatgccgacggaagaagaaggaatacgtgaagtgcctggagaacagagtcgccgtccttgagaaccaaaacaaaacgctgatcgaagaactgaaggcactgaaagacctctattgccacaaagtggaatag

SEQ ID NO: 257765 - DNA, 585 bp, Artificial Sequence
  derived and/or modified sequence
atggtggcagccatcgctgagaccgacgagagtgccgagtctgaaggtgtcattgattcacacaaacggcgggagatcctctctcgccgcccctcatatcgcaagatattaaatgaactgagctccgatgtgcctggagttccaaagattgaggaggagagaagcgaagaggaaggcactccgccctctatagccactatggccgtccctacatccatttatcagacctctacgggccagtacaatgaggaaacagaactcgccccttcccatatggcagctgccacaggagatatgccgacctatcagatccgggcccccaccgctgccctcccacaaggggtggtaatggcagcatccccaggaagtctgcattctcctcagcagctggctgaggaagccaccagaaaacgagaactgcgtttaatgaaaaaccgggaagccgcaaaagagtgtcgacgacgaaagaaagaatacgtgaaatgtctggagtcacgagtagccgttctggaggtccagaataaaaagttaatagaagagttagagactctgaaagatatctgctccccaaagacagactattag

SEQ ID NO: 257766 - DNA, 747 bp, Artificial Sequence
  derived and/or modified sequence
atgagcaaatgtgccaggaagaagtacatcaagaccaacccccggcagatgaccatggagaccgtggagagccagcatgatggcagcatcacagccagcctgacagagagcaagagcgcccacgtgcagacccagacaggccagaacagcatcccagccctggcccaggtggccgccatcgccgagacagatgagagcgctgagagcgagggcgtgattgacagccacaagaggcgggagatcctgagccggcggcccagctacaggaagatcctgaatgagctgagcagtgatgtgcctggggtgcccaagattgaggaggagaggtctgaggaggagggcaccccacccagcatcgccaccatggctgtgcccaccagcatctaccagaccagcacaggccagtacaatgaggagacagagctggcccccagccacatggctgctgccactggagacatgcccacctaccagatccgggcccccacagctgccctgccccagggcgtggtgatggccgccagccctggcagcctgcacagcccccagcagctggccgaggaggccaccaggaagcgggagctgcggctgatgaagaaccgggaggccgcccgggagtgcaggaggaagaagaaggagtatgtgaagtgcctggagaacagagtggccgtgctggagaaccagaacaagaccctgattgaggagctgaaggccctgaaggacctgtactgccacaaggtggagtag

SEQ ID NO: 257767 - DNA, 585 bp, Artificial Sequence
  derived and/or modified sequence
atggtggccgccatcgccgagacagatgaatctgctgagagcgagggcgtcatcgacagccacaagagaagagagatcctgagcagaagacccagctacaggaagatcctgaatgagctgagcagtgatgtgcctggggtgcccaagattgaggaggagaggtctgaggaggagggcaccccacccagcatcgccaccatggctgtgcccaccagcatctaccagaccagcacaggccagtacaatgaggagacagagctggcccccagccacatggccgccgccaccggggacatgcccacctaccagatccgggcccccacagctgccctgccccagggcgtggtgatggccgccagccctggcagcctgcacagcccccagcagctggccgaggaggccaccaggaagcgggagctgcggctgatgaagaaccgggaggccgccaaggaatgtagaagaaggaagaaggagtatgtgaagtgcctggagagccgggtggccgtgctggaggtgcagaacaagaagctgattgaggagctggagaccctgaaggacatctgcagccccaagacagactactag

SEQ ID NO: 257768 - DNA, 747 bp, Artificial Sequence
  derived and/or modified sequence
atgagcaagtgcgcccggaagaagtacatcaagaccaacccccggcagatgacaatggagactgtggagtctcagcacgacggatccatcactgcttctttaaccgaatccaaatcagctcacgtgcagacccaaaccggtcaaaattcaattcccgccctggcccaagtggcagctatcgctgagactgacgagtccgccgaaagcgagggcgtgatcgacagtcacaagcggcgcgagattctcagccggagaccgagttatcggaaaatccttaacgagctgtcatctgatgtaccgggagttcctaaaatcgaggaggagcgcagtgaagaagaaggcactccacctagcatcgctaccatggccgtgccaaccagcatttatcagaccagtaccgggcagtacaacgaagagaccgagctcgcccccagccacatggctgcagcgacaggagatatgccaacctatcaaattcgagcgccgaccgccgccctgccacagggggtggttatggctgccagcccaggaagcctacacagcccacagcaactggcagaggaggcaacaagaaagagggagctcagactgatgaaaaaccgcgaggccgctcgggaatgcaggcgcaagaaaaaagagtacgttaaatgcttggagaacagggtggccgtgcttgaaaatcaaaataaaaccctaatcgaggaactcaaagcccttaaggatttgtactgtcataaggttgagtag

SEQ ID NO: 257769 - DNA, 585 bp, Artificial Sequence
  derived and/or modified sequence
atggtggccgccatcgccgagaccgacgagagcgccgagagcgagggagttatcgactcccacaagcgacgggaaattctgtcccgtcgacccagttacaggaaaatactgaacgaactgtcatctgatgtgcctggcgttcccaagatcgaagaggagcgcagtgaagaggaaggcaccccgccatctattgctaccatggccgtgccgacctctatatatcagacaagcactggccagtacaacgaagagacggagttggcgccaagtcatatggctgctgccaccggggacatgccgacttatcagataagggccccaaccgccgcattaccccagggggtggtaatggctgcgtctccaggctcacttcacagtcctcaacagctggccgaagaagcaacgcggaagagagaactgcgactgatgaaaaaccgggaagccgcgaaagaatgtagaaggagaaaaaaggaatatgttaaatgcctggaatctcgagtagctgtgctggaggtccagaataagaagttaattgaagagcttgaaaccttgaaggatatttgttccccgaaaaccgattactag

SEQ ID NO: 257770 - DNA, 747 bp, Artificial Sequence
  derived and/or modified sequence
atgagtaagtgtgcccgtaaaaagtatattaagactaacccccgacagatgactatggagacagttgagagccagcacgatggtagtattaccgcatcactcaccgagtccaagtcagcacatgttcagacgcaaaccgggcagaatagtatccccgctctagcgcaggtggccgctattgccgaaactgacgagtctgccgagtctgaaggggtgatcgactcccataagcgcagagagatactttcacgcagacccagttacagaaagatcctcaatgagttgtcttccgatgttccaggtgtgcctaaaatcgaggaggagaggagcgaggaggagggaactccgccatctattgcgaccatggcagtgcctacctctatttaccagacttctaccgggcaatacaacgaagaaaccgaactggcccctagccatatggccgctgctacaggagacatgccgacttaccagatccgcgcacccacagctgctctcccccagggagtcgtaatggctgcgtctcctggatccctgcattccccgcagcagttggctgaggaggccacaagaaagagagagttacgtctgatgaagaatagggaggccgcaagagagtgtcgtagaaagaagaaggagtacgtgaagtgtctggaaaatagggtggctgtgctggagaatcaaaataagacacttatcgaagagctcaaagcacttaaagacctttactgccacaaagtcgagtag

SEQ ID NO: 257771 - DNA, 585 bp, Artificial Sequence
  derived and/or modified sequence
atggtggctgctattgccgaaacagacgaatccgctgaatccgagggagtcatcgacagccacaaacgaagggaaatcctgagccgccgaccaagctatagaaaaatcctgaatgaactgagctcagacgtgccgggagtgcctaagatcgaggaagagcgctcggaagaagagggcacacctccttccatcgccaccatggctgttcccactagtatttaccaaactagcactggtcaatacaacgaagaaaccgagctcgccccaagtcacatggcggctgctacaggagatatgcccacctaccagatcagggcaccaacagccgctctcccccagggagttgtaatggctgccagcccgggtagtctccactcaccccagcagctcgccgaggaggccacaagaaagcgcgagctgagacttatgaagaatcgggaagctgctaaggagtgcagacgtaggaagaaggagtacgtgaaatgtttggagtcacgcgttgctgtactggaggttcagaataagaaattaattgaagagttggagacacttaaggatatttgttcccctaaaacagactactag

SEQ ID NO: 257772 - DNA, 1589 bp, Artificial Sequence
  derived and/or modified sequence
cgaggtccgctacgtaaatccctttgcggcgggataaataaagaaaacaggaaaggaggaaagcattgattacaaatatcttaacaatgagcaaatgtgcaaggaaaaaatatattaagacaaatccaagacaaatgaccatggaaacagttgaatcccagcatgatggaagtataacagcttctttgacagagagcaagtctgctcatgtgcagactcagactggccaaaattcaatccctgctttagctcaggtagcagcaattgcagagacagatgaatctgcagaatcagaaggtgtaattgattctcataaacgtagagaaatcctttcacgaagaccctcttataggaaaatactgaatgaactgtcctctgatgtgcctggtgttcccaagattgaagaagagagatcagaggaagaaggaacaccacctagtattgctaccatggcagtaccaactagcatatatcagactagcacggggcaatacaatgaggaaactgaacttgccccaagtcacatggctgctgccactggtgacatgccaacttaccagatccgagctcctactgctgctttgccacagggagtggtgatggctgcatcgcccggaagtttgcacagtccccagcagctggcagaagaagcaacacgcaaacgagagctgaggctaatgaaaaacagggaagctgcccgggagtgtcgcaggaagaagaaagaatatgtcaaatgtcttgaaaatcgtgtggctgtgcttgaaaaccaaaacaagactctcattgaggaactcaaggccctcaaagatctttattgccataaagtagagtaactgtctttgacttggaccttgtttactctaatcaaggcaggagatgcagcagtcctacttattgccatgtggacttgtgggaaggacacgtgtgacccttaagaatccagtttggattagtgtttgaaattgaattgggaatgttgttccaggatgtggaatgcagccgtgatcacacttaccgagcttactttgatctgtttgtcaatagcatgcaaaaaatgctttgtttgccctttgcttctgctttttttcagggaagctgccaaagaatgtcgacgtcgaaagaaagaatatgtaaaatgtctggagagccgagttgcagtgctggaagtccagaacaagaagcttatagaggaacttgaaaccttgaaagacatttgttctcccaaaacagattactagaaatatttaactatgaactgaaggcagcatgtatagttgcttttgaaggaatacaatatatagctggcaagaatggtggcttcttttctttgtatcattcatcttcttctttaatcacttaacattcctaaaatgcttcactgtacgtagttaagtcgtagctataacttcaaattttttaaaagagacaaactgtaaaaaatgtgtgtattcttaaaatgcaatatttgtaaggcttgttccaatgccacatacttgcagctcccattctatgtgtcatcaatagtgtcctatgcaataaaattatttgcaggtctttaaatcattttaggaaaggatgatcaaaaataa

SEQ ID NO: 257773 - DNA, 585 bp, Artificial Sequence
  derived and/or modified sequence
atggtagcagcaattgcagagacagatgaatctgcagaatcagaaggtgtaattgattctcataaacgtagagaaatcctttcacgaagaccctcttataggaaaatactgaatgaactgtcctctgatgtgcctggtgttcccaagattgaagaagagagatcagaggaagaaggaacaccacctagtattgctaccatggcagtaccaactagcatatatcagactagcacggggcaatacaatgaggaaactgaacttgccccaagtcacatggctgctgccactggtgacatgccaacttaccagatccgagctcctactgctgctttgccacagggagtggtgatggctgcatcgcccggaagtttgcacagtccccagcagctggcagaagaagcaacacgcaaacgagagctgaggctaatgaaaaacagggaagctgccaaagaatgtcgacgtcgaaagaaagaatatgtaaaatgtctggagagccgagttgcagtgctggaagtccagaacaagaagcttatagaggaacttgaaaccttgaaagacatttgttctcccaaaacagattactag

SEQ ID NO: 257774 - DNA, 747 bp, Artificial Sequence
  derived and/or modified sequence
atgagcaagtgcgccagaaagaagtacatcaagaccaaccccagacagatgaccatggagaccgtggagagccagcacgacggcagcatcaccgccagcctgaccgagagcaagagcgcccacgtgcagacccagaccggccagaacagcatccccgccctggcccaggtggccgccatcgccgagaccgacgagagcgccgagagcgagggcgtgatcgacagccacaagagaagagagatcctgagcagaagacccagctacagaaagatcctgaacgagctgagcagcgacgtgcccggcgtgcccaagatcgaggaggagagaagcgaggaggagggcaccccccccagcatcgccaccatggccgtgcccaccagcatctaccagaccagcaccggccagtacaacgaggagaccgagctggcccccagccacatggccgccgccaccggcgacatgcccacctaccagatcagagcccccaccgccgccctgccccagggcgtggtgatggccgccagccccggcagcctgcacagcccccagcagctggccgaggaggccaccagaaagagagagctgagactgatgaagaacagagaggccgccagagagtgcagaagaaagaagaaggagtacgtgaagtgcctggagaacagagtggccgtgctggagaaccagaacaagaccctgatcgaggagctgaaggccctgaaggacctgtactgccacaaggtggagtag

SEQ ID NO: 257775 - DNA, 585 bp, Artificial Sequence
  derived and/or modified sequence
atggtggccgccatcgccgagaccgacgagagcgccgagagcgagggcgtgatcgacagccacaagagaagagagatcctgagcagaagacccagctacagaaagatcctgaacgagctgagcagcgacgtgcccggcgtgcccaagatcgaggaggagagaagcgaggaggagggcaccccccccagcatcgccaccatggccgtgcccaccagcatctaccagaccagcaccggccagtacaacgaggagaccgagctggcccccagccacatggccgccgccaccggcgacatgcccacctaccagatcagagcccccaccgccgccctgccccagggcgtggtgatggccgccagccccggcagcctgcacagcccccagcagctggccgaggaggccaccagaaagagagagctgagactgatgaagaacagagaggccgccaaggagtgcagaagaagaaagaaggagtacgtgaagtgcctggagagcagagtggccgtgctggaggtgcagaacaagaagctgatcgaggagctggagaccctgaaggacatctgcagccccaagaccgactactag

SEQ ID NO: 257776 - protein, 303 aa, Artificial Sequence
  derived and/or modified sequence
MLETLRERLLSVQQDFTSGLKTLSDKSREAKVKSKPRTVPFLPKYSAGLELLSRYEDTWAALHRRAKDCASAGELVDSEVVMLSAHWEKKKTSLVELQEQLQQLPALIADLESMTANLTHLEASFEEVENNLLHLEDLCGQCELERCKHMQSQQLENYKKNKRKELETFKAELDAEHAQKVLEMEHTQQMKLKERQKFFEEAFQQDMEQYLSTGYLQIAERREPIGSMSSMEVNVDMLEQMDLMDISDQEALDVFLNSGGEENTVLSPALGRVDKLALAEPGQYRCHSPPKVRRENHLPVTYA

SEQ ID NO: 257777 - protein, 303 aa, Artificial Sequence
  derived and/or modified sequence
MLETLRERLLSVQQDFTSGLKTLSDKSREAKVKSKPRTVPFLPKYSAGLELLSRYEDTWAALHRRAKDCASAGELVDSEVVMLSAHWEKKKTSLVELQEQLQQLPALIADLESMTANLTHLEASFEEVENNLLHLEDLCGQCELERCKHMQSQQLENYKKNKSKELGTGKAELDAEHAQKVLEMEHTQQMKLKERQKFFEEAFQQDMEQYLSTGYLQIAERREPIGSMSSMEVNVDMLEQMDLMDISDQEALDVFLNSGGEENTVLSPALGRVDKLALAEPGQYRCHSPPKVRRENHLPVTYA

SEQ ID NO: 257778 - DNA, 912 bp, Artificial Sequence
  derived and/or modified sequence
atgctggagacattgagagagcgtctcctgagtgttcagcaggactttacaagtgggctaaaaacgctgagcgacaaaagtcgcgaggccaaggtcaagagtaagcccagaaccgtgccattcttacccaagtactccgcaggactggagttattgtcccgctatgaagacacgtgggccgcactccacaggagggctaaagactgtgcaagcgccggggagctagtcgacagcgaggtggtcatgctgtcagctcactgggaaaaaaagaaaacaagcctggtcgaactccaagagcagctgcaacagctgcctgccctcatcgccgacttggaatctatgactgccaacctgactcacctggaggcgtcctttgaggaggtagaaaacaatcttctccaccttgaagacttgtgtggtcagtgcgagctggaaagatgcaagcacatgcagagtcagcagctggaaaactataagaagaataagcggaaggaactggagacatttaaggctgagctggatgcagagcatgcccagaaggtcttagaaatggagcacacccagcagatgaagctaaaagagaggcagaagttctttgaagaagccttccaacaggatatggaacagtacttaagcaccgggtacctgcagatcgcagagcgccgggaaccaattggttctatgtccagtatggaggtaaacgtcgacatgctggagcagatggatttaatggacatttcagatcaggaggccctcgatgtgttcctcaatagcggcggcgaagagaataccgtcctatccccagcactaggtcgagtagataaattggccctcgctgaaccagggcaatatcggtgtcatagtccacccaaagtgagacgagagaatcacctccccgtcacatacgcgtag

SEQ ID NO: 257779 - DNA, 912 bp, Artificial Sequence
  derived and/or modified sequence
atgctagaaacccttcgcgaacggctcctgagtgtgcagcaggattttacgtcaggccttaaaacgctgagcgataagtcccgagaagctaaagtgaagtcgaaacccagaaccgtgcctttcctgcctaagtattccgcagggctcgaactgcttagccgatatgaagatacatgggccgcgctccaccgtcgggctaaggattgtgcctccgccggtgaactggtggacagtgaggttgtaatgctatcggcccattgggagaaaaaaaaaacatctctagtcgagctgcaggagcaactccagcagctgcctgccctcattgccgacctagagagcatgacagccaacctcacccatctcgaagcctccttcgaagaggtggaaaataacctcctccatctggaggatctctgtgggcagtgcgaacttgagcggtgtaaacacatgcaaagccagcagctggaaaactataagaagaacaagagcaaggagcttggcactggaaaggcagagctggacgcggagcacgcacagaaggtactggaaatggagcatacccagcagatgaagctgaaagagcgtcagaaattctttgaggaagcgtttcagcaggatatggagcagtatttgagcacggggtatttgcagatcgcagaaagacgggagcctattggttcgatgagctctatggaagttaacgtcgatatgttagagcagatggaccttatggacatctcagaccaagaagcacttgacgtgttcctgaactctggcggggaagagaacacagttctttcaccagccctcggaagggttgacaagctagcgctggcagagcctggccagtaccgttgccattccccccctaaggttagacgggaaaaccaccttccagtgacctacgcttag

SEQ ID NO: 257780 - DNA, 912 bp, Artificial Sequence
  derived and/or modified sequence
atgctggagaccctgcgggagcggctgctgtctgtgcagcaggacttcaccagcggcctgaagaccctgagtgacaagagccgggaggccaaggtgaagagcaagcccaggacagtgcccttcctgcccaagtacagcgctggcctggagctgctgagccgctatgaggacacctgggccgccctgcaccggcgggccaaggactgtgccagcgctggggagctggtggacagcgaggtggtgatgctgagcgcccactgggagaagaagaagaccagcctggtggagctgcaggagcagctgcagcagctgcctgccctgattgctgacctggagagcatgacagccaacctgacccacctggaggccagctttgaggaggtggagaacaacctgctgcacctggaggacctgtgtggccagtgtgagctggagcgctgcaagcacatgcagagccagcagctggagaactacaagaagaacaagaggaaggagctggagaccttcaaggccgagctggatgctgagcacgcccagaaggtgctggagatggagcacacccagcagatgaagctgaaggagcggcagaagttctttgaggaggccttccagcaggacatggagcagtacctgagcacaggctacctgcagattgctgagcggcgggagcccatcggctccatgagctccatggaggtgaatgtggacatgctggagcagatggacctgatggacatcagtgaccaggaggccctggatgtgttcctgaacagcggcggggaggagaacacagtgctgagccctgccctgggccgggtggacaagctggccctggccgagcccggccagtaccgctgccacagcccccccaaggtgagaagagagaaccacctgcctgtgacctacgcctag

SEQ ID NO: 257781 - DNA, 912 bp, Artificial Sequence
  derived and/or modified sequence
atgctggagaccctgcgggagcggctgctgtctgtgcagcaggacttcaccagcggcctgaagaccctgagtgacaagagccgggaggccaaggtgaagagcaagcccaggacagtgcccttcctgcccaagtacagcgctggcctggagctgctgagccgctatgaggacacctgggccgccctgcaccggcgggccaaggactgtgccagcgctggggagctggtggacagcgaggtggtgatgctgagcgcccactgggagaagaagaagaccagcctggtggagctgcaggagcagctgcagcagctgcctgccctgattgctgacctggagagcatgacagccaacctgacccacctggaggccagctttgaggaggtggagaacaacctgctgcacctggaggacctgtgtggccagtgtgagctggagcgctgcaagcacatgcagagccagcagctggagaactacaagaagaacaagagcaaggagctgggcaccgggaaggccgagctggatgctgagcacgcccagaaggtgctggagatggagcacacccagcagatgaagctgaaggagcggcagaagttctttgaggaggccttccagcaggacatggagcagtacctgagcacaggctacctgcagattgctgagcggcgggagcccatcggctccatgagctccatggaggtgaatgtggacatgctggagcagatggacctgatggacatcagtgaccaggaggccctggatgtgttcctgaacagcggcggggaggagaacacagtgctgagccctgccctgggccgggtggacaagctggccctggccgagcccggccagtaccgctgccacagcccccccaaggtgagaagagagaaccacctgcctgtgacctacgcctag

SEQ ID NO: 257782 - DNA, 912 bp, Artificial Sequence
  derived and/or modified sequence
atgctggagaccctgcgggagcggctgctgagcgtgcagcaggacttcacaagcggtttgaagacccttagcgataaatctcgcgaggctaaggttaagtcaaagccccgcacagtgcccttcctccctaagtactcagctggcctggaacttctgtcccggtacgaagatacttgggctgccctccaccggcgcgctaaagactgtgcatccgccggcgaactcgttgattctgaagtcgtgatgctcagtgctcactgggaaaaaaaaaaaacctcgctagtggaactgcaggaacaacttcagcaactgccggctctgatcgcagatctggaatccatgactgccaacctgacccacctggaagcgagtttcgaggaggtcgagaataatctgctgcatttggaggacctatgtggccaatgtgaactggagcggtgcaaacatatgcagagccagcagctggagaactacaagaagaataagcgcaaagaattggaaaccttcaaggcagagttggatgccgaacatgcccagaaggtcctggagatggagcacacgcagcagatgaagcttaaggagcgtcagaagtttttcgaggaagccttccagcaggacatggagcagtacctgtcaaccggctatctccaaatcgcggagcgccgggagcctatcggctcaatgtcatcaatggaggtgaatgtcgatatgctcgaacagatggatctgatggacatctccgaccaggaggccctggacgtctttctcaatagtggcggagaagagaatactgtcctcagcccagctctggggcgggtagataagctggcattggcagagcctgggcaatacagatgccattccccacccaaggtcaggagggaaaaccatctgcccgtaacatatgcatag

SEQ ID NO: 257783 - DNA, 912 bp, Artificial Sequence
  derived and/or modified sequence
atgctggagaccctgcgggagcggctgctgagcgtgcagcaggactttacatctggccttaagacactctcagataagagtcgggaagccaaagtgaaaagcaaaccaagaactgttcccttcctgcccaagtattcagctggacttgaacttttgtcccgatacgaagacacttgggcagctttgcacaggagagcaaaggattgtgctagcgccggcgaattggtcgattccgaggtcgtgatgctgtccgcacactgggaaaaaaagaaaacatcacttgtcgagctgcaggaacagcttcagcaactcccagctctgatcgctgatttggaatctatgacagccaacctcactcatctcgaagctagctttgaagaggtcgagaataacctgcttcacctagaagatctctgtgggcaatgcgagctcgaacgttgcaagcacatgcaatcacagcagctcgagaactacaagaaaaataaaagtaaagaactcggaacaggcaaagcggagttggatgctgagcacgctcagaaagtcctggaaatggaacatacacagcagatgaaactgaaggaaaggcaaaagtttttcgaggaggcgtttcagcaggacatggagcaatacctctccaccggataccttcaaattgccgaacgtagggaaccaatcgggagcatgtccagcatggaggttaacgtagatatgctggaacagatggacctgatggacatctcagaccaagaggcccttgacgtgttcctgaactccgggggagaagaaaacactgtgctctccccagcactcggccgggtcgacaagctggcattggcagagcccggacagtacagatgccactcgcctccgaaagtccggcgcgaaaatcatctacctgtcacctatgcgtag

SEQ ID NO: 257784 - DNA, 912 bp, Artificial Sequence
  derived and/or modified sequence
atgctggaaacacttcgcgagaggctgctgtctgtccagcaggacttcacgtctggccttaaaactttatccgataaaagtagagaggcaaaagtcaaaagcaagccgagaactgtgccctttctccccaagtattcggcgggattggaattattaagtagatatgaagacacctgggctgccctccaccggcgtgcgaaggattgtgcttcagctggagagctggtcgatagtgaggttgtcatgctctctgcacattgggagaagaagaagacatcgctggtcgagctacaagagcagctccagcaactcccagcccttattgcagatttagagtccatgaccgctaatctgacacaccttgaggccagcttcgaggaggtggagaacaacttgctgcatctggaggatttgtgtgggcagtgcgagctggagcggtgcaagcatatgcaatcacaacagctggagaattacaagaagaacaagcgcaaagagctcgagacctttaaggctgagttagatgccgagcacgcccagaaggttctcgagatggaacacacccagcagatgaagttaaaggaacggcagaagttttttgaggaggcctttcaacaagacatggaacagtatctgtctactggataccttcagatagccgaacgcagggaacctataggctctatgagcagcatggaggttaatgtcgatatgctagagcagatggaccttatggatattagtgatcaggaggcgctggacgtatttctgaacagtggcggagaggaaaatacagtgttgagccctgccttgggacgggtcgacaaattagctctggccgagcccggtcagtaccgttgtcatagcccgccaaaagttagaagagagaaccatctgcccgtgacctatgcttag

SEQ ID NO: 257785 - DNA, 912 bp, Artificial Sequence
  derived and/or modified sequence
atgctcgaaaccctgcgagagaggttattaagcgtacagcaggactttacaagcggcctgaagaccttgtccgacaagagccgggaggctaaggttaaatccaaaccgaggactgtccctttcctgccaaagtactcagccggtctcgagcttcttagtcgctacgaggacacttgggcagccctgcaccggcgagccaaagactgcgcttctgcgggagaactggtggactctgaagtggtaatgctgagcgcccattgggagaagaaaaagacgtccttagttgagctgcaagagcagttacagcagctgcccgctctcatcgccgatttagagtcaatgactgcgaacctgacccatttagaggcctccttcgaggaggtggagaataatctattacacctcgaagatctatgcggacaatgcgagctcgaaagatgcaaacacatgcagtcgcagcagttggagaattataagaagaataaaagcaaggaactgggtaccggcaaggcggagctcgatgccgagcacgcccagaaagtactcgagatggaacacactcagcaaatgaagctcaaggaacgccagaagtttttcgaggaggcattccagcaagatatggaacagtacctgagcacaggctacctgcagatcgctgagcgacgagagccaatcggaagcatgtcatctatggaggtgaatgtagatatgctggagcagatggacttaatggacatctctgatcaggaggctctggatgtcttcctgaattcggggggagaggagaatacggtcctgtctccagcactgggccgagtggataaactcgcactggctgagccaggacagtataggtgtcattctccacccaaggtgaggcgagagaaccaccttcctgtaacctacgcatag

SEQ ID NO: 257786 - DNA, 912 bp, Artificial Sequence
  derived and/or modified sequence
atgctggagaccctgagagagagactgctgagcgtgcagcaggacttcaccagcggcctgaagaccctgagcgacaagagcagagaggccaaggtgaagagcaagcccagaaccgtgcccttcctgcccaagtacagcgccggcctggagctgctgagcagatacgaggacacctgggccgccctgcacagaagagccaaggactgcgccagcgccggcgagctggtggacagcgaggtggtgatgctgagcgcccactgggagaagaagaagaccagcctggtggagctgcaggagcagctgcagcagctgcccgccctgatcgccgacctggagagcatgaccgccaacctgacccacctggaggccagcttcgaggaggtggagaacaacctgctgcacctggaggacctgtgcggccagtgcgagctggagagatgcaagcacatgcagagccagcagctggagaactacaagaagaacaagagaaaggagctggagaccttcaaggccgagctggacgccgagcacgcccagaaggtgctggagatggagcacacccagcagatgaagctgaaggagagacagaagttcttcgaggaggccttccagcaggacatggagcagtacctgagcaccggctacctgcagatcgccgagagaagagagcccatcggcagcatgagcagcatggaggtgaacgtggacatgctggagcagatggacctgatggacatcagcgaccaggaggccctggacgtgttcctgaacagcggcggcgaggagaacaccgtgctgagccccgccctgggcagagtggacaagctggccctggccgagcccggccagtacagatgccacagcccccccaaggtgagaagagagaaccacctgcccgtgacctacgcctag

SEQ ID NO: 257787 - DNA, 912 bp, Artificial Sequence
  derived and/or modified sequence
atgctggagaccctgagagagagactgctgagcgtgcagcaggacttcaccagcggcctgaagaccctgagcgacaagagcagagaggccaaggtgaagagcaagcccagaaccgtgcccttcctgcccaagtacagcgccggcctggagctgctgagcagatacgaggacacctgggccgccctgcacagaagagccaaggactgcgccagcgccggcgagctggtggacagcgaggtggtgatgctgagcgcccactgggagaagaagaagaccagcctggtggagctgcaggagcagctgcagcagctgcccgccctgatcgccgacctggagagcatgaccgccaacctgacccacctggaggccagcttcgaggaggtggagaacaacctgctgcacctggaggacctgtgcggccagtgcgagctggagagatgcaagcacatgcagagccagcagctggagaactacaagaagaacaagagcaaggagctgggcaccggcaaggccgagctggacgccgagcacgcccagaaggtgctggagatggagcacacccagcagatgaagctgaaggagagacagaagttcttcgaggaggccttccagcaggacatggagcagtacctgagcaccggctacctgcagatcgccgagagaagagagcccatcggcagcatgagcagcatggaggtgaacgtggacatgctggagcagatggacctgatggacatcagcgaccaggaggccctggacgtgttcctgaacagcggcggcgaggagaacaccgtgctgagccccgccctgggcagagtggacaagctggccctggccgagcccggccagtacagatgccacagcccccccaaggtgagaagagagaaccacctgcccgtgacctacgcctag

SEQ ID NO: 257788 - DNA, 1880 bp, Artificial Sequence
  derived and/or modified sequence
gtgcggggcgcgcggtgacagcgcggggttggcggcgtgggacccagggggcgacagaggcagcagcagcccgaggcctgaggagaggagaccggcggcggcggcaatgctggagacccttcgcgagcggctgctgagcgtgcagcaggatttcacctccgggctgaagactttaagtgacaagtcaagagaagcaaaagtgaaaagcaaacccaggactgttccatttttgccaaagtactctgctggattagaattacttagcaggtatgaggatacatgggctgcacttcacagaagagccaaagactgtgcaagtgctggagagctggtggatagcgaggtggtcatgctttctgcgcactgggagaagaaaaagacaagcctcgtggagctgcaagagcagctccagcagctcccagctttaatcgcagacttagaatccatgacagcaaatctgactcatttagaggcgagttttgaggaggtagagaacaacctgctgcatctggaagacttatgtgggcagtgtgaattagaaagatgcaaacatatgcagtcccagcaactggagaattacaagaaaaataagaggaaggaacttgaaaccttcaaagctgaactagatgcagagcacgcccagaaggtcctggaaatggagcacacccagcaaatgaagctgaaggagcggcagaagttttttgaggaagccttccagcaggacatggagcagtacctgtccactggctacctgcagattgcagagcggcgagagcccataggcagcatgtcatccatggaagtgaacgtggacatgctggagcagatggacctgatggacatatcggaccaggaggccctggacgtcttcctgaactctggaggagaagagaacactgtgctgtcccccgccttaggtagggttgacaaacttgcattagctgaaccagggcagtatcgatgccactcccctccaaaggtgagacgtgagaaccatctgccagtcacttacgcataaacccccaagctcacagccagctcctggctccctaaccccacggttccacacggctgtgtggcagctgcaacagtggtgtggttccgtcatgaattcttctcaaagatttgacatgctccactccggtaactttggtgagttgagagctttcttgtttgttttccctcctttaccacccagaaatccatttgagtctgctccttgtggttaaggactggcgtttgcagggaggtgcggactctcctgcggggctcacgggaaactcttccctcttcgtgcgacaggcatttaggggcgtgcctgccatgggcaaagccatggtgtgtgttcagctcttggcctgtgttgtaaacttagttgcacttcagttcctttcatcccttcacaaaattttgtttcacattcatgcagcaaatatgggctgaggtgccagacctgtacctgggcttggtgcgtttcaaatttcagaccagttctttgggctgggtcaaggcaaagctcagtcgtcccagcagcacctcagccatctgtagaaggttctaccattaccacggtttcagcttcctctaaacttctcacccgcttctcctggcaatctgtcagaacggtgtcatcctggggaagagaaggagcttgggtgcatttgccctcatcctgagaaggccagaatactggagaccagcgtgaaccctcacccagagtcaggggaagatttagaaacagtgacacctgcatatagaattttgattccttgaagagcctatttagttccataaaattggagaactgctgaaggtcagtaattccgactttctcagcagtggtgtctctgaattactgcaaagggtaaaaaaaaaaaaaa

SEQ ID NO: 257789 - DNA, 1931 bp, Artificial Sequence
  derived and/or modified sequence
gcggaaggggctggggttgcggcgcggcggcgaggaccagaccgggggcggggccggtagtgggagtgcggggcgcgcggtgacagcgcggggttggcggcgtgggacccagggggcgacagaggcagcagcagcccgaggcctgaggagaggagaccggcggcggcggcaatgctggagacccttcgcgagcggctgctgagcgtgcagcaggatttcacctccgggctgaagactttaagtgacaagtcaagagaagcaaaagtgaaaagcaaacccaggactgttccatttttgccaaagtactctgctggattagaattacttagcaggtatgaggatacatgggctgcacttcacagaagagccaaagactgtgcaagtgctggagagctggtggatagcgaggtggtcatgctttctgcgcactgggagaagaaaaagacaagcctcgtggagctgcaagagcagctccagcagctcccagctttaatcgcagacttagaatccatgacagcaaatctgactcatttagaggcgagttttgaggaggtagagaacaacctgctgcatctggaagacttatgtgggcagtgtgaattagaaagatgcaaacatatgcagtcccagcaactggagaattacaagaaaaataagagtaaagaattgggtacaggcaaagctgaactagatgcagagcacgcccagaaggtcctggaaatggagcacacccagcaaatgaagctgaaggagcggcagaagttttttgaggaagccttccagcaggacatggagcagtacctgtccactggctacctgcagattgcagagcggcgagagcccataggcagcatgtcatccatggaagtgaacgtggacatgctggagcagatggacctgatggacatatcggaccaggaggccctggacgtcttcctgaactctggaggagaagagaacactgtgctgtcccccgccttaggtagggttgacaaacttgcattagctgaaccagggcagtatcgatgccactcccctccaaaggtgagacgtgagaaccatctgccagtcacttacgcataaacccccaagctcacagccagctcctggctccctaaccccacggttccacacggctgtgtggcagctgcaacagtggtgtggttccgtcatgaattcttctcaaagatttgacatgctccactccggtaactttggtgagttgagagctttcttgtttgttttccctcctttaccacccagaaatccatttgagtctgctccttgtggttaaggactggcgtttgcagggaggtgcggactctcctgcggggctcacgggaaactcttccctcttcgtgcgacaggcatttaggggcgtgcctgccatgggcaaagccatggtgtgtgttcagctcttggcctgtgttgtaaacttagttgcacttcagttcctttcatcccttcacaaaattttgtttcacattcatgcagcaaatatgggctgaggtgccagacctgtacctgggcttggtgcgtttcaaatttcagaccagttctttgggctgggtcaaggcaaagctcagtcgtcccagcagcacctcagccatctgtagaaggttctaccattaccacggtttcagcttcctctaaacttctcacccgcttctcctggcaatctgtcagaacggtgtcatcctggggaagagaaggagcttgggtgcatttgccctcatcctgagaaggccagaatactggagaccagcgtgaaccctcacccagagtcaggggaagatttagaaacagtgacacctgcatatagaattttgattccttgaagagcctatttagttccataaaattggagaactgctgaaggtcagtaattccgactttctcagcagtggtgtctctgaattactgcaaagggt

SEQ ID NO: 257790 - protein, 1169 aa, Artificial Sequence
  derived and/or modified sequence
MDISTRSKDPGSAERTAQKRKFPSPPHSSNGHSPQDTSTSPIKKKKKPGLLNSNNKEQSELRHGPFYYMKQPLTTDPVDVVPQDGRNDFYCWVCHREGQVLCCELCPRVYHAKCLRLTSEPEGDWFCPECEKITVAECIETQSKAMTMLTIEQLSYLLKFAIQKMKQPGTDAFQKPVPLEQHPDYAEYIFHPMDLCTLEKNAKKKMYGCTEAFLADAKWILHNCIIYNGGNHKLTQIAKVVIKICEHEMNEIEVCPECYLAACQKRDNWFCEPCSNPHPLVWAKLKGFPFWPAKALRDKDGQVDARFFGQHDRAWVPINNCYLMSKEIPFSVKKTKSIFNSAMQEMEVYVENIRRKFGVFNYSPFRTPYTPNSQYQMLLDPTNPSAGTAKIDKQEKVKLNFDMTASPKILMSKPVLSGGTGRRISLSDMPRSPMSTNSSVHTGSDVEQDAEKKATSSHFSASEESMDFLDKSTASPASTKTGQAGSLSGSPKPFSPQLSAPITTKTDKTSTTGSILNLNLGHRSKAEMDLKELSESVQQQSTPVPLISPKRQIRSRFQLNLDKTIESCKAQLGINEISEDVYTAVEHSDSEDSEKSDSSDSEYISDDEQKSKNEPEDTEDKEGCQMDKEPSAVKKKPKPTNPVEIKEELKSTSPASEKADPGAVKDKASPEPEKDFSEKAKPSPHPIKDKLKGKDETDSPTVHLGLDSDSESELVIDLGEDHSGREGRKNKKEPKEPSPKQDVVGKTPPSTTVGSHSPPETPVLTRSSAQTSAAGATATTSTSSTVTVTAPAPAATGSPVKKQRPLLPKETAPAVQRVVWNSSTVQQKEITQSPSTSTITLVTSTQSSPLVTSSGSMSTLVSSVNADLPIATASADVAADIAKYTSKMMDAIKGTMTEIYNDLSKNTTGSTIAEIRRLRIEIEKLQWLHQQELSEMKHNLELTMAEMRQSLEQERDRLIAEVKKQLELEKQQAVDETKKKQWCANCKKEAIFYCCWNTSYCDYPCQQAHWPEHMKSCTQSATAPQQEADAEVNTETLNKSSQGSSSSTQSAPSETASASKEKETSAEKSKESGSTLDLSGSRETPSSILLGSNQGSVSKRCDKQPAYAPTTTDHQPHPNYPAQKYHSRSNKSSWSSSDEKRGSTRSDHNTSTSTKSLLPKESRLDTFWD

SEQ ID NO: 257791 - protein, 1188 aa, Artificial Sequence
  derived and/or modified sequence
MHPQSLAEEEIKTEQEVVEGMDISTRSKDPGSAERTAQKRKFPSPPHSSNGHSPQDTSTSPIKKKKKPGLLNSNNKEQSELRHGPFYYMKQPLTTDPVDVVPQDGRNDFYCWVCHREGQVLCCELCPRVYHAKCLRLTSEPEGDWFCPECEKITVAECIETQSKAMTMLTIEQLSYLLKFAIQKMKQPGTDAFQKPVPLEQHPDYAEYIFHPMDLCTLEKNAKKKMYGCTEAFLADAKWILHNCIIYNGGNHKLTQIAKVVIKICEHEMNEIEVCPECYLAACQKRDNWFCEPCSNPHPLVWAKLKGFPFWPAKALRDKDGQVDARFFGQHDRAWVPINNCYLMSKEIPFSVKKTKSIFNSAMQEMEVYVENIRRKFGVFNYSPFRTPYTPNSQYQMLLDPTNPSAGTAKIDKQEKVKLNFDMTASPKILMSKPVLSGGTGRRISLSDMPRSPMSTNSSVHTGSDVEQDAEKKATSSHFSASEESMDFLDKSTASPASTKTGQAGSLSGSPKPFSPQLSAPITTKTDKTSTTGSILNLNLDRSKAEMDLKELSESVQQQSTPVPLISPKRQIRSRFQLNLDKTIESCKAQLGINEISEDVYTAVEHSDSEDSEKSDSSDSEYISDDEQKSKNEPEDTEDKEGCQMDKEPSAVKKKPKPTNPVEIKEELKSTSPASEKADPGAVKDKASPEPEKDFSEKAKPSPHPIKDKLKGKDETDSPTVHLGLDSDSESELVIDLGEDHSGREGRKNKKEPKEPSPKQDVVGKTPPSTTVGSHSPPETPVLTRSSAQTSAAGATATTSTSSTVTVTAPAPAATGSPVKKQRPLLPKETAPAVQRVVWNSSTVQQKEITQSPSTSTITLVTSTQSSPLVTSSGSMSTLVSSVNADLPIATASADVAADIAKYTSKMMDAIKGTMTEIYNDLSKNTTGSTIAEIRRLRIEIEKLQWLHQQELSEMKHNLELTMAEMRQSLEQERDRLIAEVKKQLELEKQQAVDETKKKQWCANCKKEAIFYCCWNTSYCDYPCQQAHWPEHMKSCTQSATAPQQEADAEVNTETLNKSSQGSSSSTQSAPSETASASKEKETSAEKSKESGSTLDLSGSRETPSSILLGSNQGSVSKRCDKQPAYAPTTTDHQPHPNYPAQKYHSRSNKSSWSSSDEKRGSTRSDHNTSTSTKSLLPKESRLDTFWD

SEQ ID NO: 257792 - protein, 1096 aa, Artificial Sequence
  derived and/or modified sequence
  misc_feature (1)..(1): Xaa can be any naturally occurring amino acid
XTDPVDVVPQDGRNDFYCWVCHREGQVLCCELCPRVYHAKCLRLTSEPEGDWFCPECEKITVAECIETQSKAMTMLTIEQLSYLLKFAIQKMKQPGTDAFQKPVPLEQHPDYAEYIFHPMDLCTLEKNAKKKMYGCTEAFLADAKWILHNCIIYNGGNHKLTQIAKVVIKICEHEMNEIEVCPECYLAACQKRDNWFCEPCSNPHPLVWAKLKGFPFWPAKALRDKDGQVDARFFGQHDRAWVPINNCYLMSKEIPFSVKKTKSIFNSAMQEMEVYVENIRRKFGVFNYSPFRTPYTPNSQYQMLLDPTNPSAGTAKIDKQEKVKLNFDMTASPKILMSKPVLSGGTGRRISLSDMPRSPMSTNSSVHTGSDVEQDAEKKATSSHFSASEESMDFLDKSTASPASTKTGQAGSLSGSPKPFSPQLSAPITTKTDKTSTTGSILNLNLGHRSKAEMDLKELSESVQQQSTPVPLISPKRQIRSRFQLNLDKTIESCKAQLGINEISEDVYTAVEHSDSEDSEKSDSSDSEYISDDEQKSKNEPEDTEDKEGCQMDKEPSAVKKKPKPTNPVEIKEELKSTSPASEKADPGAVKDKASPEPEKDFSEKAKPSPHPIKDKLKGKDETDSPTVHLGLDSDSESELVIDLGEDHSGREGRKNKKEPKEPSPKQDVVGKTPPSTTVGSHSPPETPVLTRSSAQTSAAGATATTSTSSTVTVTAPAPAATGSPVKKQRPLLPKETAPAVQRVVWNSSTVQQKEITQSPSTSTITLVTSTQSSPLVTSSGSMSTLVSSVNADLPIATASADVAADIAKYTSKMMDAIKGTMTEIYNDLSKNTTGSTIAEIRRLRIEIEKLQWLHQQELSEMKHNLELTMAEMRQSLEQERDRLIAEVKKQLELEKQQAVDETKKKQWCANCKKEAIFYCCWNTSYCDYPCQQAHWPEHMKSCTQSATAPQQEADAEVNTETLNKSSQGSSSSTQSAPSETASASKEKETSAEKSKESGSTLDLSGSRETPSSILLGSNQGSVSKRCDKQPAYAPTTTDHQPHPNYPAQKYHSRSNKSSWSSSDEKRGSTRSDHNTSTSTKSLLPKESRLDTFWD

SEQ ID NO: 257793 - DNA, 3567 bp, Artificial Sequence
  derived and/or modified sequence
atgcacccccagagcctggccgaggaggagatcaagaccgagcaggaggtggtggagggcatggacatcagcaccagaagcaaggaccccggcagcgccgagagaaccgcccagaagagaaagttccccagccccccccacagcagcaacggccacagcccccaggacaccagcaccagccccatcaagaagaagaagaagcccggcctgctgaacagcaacaacaaggagcagagcgagctgagacacggccccttctactacatgaagcagcccctgaccaccgaccccgtggacgtggtgccccaggacggcagaaacgacttctactgctgggtgtgccacagagagggccaggtgctgtgctgcgagctgtgccccagagtgtaccacgccaagtgcctgagactgaccagcgagcccgagggcgactggttctgccccgagtgcgagaagatcaccgtggccgagtgcatcgagacccagagcaaggccatgaccatgctgaccatcgagcagctgagctacctgctgaagttcgccatccagaagatgaagcagcccggcaccgacgccttccagaagcccgtgcccctggagcagcaccccgactacgccgagtacatcttccaccccatggacctgtgcaccctggagaagaacgccaagaagaagatgtacggctgcaccgaggccttcctggccgacgccaagtggatcctgcacaactgcatcatctacaacggcggcaaccacaagctgacccagatcgccaaggtggtgatcaagatctgcgagcacgagatgaacgagatcgaggtgtgccccgagtgctacctggccgcctgccagaagagagacaactggttctgcgagccctgcagcaacccccaccccctggtgtgggccaagctgaagggcttccccttctggcccgccaaggccctgagagacaaggacggccaggtggacgccagattcttcggccagcacgacagagcctgggtgcccatcaacaactgctacctgatgagcaaggagatccccttcagcgtgaagaagaccaagagcatcttcaacagcgccatgcaggagatggaggtgtacgtggagaacatcagaagaaagttcggcgtgttcaactacagccccttcagaaccccctacacccccaacagccagtaccagatgctgctggaccccaccaaccccagcgccggcaccgccaagatcgacaagcaggagaaggtgaagctgaacttcgacatgaccgccagccccaagatcctgatgagcaagcccgtgctgagcggcggcaccggcagaagaatcagcctgagcgacatgcccagaagccccatgagcaccaacagcagcgtgcacaccggcagcgacgtggagcaggacgccgagaagaaggccaccagcagccacttcagcgccagcgaggagagcatggacttcctggacaagagcaccgccagccccgccagcaccaagaccggccaggccggcagcctgagcggcagccccaagcccttcagcccccagctgagcgcccccatcaccaccaagaccgacaagaccagcaccaccggcagcatcctgaacctgaacctggacagaagcaaggccgagatggacctgaaggagctgagcgagagcgtgcagcagcagagcacccccgtgcccctgatcagccccaagagacagatcagaagcagattccagctgaacctggacaagaccatcgagagctgcaaggcccagctgggcatcaacgagatcagcgaggacgtgtacaccgccgtggagcacagcgacagcgaggacagcgagaagagcgacagcagcgacagcgagtacatcagcgacgacgagcagaagagcaagaacgagcccgaggacaccgaggacaaggagggctgccagatggacaaggagcccagcgccgtgaagaagaagcccaagcccaccaaccccgtggagatcaaggaggagctgaagagcaccagccccgccagcgagaaggccgaccccggcgccgtgaaggacaaggccagccccgagcccgagaaggacttcagcgagaaggccaagcccagcccccaccccatcaaggacaagctgaagggcaaggacgagaccgacagccccaccgtgcacctgggcctggacagcgacagcgagagcgagctggtgatcgacctgggcgaggaccacagcggcagagagggcagaaagaacaagaaggagcccaaggagcccagccccaagcaggacgtggtgggcaagaccccccccagcaccaccgtgggcagccacagcccccccgagacccccgtgctgaccagaagcagcgcccagaccagcgccgccggcgccaccgccaccaccagcaccagcagcaccgtgaccgtgaccgcccccgcccccgccgccaccggcagccccgtgaagaagcagagacccctgctgcccaaggagaccgcccccgccgtgcagagagtggtgtggaacagcagcaccgtgcagcagaaggagatcacccagagccccagcaccagcaccatcaccctggtgaccagcacccagagcagccccctggtgaccagcagcggcagcatgagcaccctggtgagcagcgtgaacgccgacctgcccatcgccaccgccagcgccgacgtggccgccgacatcgccaagtacaccagcaagatgatggacgccatcaagggcaccatgaccgagatctacaacgacctgagcaagaacaccaccggcagcaccatcgccgagatcagaagactgagaatcgagatcgagaagctgcagtggctgcaccagcaggagctgagcgagatgaagcacaacctggagctgaccatggccgagatgagacagagcctggagcaggagagagacagactgatcgccgaggtgaagaagcagctggagctggagaagcagcaggccgtggacgagaccaagaagaagcagtggtgcgccaactgcaagaaggaggccatcttctactgctgctggaacaccagctactgcgactacccctgccagcaggcccactggcccgagcacatgaagagctgcacccagagcgccaccgccccccagcaggaggccgacgccgaggtgaacaccgagaccctgaacaagagcagccagggcagcagcagcagcacccagagcgcccccagcgagaccgccagcgccagcaaggagaaggagaccagcgccgagaagagcaaggagagcggcagcaccctggacctgagcggcagcagagagacccccagcagcatcctgctgggcagcaaccagggcagcgtgagcaagagatgcgacaagcagcccgcctacgcccccaccaccaccgaccaccagccccaccccaactaccccgcccagaagtaccacagcagaagcaacaagagcagctggagcagcagcgacgagaagagaggcagcaccagaagcgaccacaacaccagcaccagcaccaagagcctgctgcccaaggagagcagactggacaccttctgggactag

SEQ ID NO: 257794 - DNA, 3567 bp, Artificial Sequence
  derived and/or modified sequence
atgcacccgcaatcactggctgaagaagagattaaaaccgagcaggaagtcgtcgaaggcatggacatttcgactcgttccaaggacccaggcagcgcagagcggacggcccagaagcggaaatttcctagtcctcctcactccagtaatggacacagtccccaggacacttccacctctccaattaaaaaaaagaagaagccaggcctcctgaactccaataataaagaacagtctgagctgcgccacggacccttttactatatgaagcagcctctgacaaccgacccggtcgacgtcgtaccccaagatggaagaaatgacttttactgctgggtttgccatagggaagggcaagtcttgtgttgcgaactatgtcccagggtgtatcatgccaaatgcctgaggctgacgtcagagccggagggagattggttctgccctgaatgcgagaagataactgttgccgaatgtatcgaaacccagagtaaggccatgactatgctcacgatcgagcaactgtcctatctattgaagttcgccatacagaagatgaagcagccgggcaccgacgcgtttcaaaaaccagtgccactggagcaacatccagactacgctgaatatatctttcatccaatggatctctgtaccttggaaaaaaatgccaaaaagaaaatgtatggctgcactgaagctttcctggccgatgcaaaatggatcctgcataattgcataatttacaacggcgggaatcataaactgactcagattgcgaaggtcgtgatcaaaatctgcgaacatgagatgaatgagatcgaggtctgccccgagtgttacctcgccgcctgccagaaaagggacaactggttctgcgaaccctgtagtaacccccaccctttggtctgggccaagcttaagggcttcccattctggcctgccaaagcgttacgggataaagatggccaagtggacgctaggttttttgggcagcatgacagggcatgggttcctattaataattgttacctgatgtctaaggaaattcccttctctgtgaagaagaccaaatctatcttcaatagcgcaatgcaggagatggaggtgtacgtagagaacatcagacgaaaatttggagtgttcaattattcacctttccgaacaccatatactccgaacagtcagtaccagatgttgcttgatccaacaaatccctccgcaggcactgcaaagatcgacaagcaggaaaaagttaaactaaatttcgacatgacagccagccccaaaatcttaatgtctaaacctgtgctaagtggagggaccgggaggaggatttctctcagcgacatgccacggtctccaatgagcactaacagttctgttcatacaggatcagatgtggagcaggatgccgaaaagaaggccacatccagtcatttttctgcttctgaggaatcgatggattttctggataagtcgacagcatccccggcgagtactaaaaccggccaggcaggatcactcagtggctctccaaaaccattctccccgcagttgagcgcccctattactacaaagacggataaaacctccactactggctctatcttgaacctgaacctcgaccgcagcaaggcagagatggaccttaaggaactgagtgagagcgttcagcaacagtcaacgccggttcccctgatcagccctaaaagacagattcggtctcgcttccagctgaatcttgacaagacaatcgagagttgtaaagcccagctgggtatcaatgaaattagcgaggacgtgtacacagctgtggaacatagcgatagcgaagactcagaaaagagtgactcatcggattcagaatatatatccgacgacgaacaaaaaagtaaaaacgagccagaggacactgaggataaggagggttgtcaaatggataaagagccctccgccgtgaagaagaaaccaaaacccaccaatcctgtggagattaaggaggaactgaaaagcactagtcctgccagtgaaaaggcagaccccggcgcagtgaaagacaaagctagtccagagcccgagaaagactttagtgaaaaggctaaacccagtccccatcctataaaagataagttaaaaggaaaggacgaaaccgatagccctactgttcatctggggttagatagtgactccgaatccgaattggtcattgacttgggggaggatcactccggcagggagggccgcaaaaataaaaaagaacccaaagagccatcaccgaagcaggacgtggttgggaaaacaccgccgtccaccaccgtcgggtcccatagcccgccagaaactccagtgttaactagaagttccgctcaaactagcgcggccggcgccaccgccactaccagcacttcttctaccgttacagtcacagccccagcacccgcggcaaccggcagtccggtgaagaagcagcgacctctgctccctaaagaaactgcccccgcagtccagcgggttgtttggaattccagcaccgtccagcagaaggaaattacgcagtcgccaagcactagcaccatcacattagttactagcacacaatcaagtcccctggtgactagttcagggagcatgtcaaccctggtgagtagtgtgaatgcggacctgccaattgccactgcatcagcggacgtcgcagcagacatcgccaagtatactagcaagatgatggatgccatcaaaggaaccatgaccgaaatctataacgatctgtccaaaaacaccactggctctactatagccgagattcgcagattgaggatagaaatcgagaagttacagtggctccatcagcaggaacttagcgaaatgaagcacaacctcgagctgaccatggctgagatgagacagagtctggaacaggagcgagaccgcctaatcgcagaggtcaaaaagcaactggagttagagaagcagcaggcagtggacgagaccaagaaaaagcagtggtgtgcgaactgcaagaaagaggctatcttctattgctgctggaatacgtcttactgcgactacccatgtcaacaggcccactggccagaacatatgaagagttgtacccagagtgccactgccccccagcaggaggccgatgcagaagtgaacaccgagactcttaataaaagttcacagggcagttcatcaagtactcagagcgcccctagcgaaaccgccagtgccagtaaggaaaaagaaacgtcagctgagaaaagtaaagagtccggctctaccctggacctgtccggatctagggaaacgccgtctagcattctcctcggtagcaatcagggcagtgtctccaagcggtgcgacaaacagcctgcttatgcccctactacaaccgatcaccagcctcaccccaattacccggctcagaaatatcactcacgcagcaacaaaagcagctggtcctcctccgacgagaagcgcggcagcacccggagcgaccacaacacctctacaagtacgaaatctctgctccccaaggaaagtcgcctggacactttttgggattag

SEQ ID NO: 257795 - DNA, 3567 bp, Artificial Sequence
  derived and/or modified sequence
atgcacccccagagcctggccgaggaggagatcaagacagagcaggaggtggtggagggcatggacatcagcaccaggagcaaggaccccggcagcgctgagaggacagcccagaagaggaagttccccagccccccccacagcagcaatggccacagcccccaggacaccagcaccagccccatcaagaagaagaagaagccaggcctgctgaacagcaacaacaaggagcagagcgagctgcggcacggccccttctactacatgaagcagcccctgaccacagatcctgtggatgtggtgccccaggacggcagaaatgacttctactgctgggtgtgccaccgggagggccaggtgctgtgctgtgagctgtgcccccgggtgtaccacgccaagtgcctgcggctgaccagcgagcctgagggggactggttctgcccagaatgtgagaagatcaccgtggctgaatgtattgagacccagagcaaggccatgaccatgctgaccatcgagcagctgagctacctgctgaagtttgccatccagaagatgaagcagcccggcacagatgccttccagaagcctgtgcccctggagcagcacccagactatgcagagtacatcttccaccccatggacctgtgcaccctggagaagaatgccaagaagaagatgtatggctgcacagaggccttcctggctgatgccaagtggatcctgcacaactgcatcatctacaacggcggcaaccacaagctgacccagatcgccaaggtggtgatcaagatctgtgaacatgagatgaatgaaattgaggtgtgcccagagtgctacctggccgcctgccagaagagggacaactggttctgtgagccctgcagcaacccccaccccctggtgtgggccaagctgaagggcttccccttctggccagccaaggccctgcgggacaaggatggccaggtggatgcccgcttcttcggccagcacgaccgggcctgggtgcccatcaacaactgctacctgatgagcaaggagatccccttctctgtgaagaagaccaagagcatcttcaacagcgccatgcaggagatggaggtgtatgtggagaacatccggaggaagtttggagtcttcaactacagccccttccgcaccccctacacccccaacagccagtaccagatgctgctggaccccaccaaccccagcgctggaacagccaagattgacaagcaggagaaggtgaagctgaactttgacatgacagccagccccaagatcctgatgagcaagcctgtgctgagcggcggcaccggccgccgcatcagcctgagtgacatgcccaggagccccatgagcaccaacagctctgtgcacacaggcagtgatgtggagcaggatgctgagaagaaggccaccagcagccacttcagcgccagcgaggagagcatggacttcctggacaagagcacagccagccctgccagcaccaagacaggccaggccggcagcctgagcggcagccccaagcccttcagcccccagctgagcgcccccatcaccaccaagacagacaagaccagcaccaccggcagcatcctgaacctgaacctggacaggagcaaggccgagatggacctgaaggagctgtctgagagcgtgcagcagcagagcacccctgtgcccctcatcagccccaagaggcagatccgcagccgcttccagctgaacctggacaagaccatcgagagctgcaaggcccagctgggcatcaatgagatcagtgaagatgtgtacacagctgtggagcacagcgacagcgaggacagcgagaagagtgacagcagtgacagcgagtacatcagtgatgatgagcagaagagcaagaatgaacctgaggacacagaggacaaggagggctgccagatggacaaggagcccagcgctgtgaagaagaagcccaagcccaccaaccctgtggagatcaaggaggagctgaagagcaccagccctgccagcgagaaggctgaccccggggctgtgaaggacaaggccagccctgagcctgagaaggacttcagcgagaaggccaagcccagcccccaccccatcaaggacaagctgaagggcaaggatgaaacagacagccccaccgtgcacctgggcctggacagcgacagcgagagcgagctggtgattgacctgggggaggaccacagcggccgggagggcaggaagaacaagaaggagcccaaggagcccagccccaagcaggatgtggtgggcaagaccccacccagcaccaccgtgggcagccacagccccccagagacccctgtgctgaccaggagcagcgcccagaccagcgctgctggggccacagccaccaccagcaccagcagcacagtgacagtgacagccccagccccagctgccaccggcagccctgtgaagaagcagaggcccctgctgcccaaggagacagccccagctgtgcagagggtggtgtggaacagcagcacagtgcagcagaaggagatcacccagagccccagcaccagcaccatcaccctggtgaccagcacccagagcagccccctggtgaccagcagcggctccatgagcaccctggtgtcctctgtgaatgctgacctgcccatcgccacagccagcgcagatgtggccgctgacatcgccaagtacaccagcaagatgatggatgccatcaagggcaccatgacagagatctacaatgacctgagcaagaacaccaccggcagcaccatcgccgagatccggcggctgagaattgaaattgagaagctgcagtggctgcaccagcaggagctgtctgagatgaagcacaacctggagctgaccatggccgagatgaggcagagcctggagcaggagcgggaccggctgattgctgaggtgaagaagcagctggagctggagaagcagcaggccgtggatgagaccaagaagaagcagtggtgtgccaactgcaagaaggaggccatcttctactgctgctggaacaccagctactgtgactacccctgccagcaggcccactggccagagcacatgaagagctgcacccagagcgccacagccccccagcaggaggctgatgctgaggtgaacacagagaccctgaacaagagcagccagggcagcagcagcagcacccagagcgcccccagcgagacagccagcgccagcaaggagaaggagaccagcgctgagaagagcaaggagagcggcagcaccctggacctgagcggcagccgggagacccccagcagcatcctgctgggcagcaaccagggctctgtgtccaagagatgtgacaagcagcctgcctatgcccccaccaccacagaccaccagccccaccccaactacccagcccagaagtaccacagccgcagcaacaagagctcctggagcagcagtgatgagaagaggggcagcaccaggagtgaccacaacaccagcaccagcaccaagagcctgctgcccaaggagagccggctggacaccttctgggactag

SEQ ID NO: 257796 - DNA, 3567 bp, Artificial Sequence
  derived and/or modified sequence
atgcacccccagagcctggccgaggaggagatcaagaccgagcaggaggtggtggagggcatggacatcagtacccgaagtaaagatccagggtccgcggaacgcacagcccagaaacgcaaatttccgagtccccctcatagtagcaatggccattctccccaggacaccagtacctcccctattaagaaaaagaaaaaacccgggctcttgaactcgaacaataaggagcagtccgaactgaggcatggtccattttactatatgaagcagcccctgacaacagacccggtggatgtcgtgccccaggatggtagaaacgatttctactgttgggtgtgtcatcgcgagggacaggtactgtgttgcgagctctgtccccgcgtgtaccacgcaaagtgtctccgacttactagcgagcccgagggcgactggttctgcccagagtgcgagaagatcacagtggccgaatgtattgagacccaatccaaagcgatgaccatgctaacaattgagcagctatcttacctcctgaaattcgccatccaaaagatgaaacagcccggcaccgatgccttccagaagcccgtacccctggaacaacaccccgattatgcagagtatatcttccatcccatggatctgtgtacgctggaaaagaacgcaaaaaaaaagatgtacggctgtacagaggccttcctagccgatgccaaatggattctgcataactgcataatttacaacggaggcaaccacaaactgacccagatcgcaaaggtggtgattaaaatttgtgaacatgagatgaacgaaatagaggtctgtcccgaatgctatcttgccgcttgccaaaagagagacaactggttttgcgaaccctgttcaaacccccaccctctggtgtgggctaaactaaaagggttccccttctggcccgccaaggcgctcagggacaaagatggacaagttgacgcgagattcttcggtcagcacgacagagcatgggtacccataaacaactgctacttaatgagcaaagaaatcccattctcagttaagaagaccaagtcaatttttaatagcgcaatgcaggagatggaagtttacgtcgagaatatccggagaaagtttggggttttcaactattcaccttttcgcactccttacactcccaacagccaataccagatgctgctcgaccctacgaacccctcagccggaacggccaaaatagacaaacaggaaaaggtgaaactcaatttcgatatgactgcatcccccaagatactgatgagtaagcctgttctctccggagggactgggcggcggataagcctgtccgatatgccacgctccccgatgagcaccaattcatcagtgcacacaggttctgacgttgagcaggacgccgagaagaaggccactagttcccacttttcagcctccgaggaaagcatggattttttggacaaatccactgcctctcctgctagcacaaagaccggtcaggctggctctctgtcaggctcccccaagcccttttccccccagctgagcgcccctattaccaccaagaccgacaagacaagtaccactggtagcattctcaacttgaacctggatagaagcaaggctgagatggatctgaaagagttgtcagaatcggtacagcagcaaagcacccctgtgccattaataagtcctaaaaggcagatcagatctcgctttcagctgaatctggataagactatcgagtcttgcaaggcccaactggggattaacgagattagtgaggacgtatacactgctgtagagcattctgacagcgaagacagcgagaagtccgacagtagcgatagcgagtatatcagcgacgatgaacagaagagcaagaatgagcccgaagatacagaagacaaagagggttgccaaatggataaagagccatcagctgttaaaaagaagccgaagcctaccaaccctgtcgagattaaggaggaactcaaatctacatctccggcttcggagaaggctgaccccggggccgtcaaggacaaagcatctcctgagcctgagaaggatttcagtgagaaggccaagccaagcccacaccctataaaagataaactgaagggtaaagacgagacagacagccctaccgtgcacctggggctagacagtgactcggaaagtgagctggtcatagaccttggcgaggaccacagcgggcgcgaaggacggaagaataaaaaagagcccaaggagccaagccccaagcaggacgtggtggggaagaccccaccttcaaccacagtcggttctcacagccctcccgagacacccgtcttgacccggtcttctgcacagacctctgctgccggcgccacggctacgacatcaacctccagtaccgtcaccgtcacggcccctgcacccgctgccacaggatccccagtgaagaagcaacggcccctgctccccaaagagaccgctcccgcggtgcaacgggtggtctggaattccagtacagtgcagcagaaggaaatcacccagtcaccatccacctccactattactctcgtgacatctactcagtcaagccccctcgtgacgtcgagcggttccatgtccactttggttagtagtgttaatgccgacttaccgatcgccactgcgagcgcggatgtcgctgcagacattgctaaatacacgagcaaaatgatggatgcaattaaaggcacaatgacggaaatctataacgatctctccaaaaatacaacagggtcgacgatcgctgagataagacgtttgaggatcgaaatcgagaagctgcagtggctgcatcaacaggagcttagcgagatgaagcacaatctggagttaacgatggccgaaatgcggcagtctttggagcaagagagggatcgactcattgcggaggttaagaagcagctggaactagaaaaacaacaggctgttgatgagacaaagaagaaacagtggtgcgctaactgcaaaaaggaggccatcttctactgttgttggaatacttcttactgcgattacccctgtcagcaggcacattggcccgagcatatgaagagctgtacccaatctgcaaccgccccacagcaggaagctgacgcggaagtgaataccgagacactaaataagtcatcacagggctcctcttcatctactcagtcagccccttccgaaaccgcttccgcatctaaggaaaaggaaacatccgctgagaaaagcaaagagtccggctctacactggacctgagcggaagtcgggaaacaccctcaagtattctgctaggatccaatcagggaagtgtttccaagcggtgcgataagcagccggcttacgctcctactacgacagatcaccaaccacatccaaattacccagcccagaaatatcattctaggtccaacaaatccagctggtccagctccgatgagaagagagggagcacccgtagcgaccacaacaccagcaccagcaccaagtcactgctcccaaaagagagtaggttggacaccttttgggattag

SEQ ID NO: 257797 - DNA, 3567 bp, Artificial Sequence
  derived and/or modified sequence
atgcatccacagtccctggccgaggaagaaataaagacagagcaggaggtcgttgagggaatggacattagcaccagaagcaaggaccccggatccgcagaaaggaccgcccagaaaagaaaatttcctagcccaccccattcctctaatggtcactcaccccaggatacaagcacaagccccataaaaaagaagaagaaacccggactgctgaactcgaataacaaggagcagtccgagctgagacatggccctttctactacatgaaacagcctctcaccaccgatccagtggacgtggtcccccaagatggccgaaacgacttttattgttgggtgtgccatcgcgaggggcaggtcctgtgctgcgagctatgcccgagggtttaccacgccaaatgtctccgactcacctccgagccagagggagactggttctgtcctgagtgtgaaaagatcacagtggcagagtgtatagagacgcaatccaaagctatgaccatgcttactatagagcagctatcttatctcttaaagtttgctatacaaaagatgaagcagcctggcaccgacgccttccagaaaccagtgccgttggagcaacaccctgattatgccgaatacattttccatcccatggatctctgcaccttggagaagaacgcaaagaagaaaatgtacggctgcaccgaagccttcctcgccgatgctaaatggattctgcacaactgtatcatttacaatgggggaaaccacaaactcacccagatcgccaaggtcgtgatcaagatctgtgaacatgagatgaatgaaattgaggtgtgtccagaatgttacctggctgcttgccagaaacgggataattggttttgcgaaccttgctcaaacccgcacccactggtgtgggccaagctgaaggggttccccttttggccggctaaggctcttcgagacaaagacgggcaggtggatgcaagatttttcgggcagcacgacagggcatgggtacccatcaataactgctacctcatgtctaaagaaattcccttctcagttaagaagaccaagtcaatcttcaacagcgccatgcaggaaatggaggtgtatgttgagaatataaggcgcaagtttggagtcttcaactattcccccttcaggactccttatactccaaattctcagtatcaaatgctgctggatccaacgaacccatctgcaggaactgcaaaaatcgacaagcaggagaaggtcaaactcaactttgacatgaccgccagcccaaaaatactgatgtctaagcccgtactctcgggcggaacaggtagaagaatctcattatcggatatgcccagatcgcccatgtctactaatagcagcgttcataccggctcagacgtggagcaggatgccgaaaagaaagccactagcagccatttctctgcaagcgaggagtccatggacttcctggataagtcaacagcttcccccgcttccacaaagaccggtcaggccggatctttatctggcagccccaagcctttcagtccccaactctcagcccctataacaactaaaactgataagacctcgaccacaggcagtattctcaatctgaatctggataggtcaaaggcagagatggacttgaaggaactgtccgaaagcgtgcaacagcaatcaaccccagtgcccctgattagccccaaacggcagatccgctctaggttccaactgaacctggataagaccatcgagtcttgtaaagctcagctgggcatcaacgagatctctgaggatgtgtacaccgccgtggagcacagtgactccgaggatagcgagaagagtgatagcagcgactcagaatacatttcagatgacgagcaaaagtccaagaacgagcctgaggacaccgaagataaagaggggtgccagatggataaagagccatctgcagttaagaaaaaacctaagccaaccaacccagttgagattaaagaagagctgaaaagtacaagccctgcctccgagaaagctgatccaggagccgtgaaggataaggcctcccccgagcctgagaaggattttagcgaaaaggccaaaccctccccgcacccgattaaagataaactgaaaggaaaggatgaaactgatagccccactgtacatttgggtcttgacagcgactccgaatctgaactggtcattgacctgggcgaggatcattcggggagagagggcagaaagaacaagaaggagcctaaagagcctagccccaagcaagacgtggtcggaaaaaccccaccatccacaaccgttggctcacacagcccaccagaaacacctgtcctcacccggtcaagtgcccagacctctgccgcaggggctactgccaccactagcacttccagcactgttacagtaaccgcccctgccccagcagcaacaggctcccccgtcaagaagcagagacctctactgccaaaagaaacagcccctgcagtacagcgtgttgtctggaactcgagcacagtacagcagaaagaaatcacacagagtcccagcaccagcaccataaccctggtcacatccacccaaagttcccctctcgtcacctcctcagggtcaatgtctaccctcgtctcctctgtgaatgctgatttgcccattgcaaccgcctctgccgatgtcgccgcagacattgcaaagtatactagtaagatgatggacgccatcaaaggtaccatgacagaaatttacaatgacctgagtaagaatacaacaggttcaactattgccgagatacggcgtctccgcatcgaaatcgaaaagctgcagtggttacatcaacaggagctgtccgaaatgaagcacaacttggaactcaccatggcggagatgaggcagtccctcgaacaggaaagggatcggctgattgccgaggtgaagaagcaactcgagctggagaaacagcaggctgtcgacgaaactaaaaaaaaacaatggtgtgctaactgtaaaaaggaggccattttctattgttgctggaacacaagctattgcgattatccctgccagcaggcacactggccagaacacatgaagtcttgcacgcagtccgctaccgcaccccagcaggaggccgacgctgaagtgaacaccgagactctgaacaagagtagccagggcagttcctcaagcacccaatcagctccatcagagacagcctctgcctctaaagagaaggaaactagcgcagagaaaagcaaggaatcgggttctactttagacctcagcgggtctcgagaaacgccttcgtcgatcctgctgggctcaaaccagggctccgtgagtaaaagatgcgataaacagcccgcttacgcgccaactaccaccgatcaccaaccccaccctaattatcctgctcaaaaatatcatagtcggagcaataaatcaagctggagtagtagtgacgaaaaacgcggatcgaccagaagcgaccataatacctcaacatcaaccaagtccctcttaccaaaggagtcccggctggataccttttgggactag

SEQ ID NO: 257798 - DNA, 4142 bp, Artificial Sequence
  derived and/or modified sequence
cggctttacactccgatttgccggggcagccaatcggggatgagcttttattaggcggccagatcatcagccgaagtgccaaaccctttttctgtgagaactaggagcctgtcctccatgttttataagtattgacattacacagtgttaacaatgcatccacagagtcccaaatctgccagcctgttctctcttcctaactgtggaaaaatgagacggttgcttgaacatttgttggcttggctgaagaggaaataaaaacagaacaggaggtggtagagggcatggatatctctactcgctccaaagatcctggctctgcagagagaacagcccagaaaagaaagttccccagccctccacattcttccaatggccactcgccgcaggacacatcaacaagccccattaaaaagaaaaagaaacctggcttactgaacagtaacaataaggagcagtcagaactaagacatggtccgttttactatatgaagcagccactcaccacagaccctgttgatgttgtaccgcaggatggacggaatgatttctactgctgggtttgtcaccgggaaggccaagtcctttgctgtgagctctgtccccgggtttatcacgctaagtgtctgagactgacatcggaaccagagggggactggttttgtcctgaatgtgagaaaattacagtagcagaatgcatcgagacccagagtaaagccatgacaatgctcaccattgaacagttatcctacctgctcaagtttgccattcagaaaatgaaacagccagggacagatgcattccagaagcccgttccattggaacagcaccctgactatgcggaatacatcttccatccaatggacctttgtacattggaaaagaatgcgaaaaagaaaatgtatggctgcacagaagccttcctggctgatgcaaagtggattttgcacaactgcatcatttataatgggggaaatcacaaattgacgcaaatagcgaaagtagtcatcaaaatctgtgaacatgagatgaatgaaatcgaagtatgtccagaatgttatctagctgcttgccaaaaacgagataactggttttgtgagccttgtagcaatccacatcctttggtctgggccaaactgaaggggtttccattctggcctgcaaaagctctaagggataaagacgggcaggtcgatgcccgattctttggacaacatgacagggcctgggttccaataaataattgctacctcatgtctaaagaaattcctttttctgtgaaaaagactaagagcatcttcaacagtgccatgcaagagatggaggtttacgtggagaacatccgcaggaagtttggggtttttaattactctccatttaggacaccctacacacccaacagccagtatcaaatgctgctcgatcccaccaaccccagcgccggcactgccaagatagacaagcaggagaaggtcaagctcaactttgacatgacggcatcccccaagatcctgatgagcaagcctgtgctgagtgggggcacaggccgccggatttccttgtcggatatgccgcgctcccccatgagcacaaactcttctgtgcacacgggctccgacgtggagcaggatgctgagaagaaggccacgtcgagccacttcagtgcgagcgaggagtccatggacttcctggataagagcacagcttcaccagcctccaccaagacgggacaagcagggagtttatccggcagcccaaagcccttctctcctcaactgtcagctcctatcacgacgaaaacggacaaaacctccaccaccggcagcatcctgaatcttaacctgggtcatcgaagcaaagctgagatggatttgaaggagctgagcgagtcggtccagcaacagtccacccctgttcctctcatctctcccaagcgccagattcgtagcaggttccagctgaatcttgacaagaccatagagagttgcaaagcacaattaggcataaatgaaatctcggaagatgtctatacggccgtagagcacagcgattcggaggattctgagaagtcagatagtagcgatagtgagtatatcagtgatgatgagcagaagtctaagaacgagccagaagacacagaggacaaagaaggttgtcagatggacaaagagccatctgctgttaaaaaaaagcccaagcctacaaacccagtggagattaaagaggagctgaaaagcacgtcaccagccagcgagaaggcagaccctggagcagtcaaggacaaggccagccctgagcctgagaaggacttttccgaaaaggcaaaaccttcacctcaccccataaaggataaactgaagggaaaagatgagacggattccccaacagtccatttgggcctggactctgattcagagagcgaacttgtcatagatttaggagaagaccattctgggcgggagggtcgaaaaaataagaaggaacccaaagaaccatctcccaaacaggatgttgtaggtaaaactccaccatccacgacggtgggcagccattctcccccggaaacaccggtgctcacccgctcttccgcccaaacttccgcggctggcgccacagccaccaccagcacgtcctccacggtcaccgtcacggccccggcccccgccgccacaggaagcccagtgaaaaagcagaggccgcttttaccgaaggagactgccccggccgtgcagcgggtcgtgtggaactcatcaactgtccagcagaaggagatcacacagagcccatccacgtccaccatcaccctggtgaccagcacacagtcatcgcccctggtcaccagctcggggtccatgagcacccttgtgtcctcagtcaacgctgacctgcccatcgccactgcctcagctgatgtcgccgctgatattgccaagtacactagcaaaatgatggatgcaataaaaggaacaatgacagaaatatacaacgatctttctaaaaacactactggaagcacaatagctgagattcgcaggctgaggatcgagatagagaagctccagtggctgcaccagcaagagctctccgaaatgaaacacaacttagagctgaccatggcggagatgcggcagagcctggagcaggagcgggaccggctcatcgccgaggtgaagaagcagctggagttggagaagcagcaggcggtggatgagaccaagaagaagcagtggtgcgccaactgcaagaaggaggccatcttttactgctgttggaacactagctactgtgactacccctgccagcaagcccactggcctgagcacatgaagtcctgcacccagtcagctactgctcctcagcaggaagcggatgctgaggtgaacacagaaacactaaataagtcctcccaggggagctcctcgagcacacaatcagcaccttcagaaacggccagcgcctccaaagagaaggagacgtcagctgagaaaagcaaggagagtggctcgacccttgacctttctggctccagagagacgccctcctccattctcttaggctccaaccaaggctctgttagcaaaaggtgtgacaagcaacctgcctatgccccaaccaccacagaccaccagccgcaccccaactaccccgcccagaagtaccattcccggagtaataaatccagttggagcagcagtgatgagaagaggggatcgacacgttccgatcacaacaccagtaccagcacgaagagcctcctcccgaaagagtctcggctggacaccttctgggactagcagtgaatcgggacacaaaccacccaccccattgggagaaaaacccagacgccaggaaaagaagaaacaacaaaggcaggagaacagccactttcagacttgaaaatgacaaaaccctcagttgagcctgagcccccggcgcgggggctgctacactacaggacacccagcatcggctttgactgcagactgttcacccacacgagccctgtgcttttggtgtaaataatgtacaatttgtggatgtcattgaatctagaggactttcccctttttatatttgtattaactttaacttattaaaaaaaaaaaaagaaaaagaaaaacgatttaaaaaaaaaaaaaaaa

SEQ ID NO: 257799 - DNA, 3567 bp, Artificial Sequence
  derived and/or modified sequence
atgcatccacagagcttggctgaagaggaaataaaaacagaacaggaggtggtagagggcatggatatctctactcgctccaaagatcctggctctgcagagagaacagcccagaaaagaaagttccccagccctccacattcttccaatggccactcgccgcaggacacatcaacaagccccattaaaaagaaaaagaaacctggcttactgaacagtaacaataaggagcagtcagaactaagacatggtccgttttactatatgaagcagccactcaccacagaccctgttgatgttgtaccgcaggatggacggaatgatttctactgctgggtttgtcaccgggaaggccaagtcctttgctgtgagctctgtccccgggtttatcacgctaagtgtctgagactgacatcggaaccagagggggactggttttgtcctgaatgtgagaaaattacagtagcagaatgcatcgagacccagagtaaagccatgacaatgctcaccattgaacagttatcctacctgctcaagtttgccattcagaaaatgaaacagccagggacagatgcattccagaagcccgttccattggaacagcaccctgactatgcggaatacatcttccatccaatggacctttgtacattggaaaagaatgcgaaaaagaaaatgtatggctgcacagaagccttcctggctgatgcaaagtggattttgcacaactgcatcatttataatgggggaaatcacaaattgacgcaaatagcgaaagtagtcatcaaaatctgtgaacatgagatgaatgaaatcgaagtatgtccagaatgttatctagctgcttgccaaaaacgagataactggttttgtgagccttgtagcaatccacatcctttggtctgggccaaactgaaggggtttccattctggcctgcaaaagctctaagggataaagacgggcaggtcgatgcccgattctttggacaacatgacagggcctgggttccaataaataattgctacctcatgtctaaagaaattcctttttctgtgaaaaagactaagagcatcttcaacagtgccatgcaagagatggaggtttacgtggagaacatccgcaggaagtttggggtttttaattactctccatttaggacaccctacacacccaacagccagtatcaaatgctgctcgatcccaccaaccccagcgccggcactgccaagatagacaagcaggagaaggtcaagctcaactttgacatgacggcatcccccaagatcctgatgagcaagcctgtgctgagtgggggcacaggccgccggatttccttgtcggatatgccgcgctcccccatgagcacaaactcttctgtgcacacgggctccgacgtggagcaggatgctgagaagaaggccacgtcgagccacttcagtgcgagcgaggagtccatggacttcctggataagagcacagcttcaccagcctccaccaagacgggacaagcagggagtttatccggcagcccaaagcccttctctcctcaactgtcagctcctatcacgacgaaaacggacaaaacctccaccaccggcagcatcctgaatcttaacctggatcgaagcaaagctgagatggatttgaaggagctgagcgagtcggtccagcaacagtccacccctgttcctctcatctctcccaagcgccagattcgtagcaggttccagctgaatcttgacaagaccatagagagttgcaaagcacaattaggcataaatgaaatctcggaagatgtctatacggccgtagagcacagcgattcggaggattctgagaagtcagatagtagcgatagtgagtatatcagtgatgatgagcagaagtctaagaacgagccagaagacacagaggacaaagaaggttgtcagatggacaaagagccatctgctgttaaaaaaaagcccaagcctacaaacccagtggagattaaagaggagctgaaaagcacgtcaccagccagcgagaaggcagaccctggagcagtcaaggacaaggccagccctgagcctgagaaggacttttccgaaaaggcaaaaccttcacctcaccccataaaggataaactgaagggaaaagatgagacggattccccaacagtccatttgggcctggactctgattcagagagcgaacttgtcatagatttaggagaagaccattctgggcgggagggtcgaaaaaataagaaggaacccaaagaaccatctcccaaacaggatgttgtaggtaaaactccaccatccacgacggtgggcagccattctcccccggaaacaccggtgctcacccgctcttccgcccaaacttccgcggctggcgccacagccaccaccagcacgtcctccacggtcaccgtcacggccccggcccccgccgccacaggaagcccagtgaaaaagcagaggccgcttttaccgaaggagactgccccggccgtgcagcgggtcgtgtggaactcatcaactgtccagcagaaggagatcacacagagcccatccacgtccaccatcaccctggtgaccagcacacagtcatcgcccctggtcaccagctcggggtccatgagcacccttgtgtcctcagtcaacgctgacctgcccatcgccactgcctcagctgatgtcgccgctgatattgccaagtacactagcaaaatgatggatgcaataaaaggaacaatgacagaaatatacaacgatctttctaaaaacactactggaagcacaatagctgagattcgcaggctgaggatcgagatagagaagctccagtggctgcaccagcaagagctctccgaaatgaaacacaacttagagctgaccatggcggagatgcggcagagcctggagcaggagcgggaccggctcatcgccgaggtgaagaagcagctggagttggagaagcagcaggcggtggatgagaccaagaagaagcagtggtgcgccaactgcaagaaggaggccatcttttactgctgttggaacactagctactgtgactacccctgccagcaagcccactggcctgagcacatgaagtcctgcacccagtcagctactgctcctcagcaggaagcggatgctgaggtgaacacagaaacactaaataagtcctcccaggggagctcctcgagcacacaatcagcaccttcagaaacggccagcgcctccaaagagaaggagacgtcagctgagaaaagcaaggagagtggctcgacccttgacctttctggctccagagagacgccctcctccattctcttaggctccaaccaaggctctgttagcaaaaggtgtgacaagcaacctgcctatgccccaaccaccacagaccaccagccgcaccccaactaccccgcccagaagtaccattcccggagtaataaatccagttggagcagcagtgatgagaagaggggatcgacacgttccgatcacaacaccagtaccagcacgaagagcctcctcccgaaagagtctcggctggacaccttctgggactag

SEQ ID NO: 257800 - protein, 1135 aa, Artificial Sequence
  derived and/or modified sequence
MHPQSLAEEEIKTEQEVVEGMDISTRSKDPGSAERTAQKRKFPSPPHSSNGHSPQDTSTSPIKKKKKPGLLNSNNKEQDGRNDFYCWVCHREGQVLCCELCPRVYHAKCLRLTSEPEGDWFCPECEKITVAECIETQSKAMTMLTIEQLSYLLKFAIQKMKQPGTDAFQKPVPLEQHPDYAEYIFHPMDLCTLEKNAKKKMYGCTEAFLADAKWILHNCIIYNGGNHKLTQIAKVVIKICEHEMNEIEVCPECYLAACQKRDNWFCEPCSNPHPLVWAKLKGFPFWPAKALRDKDGQVDARFFGQHDRAWVPINNCYLMSKEIPFSVKKTKSIFNSAMQEMEVYVENIRRKFGVFNYSPFRTPYTPNSQYQMLLDPTNPSAGTAKIDKQEKVKLNFDMTASPKILMSKPVLSGGTGRRISLSDMPRSPMSTNSSVHTGSDVEQDAEKKATSSHFSASEESMDFLDKSTASPASTKTGQAGSLSGSPKPFSPQLSAPITTKTDKTSTTGSILNLNLDRSKAEMDLKELSESVQQQSTPVPLISPKRQIRSRFQLNLDKTIESCKAQLGINEISEDVYTAVEHSDSEDSEKSDSSDSEYISDDEQKSKNEPEDTEDKEGCQMDKEPSAVKKKPKPTNPVEIKEELKSTSPASEKADPGAVKDKASPEPEKDFSEKAKPSPHPIKDKLKGKDETDSPTVHLGLDSDSESELVIDLGEDHSGREGRKNKKEPKEPSPKQDVVGKTPPSTTVGSHSPPETPVLTRSSAQTSAAGATATTSTSSTVTVTAPAPAATGSPVKKQRPLLPKETAPAVQRVVWNSSTVQQKEITQSPSTSTITLVTSTQSSPLVTSSGSMSTLVSSVNADLPIATASADVAADIAKYTSKMMDAIKGTMTEIYNDLSKNTTGSTIAEIRRLRIEIEKLQWLHQQELSEMKHNLELTMAEMRQSLEQERDRLIAEVKKQLELEKQQAVDETKKKQWCANCKKEAIFYCCWNTSYCDYPCQQAHWPEHMKSCTQSATAPQQEADAEVNTETLNKSSQGSSSSTQSAPSETASASKEKETSAEKSKESGSTLDLSGSRETPSSILLGSNQGSDHSRSNKSSWSSSDEKRGSTRSDHNTSTSTKSLLPKESRLDTFWD

SEQ ID NO: 257801 - DNA, 3408 bp, Artificial Sequence
  derived and/or modified sequence
atgcacccccagagcctggccgaggaggagatcaagaccgagcaggaggtggtggagggcatggacatcagcaccagaagcaaggaccccggcagcgccgagagaaccgcccagaagagaaagttccccagccccccccacagcagcaacggccacagcccccaggacaccagcaccagccccatcaagaagaagaagaagcccggcctgctgaacagcaacaacaaggagcaggacggcagaaacgacttctactgctgggtgtgccacagagagggccaggtgctgtgctgcgagctgtgccccagagtgtaccacgccaagtgcctgagactgaccagcgagcccgagggcgactggttctgccccgagtgcgagaagatcaccgtggccgagtgcatcgagacccagagcaaggccatgaccatgctgaccatcgagcagctgagctacctgctgaagttcgccatccagaagatgaagcagcccggcaccgacgccttccagaagcccgtgcccctggagcagcaccccgactacgccgagtacatcttccaccccatggacctgtgcaccctggagaagaacgccaagaagaagatgtacggctgcaccgaggccttcctggccgacgccaagtggatcctgcacaactgcatcatctacaacggcggcaaccacaagctgacccagatcgccaaggtggtgatcaagatctgcgagcacgagatgaacgagatcgaggtgtgccccgagtgctacctggccgcctgccagaagagagacaactggttctgcgagccctgcagcaacccccaccccctggtgtgggccaagctgaagggcttccccttctggcccgccaaggccctgagagacaaggacggccaggtggacgccagattcttcggccagcacgacagagcctgggtgcccatcaacaactgctacctgatgagcaaggagatccccttcagcgtgaagaagaccaagagcatcttcaacagcgccatgcaggagatggaggtgtacgtggagaacatcagaagaaagttcggcgtgttcaactacagccccttcagaaccccctacacccccaacagccagtaccagatgctgctggaccccaccaaccccagcgccggcaccgccaagatcgacaagcaggagaaggtgaagctgaacttcgacatgaccgccagccccaagatcctgatgagcaagcccgtgctgagcggcggcaccggcagaagaatcagcctgagcgacatgcccagaagccccatgagcaccaacagcagcgtgcacaccggcagcgacgtggagcaggacgccgagaagaaggccaccagcagccacttcagcgccagcgaggagagcatggacttcctggacaagagcaccgccagccccgccagcaccaagaccggccaggccggcagcctgagcggcagccccaagcccttcagcccccagctgagcgcccccatcaccaccaagaccgacaagaccagcaccaccggcagcatcctgaacctgaacctggacagaagcaaggccgagatggacctgaaggagctgagcgagagcgtgcagcagcagagcacccccgtgcccctgatcagccccaagagacagatcagaagcagattccagctgaacctggacaagaccatcgagagctgcaaggcccagctgggcatcaacgagatcagcgaggacgtgtacaccgccgtggagcacagcgacagcgaggacagcgagaagagcgacagcagcgacagcgagtacatcagcgacgacgagcagaagagcaagaacgagcccgaggacaccgaggacaaggagggctgccagatggacaaggagcccagcgccgtgaagaagaagcccaagcccaccaaccccgtggagatcaaggaggagctgaagagcaccagccccgccagcgagaaggccgaccccggcgccgtgaaggacaaggccagccccgagcccgagaaggacttcagcgagaaggccaagcccagcccccaccccatcaaggacaagctgaagggcaaggacgagaccgacagccccaccgtgcacctgggcctggacagcgacagcgagagcgagctggtgatcgacctgggcgaggaccacagcggcagagagggcagaaagaacaagaaggagcccaaggagcccagccccaagcaggacgtggtgggcaagaccccccccagcaccaccgtgggcagccacagcccccccgagacccccgtgctgaccagaagcagcgcccagaccagcgccgccggcgccaccgccaccaccagcaccagcagcaccgtgaccgtgaccgcccccgcccccgccgccaccggcagccccgtgaagaagcagagacccctgctgcccaaggagaccgcccccgccgtgcagagagtggtgtggaacagcagcaccgtgcagcagaaggagatcacccagagccccagcaccagcaccatcaccctggtgaccagcacccagagcagccccctggtgaccagcagcggcagcatgagcaccctggtgagcagcgtgaacgccgacctgcccatcgccaccgccagcgccgacgtggccgccgacatcgccaagtacaccagcaagatgatggacgccatcaagggcaccatgaccgagatctacaacgacctgagcaagaacaccaccggcagcaccatcgccgagatcagaagactgagaatcgagatcgagaagctgcagtggctgcaccagcaggagctgagcgagatgaagcacaacctggagctgaccatggccgagatgagacagagcctggagcaggagagagacagactgatcgccgaggtgaagaagcagctggagctggagaagcagcaggccgtggacgagaccaagaagaagcagtggtgcgccaactgcaagaaggaggccatcttctactgctgctggaacaccagctactgcgactacccctgccagcaggcccactggcccgagcacatgaagagctgcacccagagcgccaccgccccccagcaggaggccgacgccgaggtgaacaccgagaccctgaacaagagcagccagggcagcagcagcagcacccagagcgcccccagcgagaccgccagcgccagcaaggagaaggagaccagcgccgagaagagcaaggagagcggcagcaccctggacctgagcggcagcagagagacccccagcagcatcctgctgggcagcaaccagggcagcgaccacagcagaagcaacaagagcagctggagcagcagcgacgagaagagaggcagcaccagaagcgaccacaacaccagcaccagcaccaagagcctgctgcccaaggagagcagactggacaccttctgggactag

SEQ ID NO: 257802 - DNA, 3408 bp, Artificial Sequence
  derived and/or modified sequence
atgcatccccagtcattggctgaggaggagataaagaccgagcaggaagtggttgagggtatggatatatccactagaagcaaagatccaggatccgccgagaggactgctcagaagagaaagtttccatcaccaccacatagcagtaacggacactctccacaggacaccagtacttctcccatcaagaaaaaaaagaagccaggactactgaatagtaacaacaaggagcaagatgggagaaatgacttctactgctgggtgtgccatagagaaggacaggtgctgtgttgtgaattgtgtcccagggtttatcacgccaaatgcctgaggctgacctcggaaccagaaggggactggttctgccccgagtgcgagaagataaccgtcgctgaatgcatagaaacacaatcaaaggctatgactatgctcacgatagaacagctgtcatacctgctcaaatttgcaattcagaaaatgaagcaacccggaactgatgcttttcagaagcccgtgcctttggagcagcacccagactacgccgaatatatctttcaccctatggacttatgcactctggaaaaaaatgctaagaagaaaatgtatggttgtaccgaagcatttcttgctgacgctaagtggatcttgcacaactgtatcatctacaatggaggcaaccataagctcacacagatcgctaaggtggtgatcaaaatatgtgaacacgagatgaatgaaatcgaagtctgccccgaatgctatcttgcggcctgtcagaaacgggataactggttctgcgaaccatgcagtaaccctcatcctctcgtttgggctaaactaaaagggttcccattttggcctgctaaagcactacgggacaaggatggccaggtggacgcccgattcttcggccagcacgatcgggcctgggtcccgatcaataattgttacctgatgagcaaagaaatcccattcagcgtcaagaagacgaagagcatcttcaactccgcaatgcaagaaatggaggtctacgtggagaatatacgacgcaaatttggggtctttaactactcccccttccgcactccttatacccccaacagtcagtaccagatgcttctggacccgactaaccctagcgcgggaacagcaaagatcgataagcaggaaaaggtcaagctgaatttcgatatgaccgccagccccaagattctcatgtcaaaacccgtgctgtctggcggcacaggacgaagaatctctctaagtgatatgccccggtccccaatgtctacaaattctagcgtacataccggctctgatgtggaacaagacgctgagaagaaagccacgagttctcacttctcggcatccgaggagtctatggattttctggataagtcaacagcgtcccccgcatcaaccaaaaccggtcaggcgggatcactaagcggaagtcctaaaccttttagtccacagttgagcgcccctattacgacaaagacagataagacgagtacaactggatctatcttaaatctgaatctggacagatccaaagcagaaatggatttaaaggagctttccgaaagcgtgcaacagcagtccacccctgtcccgttgatttctcctaagaggcaaatccggtcccggtttcaattaaacctggataagactattgaatcatgtaaagcacagttgggaattaatgagatttccgaggacgtgtacacggcggtggagcactccgatagcgaggacagcgagaagagcgatagttccgacagcgaatatatttccgatgatgaacagaagtctaagaacgaacccgaggacaccgaagacaaggaggggtgccagatggacaaagaaccctcagccgtgaagaagaaacccaaacccaccaatccggtggagattaaggaagagttaaaatccacatccccagcaagcgaaaaggccgatcctggggctgtcaaagacaaagcttcacctgaacccgaaaaagactttagcgagaaggcaaaaccttccccccatcctatcaaagacaagttaaaggggaaggatgagaccgactcaccaaccgtacacctggggctcgattctgactccgaaagcgagttggtgatcgatctaggcgaggatcactcaggccgagaggggagaaagaataaaaaggagcctaaggaaccaagccccaaacaggatgttgtcggcaagaccccccctagtactaccgttgggagtcattcacccccagaaaccccagtgcttacacggtcttctgcccaaacctctgcagccggcgccaccgctaccacgtccacctccagtactgttaccgtcactgctcctgctcccgcggctactggcagccctgttaagaaacagcgacctctactgcccaaagagaccgcacctgcggttcaaagggtcgtctggaactccagcacagtacaacagaaggagattacccagagtccctccaccagcaccataacgctggttacctcgacgcagagttcaccgttggtaacctccagtggatcaatgtcaacgcttgtgtccagcgtaaatgcagacctgcctattgccacagcaagtgctgatgtagctgctgatatagcgaagtacacttcaaagatgatggacgccattaagggaactatgactgagatttacaacgacctgagcaagaacacaactggaagcaccattgcggagatacggagactgcggattgaaatcgagaaattgcagtggctgcaccaacaggagcttagtgaaatgaaacataatctggaactgactatggccgaaatgcggcagtccttggagcaggagcgcgacaggctgatcgccgaagtcaagaaacagctggagcttgaaaaacaacaggctgttgatgagaccaagaagaaacagtggtgcgccaattgtaagaaggaggcaatcttctattgttgctggaacacttcatactgcgactacccctgccaacaggcgcactggccggaacacatgaaaagctgtacacaatctgctactgcaccacagcaggaggcggacgctgaggtgaatacagagaccctgaacaagtctagtcagggttcctcgagttccactcagtccgcaccttctgagactgccagcgcgtcaaaagagaaagagactagcgcagaaaagagcaaggagagcggcagtaccttggacctgtcagggagccgagaaactccttccagcattctcttgggctctaatcaaggcagtgatcacagccggtccaacaaaagcagctggtcaagtagcgatgaaaagagaggttctacaagaagcgatcataacacatccacttcaaccaagagcttactcccgaaggagtcccgattggatacgttctgggactag

SEQ ID NO: 257803 - DNA, 3408 bp, Artificial Sequence
  derived and/or modified sequence
atgcacccccagagcctggccgaggaggagatcaagacagagcaggaggtggtggagggcatggacatcagcaccaggagcaaggaccccggcagcgctgagaggacagcccagaagaggaagttccccagccccccccacagcagcaatggccacagcccccaggacaccagcaccagccccatcaagaagaagaagaagccaggcctgctgaacagcaacaacaaggagcaggatggaagaaatgacttctactgctgggtgtgccaccgggagggccaggtgctgtgctgtgagctgtgcccccgggtgtaccacgccaagtgcctgcggctgaccagcgagcctgagggggactggttctgcccagaatgtgagaagatcaccgtggccgagtgcatcgagacccagagcaaggccatgaccatgctgaccatcgagcagctgagctacctgctgaagtttgccatccagaagatgaagcagcctggaacagatgccttccagaagcctgtgcccctggagcagcacccagactatgcagagtacatcttccaccccatggacctgtgcaccctggagaagaatgccaagaagaagatgtatggctgcacagaggccttcctggctgatgccaagtggatcctgcacaactgcatcatctacaatggaggcaaccacaagctgacccagatcgccaaggtggtgatcaagatctgtgagcacgagatgaatgaaattgaggtgtgcccagagtgctacctggccgcctgccagaagagggacaactggttctgtgagccctgcagcaacccccaccccctggtgtgggccaagctgaagggcttccccttctggccagccaaggccctgcgggacaaggatggccaggtggatgcccgcttcttcggccagcacgaccgggcctgggtgcccatcaacaactgctacctgatgagcaaggagatccccttctctgtgaagaagaccaagagcatcttcaacagcgccatgcaggagatggaggtgtatgtggagaacatccggaggaagtttggagtcttcaactacagccccttccgcaccccctacacccccaacagccagtaccagatgctgctggaccccaccaaccccagcgctggaacagccaagattgacaagcaggagaaggtgaagctgaactttgacatgacagccagccccaagatcctgatgagcaagcctgtgctgagcggcggcactggaagacgcatcagcctgagtgacatgcccaggagccccatgagcaccaacagctctgtgcacactggaagtgatgtggagcaggatgctgagaagaaggccaccagcagccacttcagcgccagcgaggagagcatggacttcctggacaagagcacagccagccctgccagcaccaagacaggccaggccggcagcctgagcggcagccccaagcccttcagcccccagctgagcgcccccatcaccaccaagacagacaagaccagcaccaccggcagcatcctgaacctgaacctggacaggagcaaggccgagatggacctgaaggagctgtctgagagcgtgcagcagcagagcacccctgtgcccctcatcagccccaagaggcagatccgcagccgcttccagctgaacctggacaagaccatcgagagctgcaaggcccagctgggcatcaatgagatcagtgaagatgtgtacacagctgtggagcacagcgacagtgaagattctgagaagagtgacagcagtgacagcgagtacatcagtgatgatgagcagaagagcaagaatgaacctgaggacacagaggacaaggagggctgccagatggacaaggagcccagcgctgtgaagaagaagcccaagcccaccaaccctgtggagatcaaggaggagctgaagagcaccagccctgccagcgagaaggctgaccctggagctgtgaaggacaaggccagccctgagcctgagaaggacttcagcgagaaggccaagcccagcccccaccccatcaaggacaagctgaagggcaaggatgaaacagacagccccaccgtgcacctgggcctggacagcgacagcgagagcgagctggtgattgacctgggggaggaccacagcggccgggagggcaggaagaacaagaaggagcccaaggagcccagccccaagcaggatgtggtgggcaagaccccacccagcaccaccgtgggcagccacagccccccagagacccctgtgctgaccaggagcagcgcccagaccagcgctgctggggccacagccaccaccagcaccagcagcacagtgacagtgacagccccagccccagctgccaccggcagccctgtgaagaagcagaggcccctgctgcccaaggagacagccccagctgtgcagagggtggtgtggaacagcagcacagtgcagcagaaggagatcacccagagccccagcaccagcaccatcaccctggtgaccagcacccagagcagccccctggtgaccagcagcggctccatgagcaccctggtgtcctctgtgaatgctgacctgcccatcgccacagccagcgcagatgtggccgctgacatcgccaagtacaccagcaagatgatggatgccatcaagggcaccatgacagagatctacaatgacctgagcaagaacaccaccggcagcaccatcgccgagatccggcggctgcgcatcgagattgagaagctgcagtggctgcaccagcaggagctgtctgagatgaagcacaacctggagctgaccatggccgagatgaggcagagcctggagcaggagcgggaccggctgattgctgaggtgaagaagcagctggagctggagaagcagcaggccgtggatgagaccaagaagaagcagtggtgtgccaactgcaagaaggaggccatcttctactgctgctggaacaccagctactgtgactacccctgccagcaggcccactggccagagcacatgaagagctgcacccagagcgccacagccccccagcaggaggctgatgctgaggtgaacacagagaccctgaacaagagcagccagggcagcagcagcagcacccagagcgcccccagcgagacagccagcgccagcaaggagaaggagaccagcgctgagaagagcaaggagagcggcagcaccctggacctgagcggcagccgggagacccccagcagcatcctgctgggcagcaaccagggcagtgaccacagccgcagcaacaagagctcctggagcagcagtgatgagaagaggggcagcaccaggagtgaccacaacaccagcaccagcaccaagagcctgctgcccaaggagagccggctggacaccttctgggactag

SEQ ID NO: 257804 - DNA, 3408 bp, Artificial Sequence
  derived and/or modified sequence
atgcacccccagagcctggccgaggaggagatcaagaccgagcaggaggtggtcgagggcatggatatttccacacgcagtaaagatccgggatctgccgaacgcaccgcacagaaacggaagttcccatctcccccacattcctctaacggccatagcccacaggatacatctacatctccgattaaaaagaaaaagaagcctggcttgctcaactcgaacaacaaggaacaggatggccggaacgacttttactgttgggtgtgccatagagaagggcaggtcctctgttgcgaactgtgccctcgcgtataccacgctaaatgcctgagactgacatctgaaccagagggagattggttctgtccagagtgcgagaaaatcaccgtcgctgagtgtattgaaactcaaagtaaagctatgacgatgctgactatcgaacagttatcctatctactgaagttcgcaatacagaagatgaagcaaccaggaactgacgcctttcagaaacccgttccgctcgagcagcatcctgactacgccgagtacattttccaccccatggacctgtgcactttggagaagaatgcaaagaagaagatgtatggctgtaccgaggcattcctggctgatgccaagtggatacttcacaactgtataatttacaacggagggaatcataaattgacgcagatcgctaaggtcgtgatcaaaatttgcgagcatgagatgaatgagatcgaggtgtgccctgagtgctacctggccgcctgccagaaacgcgataattggttttgtgagccgtgttcaaatccccatcccttggtttgggcaaagctgaaaggtttccccttctggccagcaaaagccctcagggacaaagacgggcaggttgatgctaggtttttcggccaacatgaccgtgcctgggtgcccatcaacaattgctatctcatgtccaaggagattccattctccgtgaaaaagaccaaatctatcttcaactctgctatgcaggaaatggaagtctatgtggaaaacattcgacgcaaattcggagtcttcaattactcgccctttaggactccttacacccccaattcccagtaccaaatgctacttgaccctaccaacccttctgctggtacggccaaaatcgataagcaggaaaaagtgaaactaaattttgatatgacagccagcccgaagattctgatgagcaaacccgtgctgtccggtggaaccgggcgaagaatcagtctcagtgacatgccaagaagcccaatgtcaacaaactcgtcggtacataccggttcagacgtggaacaggatgccgagaaaaaggccacatccagtcacttttctgcttccgaagagtctatggactttctggataagagcactgcatcccccgccagcactaaaactgggcaggctggtagtttgtcaggatctcctaagcctttctcacctcagctgagcgctcctattactactaagaccgataaaaccagcactactggctccatcctcaatcttaacctcgatcggagcaaagccgagatggatctgaaggaattatcagaatccgtccaacagcagagcacacctgttccattgatatcaccgaagaggcagattagaagccggtttcagctgaacttagataaaacgatcgaatcatgcaaggcccagctgggtatcaacgagatcagcgaagacgtgtacaccgctgtcgagcactccgactccgaggactcagagaagagcgacagttccgacagtgaatacatctctgatgacgagcaaaaatccaagaacgagcctgaagacacagaggataaggaaggttgtcagatggacaaagagccttctgcagttaagaaaaaacctaagcctacgaatcccgtcgagatcaaagaagagcttaaatcgacctcgccagccagtgaaaaggcagatccaggcgcagtgaaggataaagccagccctgagccggagaaggattttagcgagaaagcaaagccctcaccacaccctataaaggacaaattaaaggggaaggatgaaacagatagtccgacagttcatcttggccttgactcagattcagagagtgaactcgtgatcgacctgggtgaagaccatagcggcagagagggacgtaaaaacaagaaagagccaaaggagccctctccaaagcaggatgtggtaggtaaaacccctccttcaaccaccgtgggatcccatagtcccccggaaacacccgttctgactaggagtagcgctcaaaccagcgcagctggagcaactgcgacgacgtccacatctagtacagtgaccgttaccgcacctgccccagcagccacaggatcccctgtgaagaagcagagaccactactaccaaaggagaccgctccagccgtacaacgagtggtctggaactctagcacagtccagcaaaaggaaatcacacagtctccatccacttccacgattactttggtcacttcaacacaatcttcccctctggtaacatcatctgggtcgatgtcaacccttgtttcttccgtcaatgccgatctgcctattgccaccgcaagcgcggatgtggccgccgatatcgctaaatatacgagtaagatgatggatgccattaaggggaccatgactgagatctataacgacctatcaaaaaataccacagggtcaacaattgccgaaatcagacgtttgagaatcgagatagaaaaactccagtggctccatcagcaagagttatcagaaatgaagcataatttagaattaactatggcagagatgcgtcagagcctggagcaggaaagggatcgactgatcgctgaggtcaagaagcagttagagctggagaagcaacaagccgtcgacgagaccaagaaaaaacagtggtgtgcgaattgcaaaaaggaggccatcttctactgctgttggaatacgagctactgtgattacccctgccagcaagcccactggcctgaacacatgaaaagttgtacccaaagcgccaccgcgcctcaacaagaggccgacgcggaggtaaacaccgagactctcaacaaatcatctcagggcagctctagcagcacccagtctgccccctctgagaccgcgtctgcaagtaaggagaaagagacatccgccgagaaatcaaaggaatcaggcagcacactagacctatctggttctagggagaccccgtcatccattttgctgggctctaatcaggggagcgaccatagccgttcaaacaaatccagttggagcagcagtgatgaaaagagaggttctacacggtcagaccataatacatccacttcaaccaagagccttcttccgaaagagtcacgtttggacactttttgggattag

SEQ ID NO: 257805 - DNA, 3408 bp, Artificial Sequence
  derived and/or modified sequence
atgcatcctcagtcgcttgcagaggaagaaatcaaaacggaacaggaggtggtggaagggatggatatcagcaccaggagcaaagacccaggttcagcagagcgcacggcccaaaagcggaagttcccatctccgccacactcttccaacgggcattccccccaggacaccagtacatctcccatcaaaaagaagaaaaagcccggactgctcaattcaaataacaaggaacaagatggaagaaatgacttctattgttgggtgtgccacagagaggggcaggtgctgtgttgtgagctgtgccccagagtgtaccatgctaagtgtttgcggctgacctccgaaccagagggagattggttttgtccagagtgcgaaaagatcacagtcgctgaatgcattgaaacccagtcaaaagccatgaccatgctcactattgaacagttatcctatcttttgaagtttgcaatacagaagatgaagcagcctggaacggacgcatttcagaaaccagtgccactagagcagcacccagattatgctgagtacattttccacccgatggatttatgcaccttggagaagaacgcaaagaaaaagatgtacggctgtacagaggcatttctcgccgatgcaaaatggatactgcacaattgtatcatatacaatggcggaaaccataagctgacccagatcgcgaaggtggtcataaagatctgtgaacacgaaatgaatgaaattgaagtgtgtcccgagtgttaccttgccgcttgccagaagagggataactggttctgtgaaccctgttccaaccctcaccctctcgtatgggccaagctcaagggtttcccattttggcccgctaaagctcttcgcgataaggatggccaagtagatgctcggttttttggacagcacgaccgcgcatgggtccccataaacaactgctatcttatgagcaaagaaatacctttcagcgtgaagaagactaagagcatcttcaattccgctatgcaagagatggaagtgtacgtggagaacattcgtcgcaagttcggcgtttttaattacagtccatttcggacaccgtatacgccaaactctcagtaccagatgctcctggacccgactaacccctcggctgggacagcaaagattgataagcaggagaaggtgaagcttaacttcgacatgactgcttcacctaagatcttaatgagtaagccagttctttctgggggtactggacggagaatctctctctctgacatgccacgatcaccaatgtccaccaattcctcggttcatactggctcagatgtggagcaggatgcggaaaaaaaggcgacaagctcacattttagtgccagcgaagaatccatggactttctggataagtccacggcatcacccgctagtacaaaaacaggtcaagcagggtctctgtccggctctcctaagccattttccccgcagttgagtgctcctatcaccacaaaaacggacaagactagcaccacggggtccatcttgaaccttaatctggataggtccaaagcagagatggatttaaaggaattgtctgagtcagtgcagcagcagagtacacccgtgcccctgatttcccctaagcggcagatcagatcacgattccaacttaatttggataagactatcgagtcctgcaaggctcagcttggcattaatgagatatccgaggatgtgtataccgccgtggaacactccgatagtgaagatagcgaaaagtcagactcatcagacagcgagtacattagcgacgacgagcagaagagtaagaacgaaccggaggataccgaagacaaagaaggttgtcagatggacaaggaaccaagtgccgtgaagaagaagccaaaaccaacaaacccagtggagatcaaagaagagctcaagtcaaccagccctgcctctgagaaggccgatccgggagctgtgaaagataaagcctcaccagaaccggaaaaggattttagcgagaaggccaagccctctccccaccccattaaggataagctgaaaggcaaggacgagaccgatagccccactgtccatcttggattggatagtgatagtgagtctgagctggtgatcgatttaggcgaggaccatagcggcagggagggacggaagaataaaaaggaaccaaaggaacccagtccaaagcaggacgtcgtgggcaagaccccaccgtcaactacagtcggtagtcattccccacctgagacaccagtgctcacaagatcatcagcacagacatcagccgctggagcaaccgcaactacctccacctcttccactgtaaccgtaacagcccctgcccctgcagcaaccggcagtccggtaaagaagcagagacccctgttgcccaaggagaccgcccctgcggtccagcgcgttgtctggaacagttccacagtccagcaaaaagaaataacccagagcccctccacaagcacaataacactcgtcacatcaactcagagttctcctttggtaacttcttccggttctatgtccactctggtctcatccgtcaacgctgatctccctattgccaccgcctcagcagatgtagccgcagacatcgccaaatatacatctaagatgatggacgcgatcaagggtaccatgacagaaatttataacgacctttcgaagaataccactggctcgaccatagccgagatcagaagactacgaatagagatcgagaaactccagtggctacaccaacaggagctgtctgaaatgaagcacaacctggaactgaccatggcggagatgaggcagagcttggagcaagaaagagacagactcatcgctgaggttaagaaacagctcgagcttgaaaagcagcaagcagttgatgaaacaaaaaagaaacagtggtgcgccaattgtaagaaggaggcaatattttactgttgctggaacacctcgtactgcgactatccgtgtcagcaggcccactggcctgaacacatgaagtcatgcacccaaagcgctacggcaccccagcaggaggcggatgccgaagtgaacaccgaaaccctgaataagtcttcacagggctccagctcctctacacagagcgcacctagcgagaccgcgtccgcgagtaaggaaaaggaaactagcgctgagaagtctaaggagtcaggatcaactttggatcttagtgggtcgagagagaccccctccagcatccttctgggatctaatcaggggagcgaccatagccgtagtaataaaagttcctggagctcctctgacgagaagcggggtagtacccggtccgatcacaatactagtacaagcacaaaatccctcctcccaaaggaatctcggcttgataccttttgggactag

SEQ ID NO: 257806 - DNA, 4991 bp, Artificial Sequence
  derived and/or modified sequence
atgttttataagtattgacattacacagtgttaacaatgcatccacagagcttggctgaagaggaaataaaaacagaacaggaggtggtagagggcatggatatctctactcgctccaaagatcctggctctgcagagagaacagcccagaaaagaaagttccccagccctccacattcttccaatggccactcgccgcaggacacatcaacaagccccattaaaaagaaaaagaaacctggcttactgaacagtaacaataaggagcaggatggacggaatgatttctactgctgggtttgtcaccgggaaggccaagtcctttgctgtgagctctgtccccgggtttatcacgctaagtgtctgagactgacatcggaaccagagggggactggttttgtcctgaatgtgagaaaattacagtagcagaatgcatcgagacccagagtaaagccatgacaatgctcaccattgaacagttatcctacctgctcaagtttgccattcagaaaatgaaacagccagggacagatgcattccagaagcccgttccattggaacagcaccctgactatgcggaatacatcttccatccaatggacctttgtacattggaaaagaatgcgaaaaagaaaatgtatggctgcacagaagccttcctggctgatgcaaagtggattttgcacaactgcatcatttataatgggggaaatcacaaattgacgcaaatagcgaaagtagtcatcaaaatctgtgaacatgagatgaatgaaatcgaagtatgtccagaatgttatctagctgcttgccaaaaacgagataactggttttgtgagccttgtagcaatccacatcctttggtctgggccaaactgaaggggtttccattctggcctgcaaaagctctaagggataaagacgggcaggtcgatgcccgattctttggacaacatgacagggcctgggttccaataaataattgctacctcatgtctaaagaaattcctttttctgtgaaaaagactaagagcatcttcaacagtgccatgcaagagatggaggtttacgtggagaacatccgcaggaagtttggggtttttaattactctccatttaggacaccctacacacccaacagccagtatcaaatgctgctcgatcccaccaaccccagcgccggcactgccaagatagacaagcaggagaaggtcaagctcaactttgacatgacggcatcccccaagatcctgatgagcaagcctgtgctgagtgggggcacaggccgccggatttccttgtcggatatgccgcgctcccccatgagcacaaactcttctgtgcacacgggctccgacgtggagcaggatgctgagaagaaggccacgtcgagccacttcagtgcgagcgaggagtccatggacttcctggataagagcacagcttcaccagcctccaccaagacgggacaagcagggagtttatccggcagcccaaagcccttctctcctcaactgtcagctcctatcacgacgaaaacggacaaaacctccaccaccggcagcatcctgaatcttaacctggatcgaagcaaagctgagatggatttgaaggagctgagcgagtcggtccagcaacagtccacccctgttcctctcatctctcccaagcgccagattcgtagcaggttccagctgaatcttgacaagaccatagagagttgcaaagcacaattaggcataaatgaaatctcggaagatgtctatacggccgtagagcacagcgattcggaggattctgagaagtcagatagtagcgatagtgagtatatcagtgatgatgagcagaagtctaagaacgagccagaagacacagaggacaaagaaggttgtcagatggacaaagagccatctgctgttaaaaaaaagcccaagcctacaaacccagtggagattaaagaggagctgaaaagcacgtcaccagccagcgagaaggcagaccctggagcagtcaaggacaaggccagccctgagcctgagaaggacttttccgaaaaggcaaaaccttcacctcaccccataaaggataaactgaagggaaaagatgagacggattccccaacagtccatttgggcctggactctgattcagagagcgaacttgtcatagatttaggagaagaccattctgggcgggagggtcgaaaaaataagaaggaacccaaagaaccatctcccaaacaggatgttgtaggtaaaactccaccatccacgacggtgggcagccattctcccccggaaacaccggtgctcacccgctcttccgcccaaacttccgcggctggcgccacagccaccaccagcacgtcctccacggtcaccgtcacggccccggcccccgccgccacaggaagcccagtgaaaaagcagaggccgcttttaccgaaggagactgccccggccgtgcagcgggtcgtgtggaactcatcaactgtccagcagaaggagatcacacagagcccatccacgtccaccatcaccctggtgaccagcacacagtcatcgcccctggtcaccagctcggggtccatgagcacccttgtgtcctcagtcaacgctgacctgcccatcgccactgcctcagctgatgtcgccgctgatattgccaagtacactagcaaaatgatggatgcaataaaaggaacaatgacagaaatatacaacgatctttctaaaaacactactggaagcacaatagctgagattcgcaggctgaggatcgagatagagaagctccagtggctgcaccagcaagagctctccgaaatgaaacacaacttagagctgaccatggcggagatgcggcagagcctggagcaggagcgggaccggctcatcgccgaggtgaagaagcagctggagttggagaagcagcaggcggtggatgagaccaagaagaagcagtggtgcgccaactgcaagaaggaggccatcttttactgctgttggaacactagctactgtgactacccctgccagcaagcccactggcctgagcacatgaagtcctgcacccagtcagctactgctcctcagcaggaagcggatgctgaggtgaacacagaaacactaaataagtcctcccaggggagctcctcgagcacacaatcagcaccttcagaaacggccagcgcctccaaagagaaggagacgtcagctgagaaaagcaaggagagtggctcgacccttgacctttctggctccagagagacgccctcctccattctcttaggctccaaccaaggctctgaccattcccggagtaataaatccagttggagcagcagtgatgagaagaggggatcgacacgttccgatcacaacaccagtaccagcacgaagagcctcctcccgaaagagtctcggctggacaccttctgggactagcagtgaatcgggacacaaaccacccaccccattgggagaaaaacccagacgccaggaaaagaagaaacaacaaaggcaggagaacagccactttcagacttgaaaatgacaaaaccctcagttgagcctgagcccccggcgcgggggctgctacactacaggacacccagcatcggctttgactgcagactgttcacccacacgagccctgtgcttttggtgtaaataatgtacaatttgtggatgtcattgaatctagaggactttcccctttttatatttgtattaactttaacttattaaaaaaaaaaaaagaaaaagaaaaacgatttaaaaaaaaaaaaaaaagcaaccaaccccaacaacaaaaaagaatgttttggtattggagaagggatggtcagttagcctgtctgtcacacgacggaatggatactgggcccggggaccactttcatactcacgtcctcatccttggatacccaggggagggcgaaccgttttcgctcgtgtgtctgtacgcagcatgttgggatcgggagtttcggcacagactatcccatcaagccgttggctcctttcagctactacgttaccacgttcctaaaacgcaagctctccggaccagacggacacagggagaagctagtttctttcatgtgattgaaatgatgactctactcctaaaagggaaaaaacaatatccttgtttacagaagagaaacaaacaagccccactcagctcagtcacaggagagaacacagaaagtcttaggatcatgaactctgaaaaaaagagaaaccttatctttgctttgtggttcctttaaacacactcacacacacttggtcagagatgctgtgcttcttggaagcaaggactcaaaggcaaggtgcacgcagaggacgtttgagtctgggatgaagcatgtacgtattatttatatgatggaatttcacgtttttatgtaagcatgaaacacaggcagtatgagagaaagcaaggcccgtcatgctgtccgtacactacgtatgctgtagagccattttgtatgttgtgtaaaacaaaaagcattgatgaaaaagcaaaaggtgatgtatgtatatgagaaaattaattgtacgatatcattccagtacgttttgttgtacattttagtcttgtttactttctcttcattgttaagaggatgcgaactgtacagtttccagctagttacccatattagagaagaaataagagagtattagaagaaaacaggagagaaagaacatttgtgaattgcagttgtcaaaaaaaaaaaatagcctagctggccttatttgtgaagcataattgcttttagcatatggaagtattttttcacattttctttgtataaaatttgtattaaacttaaatatctttttgatggtggtgtttctttgtgactgagccagtagactcacactatatgcttttttgggtttgcccgttccttcccccacccccccagttttttcagatttctttacctttttttaattaaactgttttggaaaaatgc

SEQ ID NO: 257807 - protein, 233 aa, Artificial Sequence
  derived and/or modified sequence
MFHGIPATPGIGAPGNKPELYEEVKLYKNAREREKYDNMAELFAVVKTMQALEKAYIKDCVSPSEYTAACSRLLVQYKAAFRQVQGSEISSIDEFCRKFRLDCPLAMERIKEDRPITIKDDKGNLNRCIADVVSLFITVMDKLRLEIRAMDEIQPDLRELMETMHRMSHLPPDFEGRQTVSQWWVSLPARQSPAVPETLPARRSPAVPLRPSAPTCPVLHSQAADPERHVGVR

SEQ ID NO: 257808 - DNA, 702 bp, Artificial Sequence
  derived and/or modified sequence
atgttccacggcatccccgccacccccggcatcggcgcccccggcaacaagcccgagctgtacgaggaggtgaagctgtacaagaacgccagagagagagagaagtacgacaacatggccgagctgttcgccgtggtgaagaccatgcaggccctggagaaggcctacatcaaggactgcgtgagccccagcgagtacaccgccgcctgcagcagactgctggtgcagtacaaggccgccttcagacaggtgcagggcagcgagatcagcagcatcgacgagttctgcagaaagttcagactggactgccccctggccatggagagaatcaaggaggacagacccatcaccatcaaggacgacaagggcaacctgaacagatgcatcgccgacgtggtgagcctgttcatcaccgtgatggacaagctgagactggagatcagagccatggacgagatccagcccgacctgagagagctgatggagaccatgcacagaatgagccacctgccccccgacttcgagggcagacagaccgtgagccagtggtgggtgagcctgcccgccagacagagccccgccgtgcccgagaccctgcccgccagaagaagccccgccgtgcccctgagacccagcgcccccacctgccccgtgctgcacagccaggccgccgaccccgagagacacgtgggcgtgagatag

SEQ ID NO: 257809 - DNA, 702 bp, Artificial Sequence
  derived and/or modified sequence
atgtttcatgggatacctgcgacgcccggcatcggcgctcccgggaacaagccagagctgtatgaagaggtcaaactgtataaaaatgctagagaacgagaaaagtacgacaatatggcagagttattcgcagtagtgaagaccatgcaagccctggagaaagcatatattaaggattgcgtgtctccttcggagtacaccgccgcctgttctcggctgttggtgcagtataaggctgccttcaggcaggtgcaggggagtgagatatcatctatcgacgagttttgtcgtaagttccgccttgactgtcccctcgccatggaacgaattaaagaagatagaccgattacaatcaaagacgataaggggaaccttaaccgatgtattgctgatgtggtgtcactgtttataacagtcatggataaactccggctggagatacgagcaatggatgaaatacaacccgacctcagagaactgatggagacaatgcatcggatgtctcacctgcccccagattttgagggacgacagacagtgtcacagtggtgggtaagtcttccagctcgtcagagtcctgccgtgcctgaaaccctgcccgcccggagaagccctgccgtcccactgcgccctagtgcacccacgtgcccagtgttgcacagccaggcagccgatcccgaaaggcacgtgggggttcgttag

SEQ ID NO: 257810 - DNA, 702 bp, Artificial Sequence
  derived and/or modified sequence
atgtttcatggcatcccagccaccccaggcattggagcccctggcaacaagccagagctgtatgaggaggtgaagctgtacaagaatgcccgggagcgggagaagtatgacaacatggccgagctgtttgctgtggtgaagaccatgcaggccctggagaaggcctacatcaaggactgtgtgagccccagcgagtacacagctgcctgcagccggctgctggtgcagtacaaggccgccttccggcaggtgcagggcagcgagatcagcagcattgatgagttctgcaggaagttccggctggactgccccctggccatggagcgcatcaaggaggaccggcccatcaccatcaaggatgacaagggcaacctgaaccgctgcatcgcagatgtggtgtccctcttcatcaccgtgatggacaagctgcggctggagatccgggccatggatgagatccagcctgacctgcgggagctgatggagaccatgcacaggatgagccacctgcccccagactttgagggccggcagacagtgtcccagtggtgggtgtccctgcctgcccggcagagccctgctgtgcctgagaccctgcctgcccggcgcagccctgctgtgcccctgcggcccagcgcccccacctgccctgtgctgcacagccaggccgctgaccctgagagacatgtgggcgtgaggtag

SEQ ID NO: 257811 - DNA, 702 bp, Artificial Sequence
  derived and/or modified sequence
atgttccacggcatccccgccacccccggcatcggcgcccccggcaataaacctgaactttacgaggaggtcaagttgtataaaaatgctagggagcgcgagaaatatgacaatatggccgagctcttcgcagtggtgaagactatgcaggcgctggagaaggcctacatcaaggattgcgtcagcccctctgagtacaccgcagcgtgttcgagactgctggtgcaatataaggccgctttccgacaggtccagggctccgaaatcagttctattgatgagttctgcaggaagttcagattggattgtcctctggcaatggaacgtattaaagaggaccggccaattactataaaggatgataaagggaatctgaatcgatgcatagcggatgtggtatctctctttattacggtgatggataagttaagattagagatccgagccatggatgaaatccagccggatttgagggaactgatggagactatgcatagaatgagtcatctcccgcctgatttcgaggggcggcagaccgtaagtcagtggtgggttagtctccccgccaggcagagtcctgccgtgcccgaaacccttcccgccagacgatctcccgccgtaccgctccgtccaagcgcacccacatgccccgtgctgcattcacaggccgccgatccagagcgccacgtgggcgtcaggtag

SEQ ID NO: 257812 - DNA, 702 bp, Artificial Sequence
  derived and/or modified sequence
atgtttcacggaataccggctactcccggtatcggtgcacctggaaataagcctgagctctacgaagaagtcaaattatataaaaacgcccgtgaacgggagaagtacgataacatggccgagttgttcgccgtagtcaagacaatgcaggccttagaaaaagcctatataaaggactgcgtttcaccctccgagtatactgctgcctgctctagactgctggtccagtataaagccgcttttcgacaggttcaggggtccgaaatcagctccattgatgagttttgcaggaagtttaggctcgactgtcctctggctatggaaagaattaaggaagaccggcctatcactattaaggatgataaaggaaatctgaatcgctgtatcgcggatgtggtctccctttttattaccgtgatggataaactgaggcttgagattagagctatggacgagattcaaccagacctgcgggagctgatggaaacaatgcacaggatgtctcacctgccccctgactttgagggccgacagacagtctcccagtggtgggtgtccctacccgcacggcagagccctgccgtccccgagacactgcccgctagaagatctccggctgttccccttagacccagcgcgcctacatgccctgtccttcatagtcaggccgctgaccctgaaagacatgtgggcgtgcgctag

SEQ ID NO: 257813 - DNA, 1062 bp, Artificial Sequence
  derived and/or modified sequence
cgctgaccgagcgcaccccgcccccggcgccatcttcccgaccgcgagccgtccaggtctcagtgctgtgccccccccagagcctagaggatgtttcatgggatcccagccacgccgggcataggagcccctgggaacaagccggagctgtatgaggaagtgaagttgtacaagaacgcccgggagagggagaagtacgacaacatggcagagctgtttgcggtggtgaagacaatgcaagccctggagaaggcctacatcaaggactgtgtctcccccagcgagtacactgcagcctgctcccggctcctggtccaatacaaagctgccttcaggcaggtccagggctcagaaatcagctctattgacgaattctgccgcaagttccgcctggactgcccgctggccatggagcggatcaaggaggaccggcccatcaccatcaaggacgacaagggcaacctcaaccgctgcatcgcagacgtggtctcgctcttcatcacggtcatggacaagctgcgcctggagatccgcgccatggatgagatccagcccgacctgcgagagctgatggagaccatgcaccgcatgagccacctcccacccgactttgagggccgccagacggtcagccagtggtgggtgtccctcccagccaggcagagccccgcagtgcccgagaccctcccagccaggcggagccccgcagtgcccctgaggccctcagcccccacatgccctgtgctgcactcccaggctgcagaccctgagcggcatgtcggcgtcagatgagctggacgactcacaggtgcgtcagatgctgttcgacctggagtcagcctacaacgccttcaaccgcttcctgcatgcctgagcccggggcactagcccttgcacagaagggcagagtctgaggcgatggctcctggtcccctgtccgccacacaggccgtggtcatccacacaactcactgtctgcagctgcctgtctggtgtctgtctttggtgtcagaactttgggggccgggcccctccccacaataaagatgctctccgaccttc

SEQ ID NO: 257814 - protein, 120 aa, Artificial Sequence
  derived and/or modified sequence
KRFTRCGLVNELRKQGFDENLMRDWVCLVENESARYTDKIANVNKNGSRDYGLFQINDKYWCSKGSTPGKDCNVTCSQLLTDDITVASTCAKKIYKRTKFDAWSGWDNHCNHSNPDISSC

SEQ ID NO: 257815 - protein, 194 aa, Artificial Sequence
  derived and/or modified sequence
MQDAPLSCLSPTKWSSVSSADSTEKSASAAGTRNLPFQFCLRQALRMKAAGILTLIGCLVTGAESKIYTRCKLAKIFSRAGLDNYWGFSLGNWICMAYYESGYNTTAQTVLDDGSIDYGIFQINSFAWCRRGKLKENNHCHVACSALVTDDLTDAIICAKKIVKETQGMNYWQGWKKHCEGRDLSDWKKDCEVS

SEQ ID NO: 257816 - DNA, 585 bp, Artificial Sequence
  derived and/or modified sequence
atgcaggatgctcccctctcatgcttgagccccacaaagtggagcagcgttagctcagcggattccaccgaaaaatcagcaagtgcagcaggcactcgcaacctcccatttcaattctgcttacggcaggccttgaggatgaaagcggctggaatccttaccctgataggttgtctggttaccggggcagagtctaagatctacacacgctgcaaactggccaaaattttttcgcgcgccgggctggataactactggggtttctctttagggaactggatctgtatggcctactacgaaagcggctataacaccacagcccaaaccgtgctggatgacggctcaattgattatggcatctttcagatcaattcttttgcctggtgtcgacgaggtaaactgaaagagaataatcactgtcatgttgcatgttctgccttggtgacagacgatctgaccgatgcaattatttgcgcaaaaaagatagtgaaagaaactcaaggaatgaactattggcaaggctggaaaaaacactgcgagggacgggacctgagcgactggaagaaggattgcgaagtaagttag

SEQ ID NO: 257817 - DNA, 585 bp, Artificial Sequence
  derived and/or modified sequence
atgcaggatgcccccctgagctgcctgagccccaccaagtggagctctgtgtcctctgctgacagcacagagaagagcgccagcgctgctggcaccaggaacctgcccttccagttctgcctgcggcaggccctgaggatgaaggccgccggcatcctgaccctcatcggctgcctggtgactggagctgagagcaagatctacacccgctgcaagctggccaagatcttcagccgggccggcctggacaactactggggcttcagcctgggcaactggatctgcatggcctactatgaaagtggctacaacaccacagcccagacagtgctggatgatggcagcattgattatggcatcttccagatcaacagctttgcctggtgccggcggggcaagctgaaggagaacaaccactgccacgtggcctgcagcgccctggtgacagatgacctgacagatgccatcatctgtgccaagaagatcgtgaaggagacccagggcatgaactactggcagggctggaagaagcactgtgagggccgggacctgagtgactggaagaaggactgtgaggtgtcctag

SEQ ID NO: 257818 - DNA, 808 bp, Artificial Sequence
  derived and/or modified sequence
tcttgagctaggaaaggattactcgagccttgttagaatcagacatggcttcaggggatgcaggacgctcccctgagctgcctgtcaccgactaagtggagcagtgtttcttccgcagactcaactgagaagtcagcctctgcggcaggcaccaggaatctgccttttcagttctgtctccggcaggctttgaggatgaaggctgcgggcattctgaccctcattggctgcctggtcacaggcgccgagtccaaaatctacactcgttgcaaactggcaaaaatattctcgagggctggcctggacaattactggggcttcagccttggaaactggatctgcatggcgtattatgagagcggctacaacaccacagcccagacggtcctggatgacggcagcatcgactacggcatcttccagatcaacagcttcgcgtggtgcagacgcggaaagctgaaggagaacaaccactgccacgtcgcctgctcagccttggtcactgatgacctcacagatgcgattatctgtgccaagaaaattgttaaagagacacaaggaatgaactattggcaaggctggaagaaacactgtgaggggagagacctgtccgactggaaaaaagactgtgaggtttcctaaactggaactggacccaggatgctttgcagcaacgccctagggtttgcagtgaatgtccaaatgcctgtgtcatcttgtcccgtttcctcccaatattccttctcaaacttggagagggaaaattaagctatacttttaagaaaataaatatttccatttaaatgtc

SEQ ID NO: 257819 - DNA, 585 bp, Artificial Sequence
  derived and/or modified sequence
atgcaggacgcccccctgagctgcctgagccccaccaagtggagctccgtcagctcagccgactcaacagagaagtccgccagcgcagcaggaacacgcaatctcccgttccagttctgcctccggcaggccctccgaatgaaagcggcaggtatactcaccttgatagggtgcttagtcacaggagctgaatctaaaatctataccagatgtaaactggccaaaatttttagtcgggccgggctcgataactactggggcttcagcctcggcaattggatctgtatggcttactacgaaagtgggtacaacaccacagcgcaaactgtgctcgacgatggttccattgattacggcatctttcagatcaactcctttgcttggtgtagaaggggtaaactgaaggaaaacaatcactgtcatgtggcctgtagcgcgctcgttactgacgatctgaccgacgccatcatatgcgctaaaaaaattgtaaaggagacacagggcatgaactactggcaggggtggaagaaacactgcgaagggcgtgatctcagcgactggaaaaaagactgcgaggtgagctag

SEQ ID NO: 257820 - DNA, 585 bp, Artificial Sequence
  derived and/or modified sequence
atgcaagacgcccctctgagctgtctgtcccccaccaagtggtcttcagtttcctctgctgactctactgaaaagagtgcctctgccgctggaacacgtaatctgccattccagttttgcctccgccaagcgctgagaatgaaagctgccggaatcttgaccttgattggttgtctggtgaccggtgctgagagcaagatctatactcgctgtaagctagccaagatcttttcccgcgctggcctggacaattattgggggttttcgctaggaaattggatttgtatggcctattatgagtctggctacaacacaacagctcagaccgtcttggatgacggcagcattgactacggcatctttcaaatcaactcttttgcatggtgcaggcgaggtaaactgaaagaaaacaaccactgtcacgtggcatgtagtgccctcgtgacagatgatctgaccgacgccatcatctgcgcaaaaaagatcgtgaaggagactcagggaatgaattactggcaaggatggaagaagcactgcgagggaagggatctgtctgactggaaaaaggattgcgaggtatcctag

SEQ ID NO: 257821 - DNA, 585 bp, Artificial Sequence
  derived and/or modified sequence
atgcaggacgcccccctgagctgcctgagccccaccaagtggagcagcgtgagcagcgccgacagcaccgagaagagcgccagcgccgccggcaccagaaacctgcccttccagttctgcctgagacaggccctgagaatgaaggccgccggcatcctgaccctgatcggctgcctggtgaccggcgccgagagcaagatctacaccagatgcaagctggccaagatcttcagcagagccggcctggacaactactggggcttcagcctgggcaactggatctgcatggcctactacgagagcggctacaacaccaccgcccagaccgtgctggacgacggcagcatcgactacggcatcttccagatcaacagcttcgcctggtgcagaagaggcaagctgaaggagaacaaccactgccacgtggcctgcagcgccctggtgaccgacgacctgaccgacgccatcatctgcgccaagaagatcgtgaaggagacccagggcatgaactactggcagggctggaagaagcactgcgagggcagagacctgagcgactggaagaaggactgcgaggtgagctag

SEQ ID NO: 257822 - DNA, 666 bp, Artificial Sequence
  derived and/or modified sequence
atgacaatggagactgtggagtcgcaacatgatggtagcataacagcctcactgaccgagtctaaatccgcacacgtgcagacacaaaccggccagaatagcatacccgccctcgcccaggtcgcagcgatagctgagactgacgagtccgctgaatccgaaggtgtcatcgattcccataagcggagggaaattctttcccgcaggccatcataccgaaaaatattaaatgagctgagcagtgatgtcccaggagtgcccaaaattgaggaggaacggtcagaagaggaaggtacccctccgtcaattgccaccatggcagtaccaacatctatttaccagacttccacagggcagtatactgcaacaggggacatgccgacataccagatccgagcccccacagcagccttaccgcaaggggttgttatggctgcctcacccggaagccttcatagcccccagcagctagccgaggaggcaacccgcaaaagggaactgcggttgatgaaaaatcgcgaagccgccaaagagtgccgtcgccggaaaaaagagtacgttaagtgtctggagtcacgcgtagcagtcctcgaggttcaaaacaaaaaattgattgaggagctagagacgctcaaggatatatgcagccccaaaacagactactag

SEQ ID NO: 257823 - DNA, 666 bp, Artificial Sequence
  derived and/or modified sequence
atgactatggaaacagtggagtctcagcatgacggctccataactgctagcttgactgagtctaaatctgcacatgtccagacccagacagggcaaaacagtatcccagcactggcacaggtggctgcaatagccgaaacagacgagtctgccgaatccgagggtgtcatcgatagccacaagcgtagggaaattctgtcaaggcgacccagttatagaaaaattctcaacgaactttcgagtgacgtgcccggagtgcccaaaatcgaggaagagcgctctgaagaggaaggtacgcccccatctatagcaaccatggcagtcccgacatctatctaccagactagtacaggtcagtataccgccacaggtgatatgccaacatatcagatcagagcaccaaccgcagctctcccacaaggtgtggtgatggccgcaagtccaggatctctgcactccccgcaacagctggccgaagaggcaacacgcaagcgtgagttgcggcttatgaagaatagagaggctgcaaaagagtgtcgaaggcgaaagaaggaatatgtgaaatgcctggagagtcgcgtggctgtcctagaagtgcagaataaaaaactgatagaggaactggagacactgaaagatatctgtagtcctaaaactgactattag

SEQ ID NO: 257824 - DNA, 465 bp, Artificial Sequence
  derived and/or modified sequence
atgacaatggaaaccgtcgagtcccaacacgacggttccatcaccgccagcctaacagagagcaaatccgctcatgtccagactcaaacaggccagaacagcattcccgccctggcacaggttgatgaggaaaccgagctcgctccctcgcacatggcagctgcaaccggcgacatgccaacataccagattagggccccaacagcagccttgccacaaggcgttgtgatggccgctagcccagggtccttgcactccccacagcaactggccgaggaggccaccaggaaacgagagctgaggctgatgaagaatcgggaggcagccaaagagtgtcgcaggcggaaaaaggagtacgtgaagtgcctggagtcccgggtggcagtgctcgaggtccagaacaaaaaactgattgaagagctcgaaactttgaaggatatttgcagtcctaagacagactactag

SEQ ID NO: 257825 - DNA, 666 bp, Artificial Sequence
  derived and/or modified sequence
atgaccatggagaccgtggagagccagcatgatggcagcatcacagccagcctgacagagagcaagagcgcccacgtgcagacccagacaggccagaacagcatcccagccctggcccaggtggccgccatcgccgagacagatgagagcgctgagagcgagggcgtgattgacagccacaagaggcgggagatcctgagccggcggcccagctacaggaagatcctgaatgagctgagcagtgatgtgcctggggtgcccaagattgaggaggagaggtctgaggaggagggcaccccacccagcatcgccaccatggctgtgcccaccagcatctaccagaccagcacaggccagtacacagccactggagacatgcccacctaccagatccgggcccccacagctgccctgccccagggcgtggtgatggccgccagccctggcagcctgcacagcccccagcagctggccgaggaggccaccaggaagcgggagctgcggctgatgaagaaccgggaggccgccaaggagtgcagaagaaggaagaaggagtatgtgaagtgcctggagagccgggtggccgtgctggaggtgcagaacaagaagctgattgaggagctggagaccctgaaggacatctgcagccccaagacagactactag

SEQ ID NO: 257826 - DNA, 465 bp, Artificial Sequence
  derived and/or modified sequence
atgaccatggagaccgtggagagccagcatgatggcagcatcacagccagcctgacagagagcaagagcgcccacgtgcagacccagacaggccagaacagcatcccagccctggcccaggtggatgaggagacagagctggcccccagccacatggccgccgccaccggggacatgcccacctaccagatccgggcccccacagctgccctgccccagggcgtggtgatggccgccagccctggcagcctgcacagcccccagcagctggccgaggaggccaccaggaagcgggagctgcggctgatgaagaaccgggaggccgccaaggaatgtagaagaaggaagaaggagtatgtgaagtgcctggagagccgggtggccgtgctggaggtgcagaacaagaagctgattgaggagctggagaccctgaaggacatctgcagccccaagacagactactag

SEQ ID NO: 257827 - DNA, 666 bp, Artificial Sequence
  derived and/or modified sequence
atgaccatggagaccgtggagagccagcacgacggcagcatcaccgctagtctcacagagagtaagagcgcgcacgtgcagacacagacagggcagaattccattcctgcccttgctcaggtcgctgctatcgctgaaactgacgagtccgcagagtccgagggcgtgatagacagtcacaaaaggagagagattttaagccgccgtccaagctaccgaaaaattcttaatgaactgtcctccgacgtgcccggtgtgccaaagattgaagaggagaggtctgaagaagaaggtacaccacccagtatcgctacaatggctgtgccaacatcaatataccagactagtacaggacagtacacggcgaccggcgacatgccaacgtatcagattagggccccaacagccgccctgccccagggtgtggttatggccgcttcacccgggagtctccacagcccccagcagcttgctgaggaagcgacccgtaagcgcgagttgaggctgatgaagaatcgcgaagccgctaaagaatgtagaagaagaaagaaggaatacgtgaaatgtctcgaatcacgtgtcgccgtgcttgaggtacagaataagaaactcatcgaggagctcgagactctgaaggatatctgttcgcccaagaccgattattag

SEQ ID NO: 257828 - DNA, 666 bp, Artificial Sequence
  derived and/or modified sequence
atgaccatggagaccgtggagagccagcacgacggcagcatcaccgcttctctcaccgagtcaaaatcagctcatgtgcagacccagaccggtcagaattctatcccagcattagcgcaagtggccgcgatagcagaaaccgatgaatccgcggagtcagaaggagtgattgatagccacaaacgccgggaaatcctgtcccgccgccccagctaccgcaagattttgaatgagttgtcgtcagatgtaccaggagtcccgaaaatagaggaggaacggagcgaagaagaggggacccctccttcgatcgccaccatggcagtacctacaagcatctatcaaacctccaccggtcagtacaccgccaccggagatatgcctacgtaccaaattcgtgcccccactgcagccctcccccagggagtggtgatggcagcatctccgggctcactccactcccctcagcagctggccgaagaggctacccggaaaagagaacttaggctgatgaagaaccgggaggccgccaaagaatgtagaagaaggaaaaaagagtacgttaagtgcctggaaagccgtgtagccgtcctggaagttcagaataaaaagttgattgaggaactcgaaactttgaaagatatttgctcccccaagacagattattag

SEQ ID NO: 257829 - DNA, 465 bp, Artificial Sequence
  derived and/or modified sequence
atgaccatggagaccgtggagagccagcacgacggcagcatcaccgcgagtctaacggagagtaaaagcgctcacgttcaaacacagaccggacaaaactccatacccgctttggcacaggtcgatgaggaaactgagctggcaccgagccatatggctgctgctaccggtgatatgccgacatatcagattcgggccccgacggccgccctcccacagggagttgttatggccgccagtcccggaagcctccattctccccaacaactggccgaggaagccacccgcaaaagagagctccgcctgatgaaaaatcgggaggccgccaaagagtgtagacggaggaaaaaggaatatgttaagtgtcttgagtccagggtggcggtgctcgaggttcagaacaaaaaattaatagaggaattagaaaccctgaaggatatttgcagcccaaagactgattattag

SEQ ID NO: 257830 - DNA, 666 bp, Artificial Sequence
  derived and/or modified sequence
atgactatggaaactgttgagtcgcagcatgacggttcgattaccgccagtctcacagaaagcaaatccgcccacgttcagacgcagacgggccaaaacagcattccggctctggcccaggtggccgcaatcgccgaaactgatgagtcggcagagagcgaaggtgtgatcgatagccataaacggagagagattctctccaggcgacctagttaccggaaaatccttaacgagctgtcctcggacgtgcccggagtgcccaagatcgaggaggagcggtctgaggaggaaggaacccccccatccattgccaccatggccgtacctaccagcatataccagacatctacaggccaatatactgcaaccggagacatgccgacttatcagatcagagctcctacggctgcccttcctcagggagtcgttatggccgctagccctggtagcttgcacagcccgcagcagctggcggaggaagctacccggaagcgtgagttgagactcatgaagaatagagaggctgccaaagagtgtcgtagacggaaaaaagaatacgtgaagtgcctcgaaagcagagtggccgttctcgaggtgcagaacaagaagctcatagaggagctggaaactctgaaagatatttgtagtccaaaaactgattactag

SEQ ID NO: 257831 - DNA, 666 bp, Artificial Sequence
  derived and/or modified sequence
atgactatggagaccgtggagtctcagcatgacggaagcattacagcctctcttactgagtccaaatccgcgcatgttcagacgcagaccgggcagaactccatcccagccctggcacaggtagccgctattgcagagactgacgaatcggcagagtccgagggagtgatcgactcccacaagcgccgtgagatcctatccagaaggcctagttacagaaaaatcctcaatgaattgtcaagcgacgtcccgggtgtacccaaaattgaagaggagagatctgaagaggaaggcacacccccatccatagccacgatggcagtacctacctctatctaccaaacttcaacgggccagtacaccgcaacaggagatatgcccacctatcagattcgggcacctactgcagctctcccgcagggggtggttatggccgcttcacccggaagcctacattccccccagcagctcgcggaggaggccacccgcaaacgggaactgaggctgatgaaaaacagggaggccgctaaggaatgtcggcgaaggaaaaaggaatacgtcaaatgtttggagagccgggtggcggtattagaagtccagaacaaaaaactcatcgaggagctggagactctcaaggacatctgtagccctaagactgactattag

SEQ ID NO: 257832 - DNA, 465 bp, Artificial Sequence
  derived and/or modified sequence
atgactatggagaccgttgagtctcagcatgatggcagcataacagcctccctcactgagtctaagtccgcccacgtgcaaacacagactggacagaacagcatcccagctctggcccaggtggatgaagaaaccgagctagcaccttcacatatggctgcagccacaggcgatatgcccacataccagataagggccccaacagctgcgctgccccaaggcgtcgtcatggcagcgtccccaggctcgctgcattcccctcagcagttagctgaggaggctacccggaagagagagttgcgactgatgaagaacagggaagctgcaaaggagtgccgtcgccgaaaaaaggaatacgtaaagtgcttggagagccgggtggcagtgttggaagttcaaaacaagaaactaatcgaagagctggagaccttgaaggatatttgctccccgaaaacagattattag

SEQ ID NO: 257833 - DNA, 1821 bp, Artificial Sequence
  derived and/or modified sequence
atgaccatggaaacagttgaatcccagcatgatggaagtataacagcttctttgacagagagcaagtctgctcatgtgcagactcagactggccaaaattcaatccctgctttagctcaggtagcagcaattgcagagacagatgaatctgcagaatcagaaggtgtaattgattctcataaacgtagagaaatcctttcacgaagaccctcttataggaaaatactgaatgaactgtcctctgatgtgcctggtgttcccaagattgaagaagagagatcagaggaagaaggaacaccacctagtattgctaccatggcagtaccaactagcatatatcagactagcacggggcaatacactgccactggtgacatgccaacttaccagatccgagctcctactgctgctttgccacagggagtggtgatggctgcatcgcccggaagtttgcacagtccccagcagctggcagaagaagcaacacgcaaacgagagctgaggctaatgaaaaacagggaagctgccaaagaatgtcgacgtcgaaagaaagaatatgtaaaatgtctggagagccgagttgcagtgctggaagtccagaacaagaagcttatagaggaacttgaaaccttgaaagacatttgttctcccaaaacagattactagaaatatttaactatgaactgaaggcagcatgtatagttgcttttgaaggaatacaatatatagctggcaagaatggtggcttcttttctttgtatcattcatcttcttctttaatcacttaacattcctaaaatgcttcactgtacgtagttaagtcgtagctataacttcaaattttttaaaagagacaaactgtaaaaaatgtgtgtattcttaaaatgcaatatttgtaaggcttgttccaatgccacatacttgcagctcccattctatgtgtcatcaatagtgtcctatgcaataaaattatttgcaggtctttaaatcattttaggaaaggatgatcaaaaataatgcatccagcagtacaataaaagtaaaccacaaaaaaatacctcaggaaagaatagaaagaaagtctatctaatgacatgcctatatgagaagaatagcctagatatgaatatatggcatttgcagatttttatattagttgctttgttaaaaaaaaaaagattgtattgctgtccttgaatgccatagtcaaagagagtttttaatagaaccatgttggttgcactttgtagtgtttggtgctcatttaaatatctgaacatttactacagtttttaactctactgtgtaatataaaagatcttgcagaagttcttagtgttggtttaatattacctaatgaaagtgatgacatattttttatatctggaatgagcctgttgggatcgcattgcataccttcggggtacaagtcagtttctacactgggtgctgatccttgcacgcgccctttctaccatctcacggtggggatggccgcagggctgtgcacccagaagaagatggctgttagcgtttcggccttcataatggcctgagactttctttctgtaggtggtctggagctgtccggctggtggccccctattttgccatttagcgaacaaccacaggaattttaaaaacaaaaacatcccaagattttttcatttcaaaatgcttcaaagtccacattagatcagatactccgctgtcggcacattcagctgaggttcattacaatcgagactgcaatgtgatctatgtttcatcttgtttttataataaaaagcttcagggaacaagcccaaagccctcaccaca

SEQ ID NO: 257834 - DNA, 465 bp, Artificial Sequence
  derived and/or modified sequence
atgaccatggaaacagttgaatcccagcatgatggaagtataacagcttctttgacagagagcaagtctgctcatgtgcagactcagactggccaaaattcaatccctgctttagctcaggtagatgaggaaactgaacttgccccaagtcacatggctgctgccactggtgacatgccaacttaccagatccgagctcctactgctgctttgccacagggagtggtgatggctgcatcgcccggaagtttgcacagtccccagcagctggcagaagaagcaacacgcaaacgagagctgaggctaatgaaaaacagggaagctgccaaagaatgtcgacgtcgaaagaaagaatatgtaaaatgtctggagagccgagttgcagtgctggaagtccagaacaagaagcttatagaggaacttgaaaccttgaaagacatttgttctcccaaaacagattactag

SEQ ID NO: 257835 - DNA, 666 bp, Artificial Sequence
  derived and/or modified sequence
atgaccatggagaccgtggagagccagcacgacggcagcatcaccgccagcctgaccgagagcaagagcgcccacgtgcagacccagaccggccagaacagcatccccgccctggcccaggtggccgccatcgccgagaccgacgagagcgccgagagcgagggcgtgatcgacagccacaagagaagagagatcctgagcagaagacccagctacagaaagatcctgaacgagctgagcagcgacgtgcccggcgtgcccaagatcgaggaggagagaagcgaggaggagggcaccccccccagcatcgccaccatggccgtgcccaccagcatctaccagaccagcaccggccagtacaccgccaccggcgacatgcccacctaccagatcagagcccccaccgccgccctgccccagggcgtggtgatggccgccagccccggcagcctgcacagcccccagcagctggccgaggaggccaccagaaagagagagctgagactgatgaagaacagagaggccgccaaggagtgcagaagaagaaagaaggagtacgtgaagtgcctggagagcagagtggccgtgctggaggtgcagaacaagaagctgatcgaggagctggagaccctgaaggacatctgcagccccaagaccgactactag

SEQ ID NO: 257836 - DNA, 465 bp, Artificial Sequence
  derived and/or modified sequence
atgaccatggagaccgtggagagccagcacgacggcagcatcaccgccagcctgaccgagagcaagagcgcccacgtgcagacccagaccggccagaacagcatccccgccctggcccaggtggacgaggagaccgagctggcccccagccacatggccgccgccaccggcgacatgcccacctaccagatcagagcccccaccgccgccctgccccagggcgtggtgatggccgccagccccggcagcctgcacagcccccagcagctggccgaggaggccaccagaaagagagagctgagactgatgaagaacagagaggccgccaaggagtgcagaagaagaaagaaggagtacgtgaagtgcctggagagcagagtggccgtgctggaggtgcagaacaagaagctgatcgaggagctggagaccctgaaggacatctgcagccccaagaccgactactag

SEQ ID NO: 257837 - protein, 1177 aa, Artificial Sequence
  derived and/or modified sequence
MAGIFKEFFFSTEDLPEVILTLSLISSIGAFLNRHLEDFPIPVPVILFLLGCSFEVLSFTSSQVQRYANAIQWMSPDLFFRIFTPVVFFTTAFDMDTYMLQKLFWQILLISIPGFLVNYILVLWHLASVNQLLLKPTQWLLFSAILVSSDPMLTAAAIRDLGLSRSLISLINGESLMTSVISLITFTSIMDFDQRLQSKRNHTLAEEIVGGICSYIIASFLFGILSSKLIQFWMSTVFGDDVNHISLIFSILYLIFYICELVGMSGIFTLAIVGLLLNSTSFKAAIEETLLLEFWTFLSRIAFLMVFTFFGLLIPAHTYLYIEFVDIYYSLNIYLTLIVLRFLTLLLISPVLSRVGHEFSWRWIFIMVCSEMKGMPNINMALLLAYSDLYFGSDKEKSQILFHGVLVCLITLVVNRFILPVAVTILGLRDATSTKYKSVCCTFQHFQELTKSAASALKFDKDLANADWNMIEKAITLENPYMLNEEETTEHQKVKCPHCNKEIDEIFNTEAMELANRRLLSAQIASYQRQYRNEILSQSAVQVLVGAAESFGEKKGKCMSLDTIKNYSESQKTVTFARKLLLNWVYNTRKEKEGPSKYFFFRICHTIVFTEEFEHVGYLVILMNIFPFIISWISQLNVIYHSELKHTNYCFLTLYILEALLKIAAMRKDFFSHAWNIFELAITLIGILHVILIEIDTIKYIFNETEVIVFIKVVQFFRILRIFKLIAPKLLQIIDKRMSHQKTFWYGILKGYVQGEADIMTIIDQITSSKQIKQMLLKQVIRNMEHAIKELGYLEYDHPEIAVTVKTKEEINVMLNMATEILKAFGLKGIISKTEGAGINKLIMAKKKEVLDSQSIIRPLTVEEVLYHIPWLDKNKDYINFIQEKAKVVTFDCGNDIFEEGDEPKGIYIIISGMVKLEKSKPGLGIDQMVESKEKDFPIIDTDYMLSGEIIGEINCLTNEPMKYSATCKTVVETCFIPKTHLYDAFEQCSPLIKQKMWLKLGLAITARKIREHLSYEDWNYNMQLKLSNIYVVDIPMSTKTDIYDENLIYVILIHGAVEDCLLRKTYRAPFLIPITCHQIQSIEDFTKVVIIQTPINMKTFRRNIRKFVPKHKSYLTPGLIGSVGTLEEGIQEERNVKEDGAHSAATARSPQPCSLLGTKFNCKESPRINLRKVRKE

SEQ ID NO: 257838 - DNA, 3534 bp, Artificial Sequence
  derived and/or modified sequence
atggccggcatcttcaaggagttcttcttcagcaccgaggacctgcccgaggtgatcctgaccctgagcctgatcagcagcatcggcgccttcctgaacagacacctggaggacttccccatccccgtgcccgtgatcctgttcctgctgggctgcagcttcgaggtgctgagcttcaccagcagccaggtgcagagatacgccaacgccatccagtggatgagccccgacctgttcttcagaatcttcacccccgtggtgttcttcaccaccgccttcgacatggacacctacatgctgcagaagctgttctggcagatcctgctgatcagcatccccggcttcctggtgaactacatcctggtgctgtggcacctggccagcgtgaaccagctgctgctgaagcccacccagtggctgctgttcagcgccatcctggtgagcagcgaccccatgctgaccgccgccgccatcagagacctgggcctgagcagaagcctgatcagcctgatcaacggcgagagcctgatgaccagcgtgatcagcctgatcaccttcaccagcatcatggacttcgaccagagactgcagagcaagagaaaccacaccctggccgaggagatcgtgggcggcatctgcagctacatcatcgccagcttcctgttcggcatcctgagcagcaagctgatccagttctggatgagcaccgtgttcggcgacgacgtgaaccacatcagcctgatcttcagcatcctgtacctgatcttctacatctgcgagctggtgggcatgagcggcatcttcaccctggccatcgtgggcctgctgctgaacagcaccagcttcaaggccgccatcgaggagaccctgctgctggagttctggaccttcctgagcagaatcgccttcctgatggtgttcaccttcttcggcctgctgatccccgcccacacctacctgtacatcgagttcgtggacatctactacagcctgaacatctacctgaccctgatcgtgctgagattcctgaccctgctgctgatcagccccgtgctgagcagagtgggccacgagttcagctggagatggatcttcatcatggtgtgcagcgagatgaagggcatgcccaacatcaacatggccctgctgctggcctacagcgacctgtacttcggcagcgacaaggagaagagccagatcctgttccacggcgtgctggtgtgcctgatcaccctggtggtgaacagattcatcctgcccgtggccgtgaccatcctgggcctgagagacgccaccagcaccaagtacaagagcgtgtgctgcaccttccagcacttccaggagctgaccaagagcgccgccagcgccctgaagttcgacaaggacctggccaacgccgactggaacatgatcgagaaggccatcaccctggagaacccctacatgctgaacgaggaggagaccaccgagcaccagaaggtgaagtgcccccactgcaacaaggagatcgacgagatcttcaacaccgaggccatggagctggccaacagaagactgctgagcgcccagatcgccagctaccagagacagtacagaaacgagatcctgagccagagcgccgtgcaggtgctggtgggcgccgccgagagcttcggcgagaagaagggcaagtgcatgagcctggacaccatcaagaactacagcgagagccagaagaccgtgaccttcgccagaaagctgctgctgaactgggtgtacaacaccagaaaggagaaggagggccccagcaagtacttcttcttcagaatctgccacaccatcgtgttcaccgaggagttcgagcacgtgggctacctggtgatcctgatgaacatcttccccttcatcatcagctggatcagccagctgaacgtgatctaccacagcgagctgaagcacaccaactactgcttcctgaccctgtacatcctggaggccctgctgaagatcgccgccatgagaaaggacttcttcagccacgcctggaacatcttcgagctggccatcaccctgatcggcatcctgcacgtgatcctgatcgagatcgacaccatcaagtacatcttcaacgagaccgaggtgatcgtgttcatcaaggtggtgcagttcttcagaatcctgagaatcttcaagctgatcgcccccaagctgctgcagatcatcgacaagagaatgagccaccagaagaccttctggtacggcatcctgaagggctacgtgcagggcgaggccgacatcatgaccatcatcgaccagatcaccagcagcaagcagatcaagcagatgctgctgaagcaggtgatcagaaacatggagcacgccatcaaggagctgggctacctggagtacgaccaccccgagatcgccgtgaccgtgaagaccaaggaggagatcaacgtgatgctgaacatggccaccgagatcctgaaggccttcggcctgaagggcatcatcagcaagaccgagggcgccggcatcaacaagctgatcatggccaagaagaaggaggtgctggacagccagagcatcatcagacccctgaccgtggaggaggtgctgtaccacatcccctggctggacaagaacaaggactacatcaacttcatccaggagaaggccaaggtggtgaccttcgactgcggcaacgacatcttcgaggagggcgacgagcccaagggcatctacatcatcatcagcggcatggtgaagctggagaagagcaagcccggcctgggcatcgaccagatggtggagagcaaggagaaggacttccccatcatcgacaccgactacatgctgagcggcgagatcatcggcgagatcaactgcctgaccaacgagcccatgaagtacagcgccacctgcaagaccgtggtggagacctgcttcatccccaagacccacctgtacgacgccttcgagcagtgcagccccctgatcaagcagaagatgtggctgaagctgggcctggccatcaccgccagaaagatcagagagcacctgagctacgaggactggaactacaacatgcagctgaagctgagcaacatctacgtggtggacatccccatgagcaccaagaccgacatctacgacgagaacctgatctacgtgatcctgatccacggcgccgtggaggactgcctgctgagaaagacctacagagcccccttcctgatccccatcacctgccaccagatccagagcatcgaggacttcaccaaggtggtgatcatccagacccccatcaacatgaagaccttcagaagaaacatcagaaagttcgtgcccaagcacaagagctacctgacccccggcctgatcggcagcgtgggcaccctggaggagggcatccaggaggagagaaacgtgaaggaggacggcgcccacagcgccgccaccgccagaagcccccagccctgcagcctgctgggcaccaagttcaactgcaaggagagccccagaatcaacctgagaaaggtgagaaaggagtag

SEQ ID NO: 257839 - DNA, 3534 bp, Artificial Sequence
  derived and/or modified sequence
atggctggcatttttaaggaattctttttttctaccgaagacctgccagaggtgatcctgactctgtctctcatctcctctataggcgcctttctcaacagacatctggaggattttcctatccccgtcccagtaatactgttcctgctcgggtgcagctttgaggtgcttagttttacgtccagccaagttcagcggtacgccaatgcgatacagtggatgagccctgatttattcttcagaatctttacccccgtcgtctttttcaccacagcattcgatatggacacttatatgctgcagaagctcttttggcaaatacttctgatctctatcccgggctttctggtgaattatattctggtcctctggcacctcgcttccgttaaccagcttcttttgaagccaacccaatggcttctcttctcagccatcttggtgagttccgaccctatgctaactgccgcggccattagagacctgggactctccaggtctttaatttcattgataaatggagaaagcctgatgacttcagttatttcattaatcacattcacgagcattatggacttcgatcaacgcctccagagcaaacggaaccatacattggctgaggaaattgtgggcgggatttgcagctacatcattgcaagctttctgttcggtatattatcatctaagctaatccaattttggatgagtacagtctttggcgacgacgttaatcatatttcgctgatcttttccatcttgtacctgatcttctacatatgtgaactagtaggaatgtctggtatttttaccctagccattgtgggtttattgcttaacagcaccagtttcaaggcagccatcgaggaaacgctgctgttggagttctggacttttctgtctcgcatagcatttctgatggtgttcacattcttcggcttgcttattcctgctcacacgtacctgtatatcgagttcgtggacatttattattccctgaatatctatttgaccttgatcgtgctcaggtttctcactttattattgatcagcccagtgctgagcagggtgggccacgaattctcctggcggtggatttttattatggtgtgctctgaaatgaaaggaatgccaaacattaatatggctctgttgttagcatacagcgacctttacttcggcagtgacaaggagaagagccagatactcttccatggcgttctcgtatgcctgattactctggtcgtgaacaggtttatacttcccgtcgcagtgactatattgggactgagagatgcaacttccaccaaatataagagcgtgtgctgcaccttccagcatttccaggagctgacaaaaagcgcggcctccgctctgaaattcgacaaggatctggccaacgccgattggaacatgatcgagaaggcaattaccctggagaacccatatatgctaaatgaagaagagactacggaacaccagaaggtcaagtgtcctcactgcaacaaagagatcgacgagatctttaacacggaagccatggagttagcaaataggcgcctgttgtcagctcagattgcctcataccaacggcaataccgcaatgaaattttgtctcagagcgccgtgcaggtcctcgtgggcgcggctgaaagcttcggcgaaaaaaagggcaagtgtatgagccttgatactattaagaactattccgagagtcaaaagacggtgacctttgcgaggaagttacttttgaactgggtctataatacgcgcaaggagaaagagggcccctccaagtacttcttcttccgcatatgccatactattgtatttactgaggaatttgaacacgtgggatatttggttattttaatgaatatattccccttcattatatcttggatatcccaattaaacgtcatttaccactcggaactgaaacatacaaattattgtttcctgactctctatatcctggaggccctgctcaaaatcgctgcgatgcgaaaagacttttttagtcacgcttggaatatctttgaactcgctattactctcatcggtattctgcacgtgattttaatcgaaatagacacaattaaatacattttcaatgagacagaggtgattgtcttcattaaagtggtccaattcttcaggatccttagaattttcaaacttatagcccctaagctactacagattatcgacaagcgcatgtctcaccagaaaactttttggtacggaattctgaaagggtatgttcagggggaggctgacattatgaccattatcgaccagattaccagcagcaagcagatcaagcagatgctgctgaagcaagtgattaggaatatggagcacgccataaaagagctggggtatctcgagtatgatcaccctgaaattgccgtgaccgttaagacaaaagaggagatcaatgtgatgctgaatatggctacagaaatactgaaggcatttggtctcaagggcatcatttccaaaacggagggtgctggcataaataagcttataatggctaagaagaaagaggtgctcgactcacaaagtattatccgtccgttaacagtggaggaggtgctttaccacataccttggttggataagaataaggactatatcaatttcatacaggaaaaggccaaagtagtaacattcgactgcggcaatgatatttttgaagagggggacgagcctaaaggtatctatattattatctcaggcatggtgaagttggagaagtcaaaaccagggctgggcattgatcaaatggtggaatctaaagagaaggacttcccgattattgatacagactacatgctgtctggcgaaatcattggtgagattaactgtttaacaaacgaacctatgaagtattccgccacttgcaagacagtggtcgagacgtgcttcattcccaagacacacctttacgacgcattcgaacagtgttcccccttgattaagcaaaaaatgtggctgaagctgggactggcgattactgctagaaaaatacgcgagcatctgtcctatgaggattggaactataatatgcagctcaaactttccaatatttatgttgtcgatatcccgatgtccactaaaacagatatttacgacgagaacctcatctatgtcatactgattcacggggcggtggaggattgcctgctgcggaagacctacagggctccatttctgataccgattacatgccatcagatacagtctattgaagacttcactaaggttgtgataatccagactcccatcaacatgaagacattcagacgcaatatcagaaaatttgtccccaaacacaagagctacctcacccctggactcataggaagcgtggggacactggaagaaggcattcaggaggagcgtaatgtcaaagaggatggagcccattcagctgccacggcccggtcccctcagccttgcagtcttctgggaacaaagttcaactgcaaagaatccccccggatcaacctcaggaaggtgagaaaggaatag

SEQ ID NO: 257840 - DNA, 3534 bp, Artificial Sequence
  derived and/or modified sequence
atggccggcatcttcaaggagttcttcttcagcacagaggacctgcctgaggtgatcctgaccctgagcctcatcagcagcatcggggccttcctgaacagacacctggaggacttccccatccctgtgcctgtgatcctcttcctgctgggctgcagctttgaggtgctgtccttcaccagcagccaggtgcagagatatgccaatgccatccagtggatgagcccagacctcttcttccgcatcttcacccctgtggtgttcttcaccacagcctttgacatggacacctacatgctgcagaagctgttctggcagatcctgctgatcagcatccctggcttcctggtgaactacatcctggtgctgtggcacctggcctctgtgaaccagctgctgctgaagcccacccagtggctgctcttcagcgccatcctggtgtccagtgaccccatgctgacagctgctgccatccgggacctgggcctgagccgcagcctcatcagcctcatcaacggggagagcctgatgaccagcgtcatcagcctcatcaccttcaccagcatcatggactttgaccagaggctgcagagcaagaggaaccacaccctggccgaggagatcgtgggcggcatctgcagctacatcatcgccagcttcctgtttggcatcctgagcagcaagctgatccagttctggatgagcacagtgtttggagatgatgtgaaccacatcagcctcatcttcagcatcctgtacctgatcttctacatctgtgagctggtgggcatgagcggcatcttcaccctggccatcgtgggcctgctgctgaacagcaccagcttcaaggccgccatcgaggagaccctgctgctggagttctggaccttcctgagcagaattgccttcctgatggtgttcaccttcttcggcctgctgatcccagcccacacctacctgtacatcgagtttgtggacatctactacagcctgaacatctacctgaccctcatcgtgctgcgcttcctgaccctgctgctgatcagccctgtgctgagccgggtgggccacgagttctcctggcgctggatcttcatcatggtgtgcagcgagatgaagggcatgcccaacatcaacatggccctgctgctggcctacagcgacctgtactttggaagtgacaaggagaagagccagatcctcttccatggagtgctggtgtgcctgatcaccctggtggtgaaccgcttcatcctgcctgtggccgtgaccatcctgggcctgagagatgccaccagcaccaagtacaagtctgtgtgctgcaccttccagcacttccaggagctgaccaagtctgctgccagcgccctgaagtttgacaaggacctggccaatgctgactggaacatgattgagaaggccatcaccctggagaacccctacatgctgaatgaggaggagaccacagagcaccagaaggtgaagtgcccccactgcaacaaggagattgatgagatcttcaacacagaggccatggagctggccaacagaaggctgctgagcgcccagatcgccagctaccagaggcagtacagaaatgagatcctgagccagagcgctgtgcaggtgctggtgggcgctgctgagagctttggagagaagaagggcaagtgcatgagcctggacaccatcaagaactacagcgagagccagaagacagtgacctttgccaggaagctgctgctgaactgggtgtacaacaccaggaaggagaaggagggccccagcaagtacttcttcttccgcatctgccacaccatcgtgttcacagaggagtttgaacatgtgggctacctggtgatcctgatgaacatcttccccttcatcatctcctggatcagccagctgaatgtcatctaccacagcgagctgaagcacaccaactactgcttcctgaccctgtacatcctggaggccctgctgaagattgctgccatgaggaaggacttcttcagccacgcctggaacatctttgagctggccatcaccctgattggcatcctgcacgtgatcctgattgaaattgacaccatcaagtacatcttcaatgaaacagaggtgattgtgttcatcaaggtggtgcagttcttccgcatcctgcgcatcttcaagctgattgcccccaagctgctgcagatcatcgacaagaggatgagccaccagaagaccttctggtacggcatcctgaagggctacgtgcagggcgaggccgacatcatgaccatcatcgaccagatcaccagcagcaagcagatcaagcagatgctgctgaagcaggtgatccggaacatggagcacgccatcaaggagctgggctacctggagtatgaccaccctgagattgctgtgacagtgaagaccaaggaggagatcaacgtgatgctgaacatggccacagagatcctgaaggccttcggcctgaagggcatcatcagcaagacagagggcgccggcatcaacaagctgatcatggccaagaagaaggaggtgctggacagccagagcatcatccggcccctgactgtggaggaggtgctgtaccacatcccctggctggacaagaacaaggactacatcaacttcatccaggagaaggccaaggtggtgacctttgactgtggaaatgacatctttgaggagggagatgagcccaagggcatctacatcatcatcagcggcatggtgaagctggagaagagcaagccaggcctgggcatcgaccagatggtggagagcaaggagaaggacttccccatcatcgacacagactacatgctgtctggagagatcattggagagatcaactgcctgaccaatgagcccatgaagtacagcgccacctgcaagacagtggtggagacctgcttcatccccaagacccacctgtatgatgcctttgagcagtgcagccccctcatcaagcagaagatgtggctgaagctgggcctggccatcacagccaggaagatccgggagcacctgtcctatgaggactggaactacaacatgcagctgaagctgagcaacatctacgtggtggacatccccatgagcaccaagacagacatctatgatgagaacctgatctacgtgatcctgattcatggagctgtggaggactgcctgctgaggaagacctaccgggcccccttcctgatccccatcacctgccaccagatccagagcattgaggacttcaccaaggtggtgatcatccagacccccatcaacatgaagaccttcagaagaaacatcaggaagtttgtgcccaagcacaagagctacctgaccccaggcctgattggctctgtgggcaccctggaggagggcatccaggaggagagaaatgtgaaggaggatggagcccacagcgctgccacagcccggagcccccagccctgcagcctgctgggcaccaagttcaactgcaaggagagcccccgcatcaacctgaggaaggtgaggaaggagtag

SEQ ID NO: 257841 - DNA, 3534 bp, Artificial Sequence
  derived and/or modified sequence
atggccggcatcttcaaggagttcttcttcagcaccgaggacctgccagaggttattctgaccttgagccttatatctagcatcggggccttccttaacaggcatctcgaagactttcctatcccggtccccgttattctgtttctgctagggtgctcattcgaggtgctctcctttacttcatcccaggttcagaggtatgccaacgctatacagtggatgtctcccgaccttttcttccggatatttactcccgttgtgttcttcaccaccgcctttgatatggatacctacatgttgcagaagctgttctggcaaatacttctcatatccatcccaggctttttagtgaattacatcctggtgctctggcacctcgcctccgtgaatcagctactcctgaagccaactcagtggctcttgtttagtgcgattctcgtgagctccgatcctatgctgactgcagccgccatccgcgacttagggttgtcccgcagcctaatctcactcattaatggagaatctttaatgacctcagttatttccctgatcactttcactagcatcatggacttcgatcagcggctccaaagcaaaagaaaccacaccctcgccgaggagattgtgggggggatatgctcatacataatagcaagtttcctttttggtattctgtctagcaaactgatccagttctggatgtcaactgtgtttggagacgacgtcaaccacatttcgttaatatttagtatactttacttaatcttctatatctgcgagctcgtgggtatgtccggtatttttaccctggccattgtaggccttctgctgaattctaccagttttaaggccgcgatagaagagacactgctgctggagttctggacattcctgtcccggattgcgttcctcatggtgtttaccttcttcggcctgctgatccctgcgcatacctacctctatatagaatttgtggacatttactactccctgaacatttacctgactcttatcgtacttcgctttctgacactattgctgatctctccagttctcagcagagtggggcacgagttctcctggcggtggatttttatcatggtatgcagcgaaatgaaagggatgcctaacatcaacatggctctgctcctcgcctatagcgatctctacttcgggagcgacaaggaaaagtcacagatcctgtttcatggtgttctggtgtgcctaatcactctggtggttaacagatttatccttcctgttgcagtaacaattctgggactaagggacgctacaagtacaaagtacaagtcagtgtgctgtacattccagcactttcaagagctcaccaaaagcgcagcgagcgctttaaaattcgataaggaccttgccaatgcagattggaacatgatcgagaaggctattaccttggagaacccttatatgctgaacgaagaggagacgactgagcaccagaaagtgaagtgccctcattgtaataaagagattgacgaaatcttcaacactgaggcaatggaactggccaataggaggcttttgtctgctcagattgcatcctatcagcgccaatacaggaacgagatcctgagccaatccgctgtgcaagtcctggtgggggctgctgagtcctttggcgagaaaaaaggcaagtgtatgagtctggataccatcaaaaattattctgagtcccaaaagaccgttacatttgcaaggaaactgctgctgaattgggtctataatacaagaaaggagaaggaaggccctagcaagtacttcttcttccgtatctgccatacaatagtcttcaccgaggagttcgagcacgtcggctacctcgtaattcttatgaacatctttccttttataatcagttggatatcacagttgaatgtcatctaccacagcgaactcaagcatactaactattgtttccttactctatacatcctggaggcacttctgaagatcgccgccatgcgcaaggacttttttagccacgcttggaacattttcgaactggccatcactctgatcggcatcctccacgtcatcctgatcgagatcgacacgatcaaatacattttcaatgaaacagaagtaattgtatttattaaagtggtgcagttttttcggatattgcgcattttcaagttaatcgcgcctaagctccttcaaatcatagataagaggatgtctcatcagaagacattctggtatggcatcctgaagggatatgtacagggcgaggctgatattatgacgattatagaccagataacatctagcaaacagataaaacaaatgcttcttaaacaggtgatcagaaacatggagcatgccatcaaggagctgggttacctcgagtatgatcaccccgagatcgccgttaccgtcaaaactaaggaagagattaacgtcatgttgaacatggctaccgaaatccttaaagcttttgggttgaaaggaattatctctaagactgaaggcgccggaataaacaagctcatcatggcaaaaaaaaaagaggtactagactctcagtccatcatacgccctctgactgtggaggaggtcctttatcacattccgtggctggataaaaataaggactatataaatttcatccaggaaaaggcaaaggttgtcactttcgactgcgggaatgacatcttcgaagaaggcgacgaacctaaggggatctacattattatctcggggatggtaaagctggaaaagtctaagccaggactgggcatagatcaaatggtcgagtctaaggaaaaggatttccccatcatcgacacagactatatgttgtcaggggagattattggtgaaatcaactgcttgaccaatgagccaatgaagtactccgctacctgtaagacggtcgtggagacctgtttcattcctaagactcatctgtacgacgccttcgagcagtgcagcccactgattaagcagaagatgtggctaaaactaggtctcgccattactgccagaaaaatcagagagcacctgagctacgaggactggaattataacatgcaactgaagttatccaacatctatgttgttgacattcctatgagcactaagaccgacatctatgacgaaaatctcatatacgtgatcctgatccatggggcagtggaagattgtttgttaaggaaaacatacagggctccctttctcattcctatcacctgccaccagatccagtcgatagaggatttcacaaaggtagttataatccaaacacctattaacatgaagacttttagacgcaatatacggaagttcgtgccaaagcataaatcatacctgacacccggcttgatagggtccgtgggaacattagaggaggggatacaggaggagcgcaacgtaaaggaggacggcgcccacagcgcagccacagctcggagccctcagccttgctccctgttgggaacaaagttcaactgcaaagaaagccccagaatcaatcttaggaaggtccggaaagaatag

SEQ ID NO: 257842 - DNA, 3534 bp, Artificial Sequence
  derived and/or modified sequence
atggccggaatcttcaaggaattttttttctcgactgaagatctgccagaggtcatactgaccctgtctctgatatcatcgatcggtgccttcctgaatcggcacctggaagacttccctatacccgtgcccgtcattctcttcttgctgggctgctcctttgaagtcctcagctttactagtagtcaggtccagcgctatgctaacgccatccagtggatgagccccgatctgttttttcggattttcacacccgtagtcttcttcactaccgcgttcgacatggacacttacatgctgcagaaacttttctggcagatcctgctgattagtattcccggatttctagtaaactacattctcgtactgtggcacctcgcaagtgttaaccaattgcttttaaagcccacccagtggctgctcttcagcgccatcctagttagttccgatccaatgctaactgctgccgcaattcgggatttggggctgtcccggagtttgatttcgttaatcaatggggagagtctgatgacatctgttatttcgctcatcactttcacttccattatggactttgatcagcggttgcagtctaagcgtaatcacacactagccgaagagatagtcggcggtatatgttcctacatcatcgcctcattcctgtttgggatcctttcttctaagttaattcaattctggatgtccactgtgttcggcgacgacgtcaaccacattagtttaattttctccatcctgtacctgattttttacatatgcgagctagtaggtatgtcaggcatattcaccctcgcgatagtgggcctcttgcttaatagcacaagcttcaaggcggctatcgaagagacactgctcctggaattctggaccttcttgagccgcatcgcatttcttatggtgttcaccttcttcggtctgctgatcccggctcacacctacctgtacattgaatttgtcgatatatactattccctcaatatttacctgaccttgatcgtgctgagatttttaaccttgctgctaatctctccagttctgtctagggtaggacatgagttttcttggagatggatattcatcatggtgtgcagtgaaatgaaaggaatgccgaatatcaatatggccctactattagcctatagcgatttgtacttcggttcggacaaggagaaaagccaaattctcttccacggtgtgctcgtgtgtctgatcaccctagtggtgaaccggttcatacttcccgtggccgtgaccatcctggggctgagggatgccacctcaactaagtacaagagtgtgtgctgcacttttcaacacttccaggaattgacaaagtcagccgcttcagcccttaagtttgacaaggacttagctaacgccgactggaatatgatcgaaaaagctataacactggagaatccctacatgcttaacgaggaggaaactactgagcaccagaaggtgaagtgtccccactgcaacaaggaaatcgatgagattttcaacactgaggctatggaactcgctaataggcggctgctgagcgcacagattgcttcttaccaaaggcaataccgaaatgaaattctatctcagtccgcggtgcaggtcctggtgggagctgccgagtcttttggcgagaagaaggggaagtgtatgtcgctggatacgataaaaaactattcggaatctcagaaaaccgtgaccttcgccaggaaactgctcctcaattgggtgtataacactcgcaaagagaaggagggaccttctaagtacttctttttcagaatatgccacactatagtgtttactgaagagtttgagcatgtgggctacctggtgattctcatgaatatctttcctttcattatcagttggattagccagctcaatgtgatctaccactccgaacttaaacacactaactactgtttcctcactctgtacatcctcgaagctctcctgaaaattgcagcaatgcgcaaagactttttctcacatgcctggaacatctttgaactagctataaccctgattggcattctgcatgttatcctgattgaaattgacacgatcaagtacattttcaatgaaaccgaggtcatcgtcttcatcaaagtcgtgcagttctttaggatcctacgtatattcaagctgatcgccccaaaactgcttcagatcatcgacaaacggatgagtcaccagaagactttctggtacggcattttgaagggttacgtccagggcgaagcagacatcatgacgattattgaccagattacgtcaagtaagcagattaaacagatgctgctgaagcaagtgatcagaaatatggaacatgccattaaggagctgggttatctggagtatgatcaccccgagattgccgttactgtgaaaacgaaagaagagatcaatgtgatgctgaacatggcaaccgaaatcctgaaggcctttgggctgaagggcattatctccaaaaccgaaggcgctggaataaataagctaattatggctaagaaaaaggaagttcttgactcacagtcgattattagacccctcacggttgaagaggtcctgtaccacatcccttggttggacaaaaataaagactacattaacttcatacaagaaaaggctaaggttgttacctttgactgcggtaacgatatctttgaagagggtgatgagccaaagggaatctacatcatcatctcgggcatggtcaaattggagaagtccaagccaggtctcggaatcgatcagatggttgagagtaaagaaaaggattttcctattatcgacaccgattacatgctgtcgggcgaaatcatcggggagataaattgcctgaccaacgagcctatgaaatacagcgcaacttgcaaaaccgttgtggaaacatgttttatccctaaaacgcatttatatgacgcatttgagcagtgttcgccccttattaagcaaaagatgtggctaaaactggggttggctattacagccagaaagatccgtgaacacctgtcctatgaagactggaactacaatatgcaactcaagctgtcaaacatttacgtagtggatatcccgatgagcaccaagaccgacatatatgacgagaacctcatatatgtgatcctgatccacggcgctgttgaggactgcctcctgcgaaagacttaccgggcacctttcctcattccaattacatgccaccagatccagtccattgaagactttaccaaggtagtaataattcagactccaatcaatatgaagaccttccggagaaatattcggaagtttgtacccaagcataagagctatctgacgccaggattgatcggctctgtgggcacattagaagaagggatccaagaagagaggaacgtgaaagaggatggcgctcattctgctgcgacagctcggagcccccaaccttgttccttgttaggaacaaaatttaattgtaaagagtcaccaaggatcaacctgagaaaggtgcgaaaagagtag

SEQ ID NO: 257843 - DNA, 4172 bp, Artificial Sequence
  derived and/or modified sequence
aagagatgatgggcctgaagctaaccggtgcagactaggggcgagtttggagcaagtaactgtcagtgaggttgcagttggtctgggctgtttggctgtgagcgaaatagctgccccccacttctcacttgcacaccacgggatactcctcctgaggctccggatgattcagatggactgtgaaaaacaacaagatggatgatcatatggagattgcttctaacataaatctgcataaaaatttttctgaaacatggctggaatatttaaggagttttttttcagtactgaggacctccctgaagtcattctaacattgtctttgatcagctccattggagcatttttgaaccggcacttggaagactttccaattcctgtccctgtgatattatttttacttggatgcagttttgaagtattaagctttacatcttcacaggtccaaagatacgcaaacgccatacaatggatgagtccagacttattttttcgtatatttacaccagtagttttctttactactgcatttgacatggatacgtacatgcttcaaaagttattttggcagatacttttaatttcaattcccggctttttggttaattatatcttagttctttggcatctggcatctgtaaatcaattacttttgaagcctacccaatggttattattttcagctatccttgtgagttcagatcccatgctaaccgcagctgctataagagaccttgggctttctagaagcctcatcagtttaattaatggagaaagtctgatgacctctgttatatcattaattacatttactagtattatggattttgaccaaagactacaaagtaaaagaaaccataccttagctgaagagatcgtgggtggaatttgttcatatattatagcaagtttcttgtttggaattctaagttcaaaactgattcaattttggatgtcaactgtttttggtgatgatgtcaatcatataagtctcatcttttcaattctgtatctcatcttttatatttgtgagttagttggaatgtcaggaatatttactctggccattgtgggacttcttttaaattctacaagttttaaagcagcaattgaagaaacacttcttcttgaattctggacttttctatcacgtattgcttttctcatggtgtttactttctttggacttctaattcctgcacatacatatttgtatatagaatttgttgatatatactattcattaaatatctacttaacattgattgttttaagatttctgacccttcttttaataagccctgttttgtctcgagttggtcatgagttcagttggcgctggatattcataatggtctgtagtgaaatgaaggggatgcctaatataaacatggcccttctgcttgcctactctgatctttattttggatctgacaaagaaaaatctcaaatattatttcatggagtgttagtatgcctaataacccttgttgtcaatagatttattttgccagtggcagttactatactaggtcttcgtgatgccacatcaacaaaatataaatcggtttgttgcacatttcaacactttcaagagctaaccaagtctgcagcctctgcccttaaatttgacaaagatcttgctaatgctgattggaacatgattgagaaagcaattacacttgaaaacccatacatgttgaacgaagaagaaacaacagaacatcagaaggtgaaatgtccacactgtaacaaggaaatagatgagatctttaacactgaagcaatggagctggccaacaggcgtctcttgtcagcacaaatagcaagctaccagagacaatacaggaatgagattctgtcccagagtgctgtccaggtgttggttggtgcagcagaaagttttggtgagaagaagggaaaatgtatgagtcttgatacaataaagaattattctgaaagccaaaaaacagttacctttgctagaaaactactacttaattgggtgtataataccagaaaggaaaaagagggcccatcaaaatacttcttttttcgtatatgccatacaatagtatttactgaggaatttgaacatgttggataccttgtgatattaatgaatatatttccctttataatctcttggatatcccagttaaatgtaatctaccacagcgaattaaaacacactaactactgttttcttacactttatattctagaggcactacttaagatagcagcaatgaggaaggactttttttcacatgcctggaacatattcgagttagcaattacattaattggcatcttacatgtaatacttattgaaatagacaccattaagtatatttttaatgagactgaagtaatagtctttataaaagttgttcaattttttcgtatactacgcattttcaagctcatagcaccaaagttgctgcaaataatagataaaagaatgagtcatcagaagaccttttggtatggaatactaaaaggctatgtccaaggcgaagcagacataatgaccataattgatcagattacaagttctaaacagattaaacagatgttattaaagcaagtgataaggaatatggaacatgctataaaagagctaggctacttagagtatgatcacccagaaattgctgtcactgtgaaaacaaaggaagaaattaatgttatgctcaatatggctacagaaattcttaaggcttttggcttaaaaggaattattagtaaaactgaaggtgctggaattaataagttaatcatggccaaaaagaaagaggtgcttgattctcaatctattatcaggcctcttactgttgaagaagttctatatcatattccgtggctagataaaaacaaagattatataaacttcattcaggaaaaagccaaagttgtaacatttgattgtggaaatgatatatttgaagaaggtgatgagcccaaaggaatctatatcattatttcaggcatggtaaagcttgaaaaatcaaagccaggtttagggattgatcaaatggtggagtcaaaggagaaagattttccgataattgacacagactatatgctcagtggagaaataataggagagataaactgcttaactaatgaacctatgaaatattctgccacctgcaaaactgtagtggagacatgttttattcccaaaactcacttgtatgatgcttttgagcaatgctctcctctcattaaacaaaaaatgtggctaaaacttggactcgctattacagccagaaaaatcagagaacacttatcttatgaggattggaactacaatatgcaactaaagctctctaatatttatgtagtagatataccaatgagtaccaaaactgatatttatgatgaaaatctaatctatgttatcctcatacatggagctgtagaagattgtctgttacgaaaaacttatagagcacctttcttaattcctataacatgccatcagatacaaagtattgaagatttcacaaaagtagtgattattcaaactccgattaacatgaaaacattcagaaggaatattagaaagtttgttcctaaacataaaagttatcttacaccaggattaataggttcagttggaacattggaagaaggcattcaagaagaaagaaatgttaaggaggatggagcacacagtgccgccactgccaggagtccccagccttgctccctgctggggacaaagttcaactgtaaggagtcccctagaataaacctaaggaaagtcaggaaagagtaagactgttaagaagaccgaagcatgtattaatgctgtggctatgagaggcctcctgctgcagaaacacacttccctacatcaagaaggagtaacttcaggttggatcctgtgtggatgatcttggtgctaagcagaaaagaaatttggaccttgaaaccagcagttcaacatatatactttttgcaaaatttccttgatttaaaatatttgttattttaaatatacaaaacattttagaaaatcttagagtaaattttagtcttaaagccagaaaataagtttatagccatctagatattttgcatattgctcttacagcaataatggtttggttcactttatgaaaaataaaatgtattaaaatatagtttaaatgctgttcttg

SEQ ID NO: 257844 - protein, 544 aa, Artificial Sequence
  derived and/or modified sequence
MSSPGPSQPPAEDPPWPARLLRAPLGLLRLDPSGGALLLCGLVALLGWSWLRRRRARGIPPGPTPWPLVGNFGHVLLPPFLRRRSWLSSRTRAAGIDPSVIGPQVLLAHLARVYGSIFSFFIGHYLVVVLSDFHSVREALVQQAEVFSDRPRVPLISIVTKEKGVVFAHYGPVWRQQRKFSHSTLRHFGLGKLSLEPKIIEEFKYVKAEMQKHGEDPFCPFSIISNAVSNIICSLCFGQRFDYTNSEFKKMLGFMSRGLEICLNSQVLLVNICPWLYYLPFGPFKELRQIEKDITSFLKKIIKDHQESLDRENPQDFIDMYLLHMEEERKNNSNSSFDEEYLFYIIGDLFIAGTDTTTNSLLWCLLYMSLNPDVQEKVHEEIERVIGANRAPSLTDKAQMPYTEATIMEVQRLTVVVPLAIPHMTSENTVLQGYTIPKGTLILPNLWSVHRDPAIWEKPEDFYPNRFLDDQGQLIKKETFIPFGIGKRVCMGEQLAKMELFLMFVSLMQSFAFALPEDSKKPLLTGRFGLTLAPHPFNITISRR

SEQ ID NO: 257845 - protein, 501 aa, Artificial Sequence
  derived and/or modified sequence
MSSPGPSQPPAEDPPWPARLLRAPLVGNFGHVLLPPFLRRRSWLSSRTRAAGIDPSVIGPQVLLAHLARVYGSIFSFFIGHYLVVVLSDFHSVREALVQQAEVFSDRPRVPLISIVTKEKGVVFAHYGPVWRQQRKFSHSTLRHFGLGKLSLEPKIIEEFKYVKAEMQKHGEDPFCPFSIISNAVSNIICSLCFGQRFDYTNSEFKKMLGFMSRGLEICLNSQVLLVNICPWLYYLPFGPFKELRQIEKDITSFLKKIIKDHQESLDRENPQDFIDMYLLHMEEERKNNSNSSFDEEYLFYIIGDLFIAGTDTTTNSLLWCLLYMSLNPDVQEKVHEEIERVIGANRAPSLTDKAQMPYTEATIMEVQRLTVVVPLAIPHMTSENTVLQGYTIPKGTLILPNLWSVHRDPAIWEKPEDFYPNRFLDDQGQLIKKETFIPFGIGKRVCMGEQLAKMELFLMFVSLMQSFAFALPEDSKKPLLTGRFGLTLAPHPFNITISRR

SEQ ID NO: 257846 - DNA, 1635 bp, Artificial Sequence
  derived and/or modified sequence
atgtcgagccctggtccatcacagcctcccgcggaggatcctccgtggccagctcgcctgctcagagcccctctcggtttgctgagattagacccttcgggtggggcgttactgctttgtggccttgttgccttgctgggctggtcatggctaagacggcgcagagcccgagggataccacctggtcccaccccttggccgctagtgggaaatttcgggcatgtgctgttgcccccctttcttagacgaaggagctggctgagttctcgcaccagggccgcaggtatcgacccctccgtcatagggccgcaagtactactggcccacctggcgcgggtctatggctctattttcagcttcttcatcggccattacctggtagtggtgctgagtgacttccactctgtacgcgaggccctcgtgcagcaggccgaggtcttctctgacaggccgcgcgtgcccctgatctccatcgtgaccaaggagaaaggagtggtgtttgcgcactacgggccggtctggcgacagcagcggaagttcagccactccaccctccggcatttcgggttagggaaattgagcctggagcctaaaatcattgaggagttcaaatacgtgaaagccgagatgcagaagcacggagaggaccctttctgcccgttttcaatcattagcaacgctgttagtaacatcatttgctcgctctgttttggccagcgcttcgattacacaaacagtgaatttaagaagatgttaggcttcatgtctcggggcctggaaatatgtcttaactcccaagtcctgctagtcaatatctgtccatggctctattacctgccctttggccccttcaaggagttgagacagattgaaaaggacatcaccagtttcctgaagaaaattatcaaggatcatcaagaatcacttgatcgggagaaccctcaagatttcattgacatgtacctcttgcacatggaagaggaacgtaaaaacaactcaaactctagcttcgacgaggaatacttattctacattatcggcgatcttttcattgccggtacggacactacaaccaactctctgttgtggtgtctgctttatatgtccctcaaccccgatgtgcaggagaaggtgcatgaggagatcgaacgcgtaatcggagccaacagagccccttcactcacagacaaggcccaaatgccctataccgaagcaactatcatggaggtccagaggctgaccgtcgtggtgccacttgccatcccacatatgacctcagagaacacagtgcttcagggttacaccattcccaaaggaactctcatacttccgaatttatggagcgtgcacagggatccggccatctgggaaaagccagaggatttttaccccaacaggtttctcgatgatcagggccagttaatcaaaaaagaaacttttattccattcgggatcggtaagagagtctgtatgggtgaacagctcgccaagatggaacttttcctgatgttcgtgagcctgatgcaatcttttgcctttgccctgccggaggactctaagaagcccttactcacaggccggttcggactaacattagcccctcatccatttaacatcaccatctctaggaggtag

SEQ ID NO: 257847 - DNA, 1506 bp, Artificial Sequence
  derived and/or modified sequence
atgagttcccccgggccttctcagccacctgcagaggacccaccatggcctgcacgattgcttcgcgccccactggtggggaactttggccacgttctgctaccgcccttcctccgtcgcaggtcttggctgagtagcaggactcgcgctgccggtatagacccatccgtgatcgggccccaagtcctactggcccacctagcccgggtgtatggatcaatattctcgttttttattggacattacttagtggtggtcttaagcgacttccatagtgtccgcgaggcgctggtgcagcaggcagaggtgtttagcgacaggccccgcgtccctctgatatcgattgttaccaaagaaaaaggcgtcgtattcgcccactacggtcccgtctggagacagcagcgaaagttcagtcatagcacgctcagacatttcggtctcggaaagctcagtttagagcctaagattatcgaggagtttaagtatgtaaaagccgagatgcaaaaacatggcgaagacccgttctgcccattcagtatcatttccaacgccgtttccaacataatatgcagtctgtgctttgggcaaaggttcgactatactaacagtgaattcaagaagatgttgggattcatgagccgcggcctggaaatatgccttaactcccaggtgctgctggtaaatatctgtccttggctctactacctgccctttggcccgtttaaggaacttaggcagatcgaaaaggatattaccagtttccttaagaagatcattaaggatcaccaagaatctctggaccgcgagaatcctcaggacttcattgacatgtacctgctgcatatggaggaggagcgcaaaaacaatagtaatagcagctttgatgaggaataccttttctatattataggagatttattcatcgccggcactgatacaaccactaattctctcctctggtgtctcttgtacatgagtctgaatcctgacgtgcaggaaaaggttcacgaagagattgaacgtgtgataggcgccaaccgtgcaccatcccttactgacaaagcccaaatgccttatacagaggccaccatcatggaggtacaacgactgacagtagttgtgcccctggctatcccccacatgacaagtgagaataccgtactgcagggctataccatcccaaagggaaccctgatcctccccaacttatggtctgttcaccgagatcctgccatctgggagaagcctgaggatttttatcccaatcggttcctggacgatcaggggcagttgattaagaaagagaccttcattcctttcggaatagggaagcgggtgtgcatgggtgaacagttagcaaagatggaactcttcctcatgttcgtatccctaatgcagtctttcgcctttgcgctccctgaggattcaaagaagccattgctgaccggtcgctttggcctcactctggctcctcaccctttcaatatcacaattagccgtcggtag

SEQ ID NO: 257848 - DNA, 1635 bp, Artificial Sequence
  derived and/or modified sequence
atgagcagccctggccccagccagcccccagctgaggaccccccctggccagcccggctgctgcgggcccccctgggcctgctgcggctggaccccagcggcggggccctgctgctgtgtggcctggtggccctgctgggctggagctggctgcggcggcggcgggcccggggcatccccccaggccccaccccctggcccctggtgggcaactttggccacgtgctgctgccccccttcctgcggcggcgctcctggctgagcagcaggaccagggctgctggcatcgaccccagcgtgattggcccccaggtgctgctggcccacctggcccgggtgtatggcagcatcttctccttcttcatcggccactacctggtggtggtgctgagtgacttccacagcgtgcgggaggccctggtgcagcaggccgaggtgttcagtgaccggccccgggtgcccctcatcagcatcgtgaccaaggagaagggcgtggtgtttgcccactacggccctgtgtggaggcagcagaggaagttcagccacagcaccctgcggcacttcggcctgggcaagctgagcctggagcccaagatcatcgaggagttcaagtatgtgaaggccgagatgcagaagcatggagaggaccccttctgccccttcagcatcatcagcaatgctgtgagcaacatcatctgcagcctgtgcttcggccagagatttgactacaccaacagcgagttcaagaagatgctgggcttcatgagccggggcctggagatctgcctgaacagccaggtgctgctggtgaacatctgcccctggctgtactacctgcccttcggccccttcaaggagctgcggcagatcgagaaggacatcaccagcttcctgaagaagatcatcaaggaccaccaggagagcctggaccgggagaacccccaggacttcatcgacatgtacctgctgcacatggaggaggagaggaagaacaacagcaacagcagctttgatgaggagtacctgttctacatcatcggggacctcttcatcgccggcacagacaccaccaccaacagcctgctgtggtgcctgctgtacatgagcctgaacccagatgtgcaggagaaggtgcatgaggagattgaaagagtcatcggggccaacagagcccccagcctgacagacaaggcccagatgccctacacagaggccaccatcatggaggtgcagaggctgactgtggtggtgcccctggccatcccccacatgaccagtgaaaatacagtgctgcagggctacaccatccccaagggcaccctcatcctgcccaacctgtggagcgtgcaccgggaccctgccatctgggagaagccagaggacttctaccccaaccgcttcctggatgaccagggccagctgatcaagaaggagaccttcatcccctttggaattggcaagagggtgtgcatgggagagcagctggccaagatggagctgttcctgatgtttgtgtccctgatgcagagctttgcctttgccctgcctgaggacagcaagaagcccctgctgaccggccgcttcggcctgaccctggccccccaccccttcaacatcaccatcagcagaagatag

SEQ ID NO: 257849 - DNA, 1506 bp, Artificial Sequence
  derived and/or modified sequence
atgagcagccctggccccagccagcccccagctgaggaccccccctggccagcccggctgctgcgggcccccctggtgggcaactttggacatgtgctgctgccccccttcctgcggcggcgctcctggctgagcagcaggaccagggctgctggcatcgaccccagcgtcatcggcccccaggtgctgctggcccacctggcccgggtgtatggcagcatcttctccttcttcatcggccactacctggtggtggtgctgagtgacttccacagcgtgcgggaggccctggtgcagcaggccgaggtgttcagtgaccggccccgggtgcccctcatcagcatcgtgaccaaggagaagggcgtggtgtttgcccactacggccctgtgtggaggcagcagaggaagttcagccacagcaccctgcggcacttcggcctgggcaagctgagcctggagcccaagatcatcgaggagttcaagtatgtgaaggccgagatgcagaagcacggggaggaccccttctgccccttcagcatcatcagcaatgctgtgagcaacatcatctgcagcctgtgcttcggccagagatttgactacaccaacagcgagttcaagaagatgctgggcttcatgagccggggcctggagatctgcctgaacagccaggtgctgctggtgaacatctgcccctggctgtactacctgcccttcggccccttcaaggagctgcggcagatcgagaaggacatcaccagcttcctgaagaagatcatcaaggaccaccaggagagcctggaccgggagaacccccaggacttcatcgacatgtacctgctgcacatggaggaggagaggaagaacaacagcaacagcagctttgatgaggagtacctgttctacatcattggagacctcttcatcgccggcacagacaccaccaccaacagcctgctgtggtgcctgctgtacatgagcctgaacccagatgtgcaggagaaggtgcatgaggagattgagcgggtgattggagccaacagagcccccagcctgacagacaaggcccagatgccctacacagaggccaccatcatggaggtgcagaggctgactgtggtggtgcccctggccatcccccacatgaccagcgagaacacagtgctgcagggctacaccatccccaagggcaccctcatcctgcccaacctgtggagcgtgcaccgggaccctgccatctgggagaagccagaggacttctaccccaaccgcttcctggatgaccagggccagctgatcaagaaggagaccttcatccccttcggcatcggcaagagggtgtgcatgggagagcagctggccaagatggagctgttcctgatgtttgtgtccctgatgcagagctttgcctttgccctgcctgaggacagcaagaagcccctgctgaccggccgcttcggcctgaccctggccccccaccccttcaacatcaccatcagcagaagatag

SEQ ID NO: 257850 - DNA, 1635 bp, Artificial Sequence
  derived and/or modified sequence
atgagcagccccggccccagccagccccccgccgaggaccccccctggcctgcccggctgctgagggccccactcgggctcctccgtctggatccatccgggggcgcactcttgctctgtgggctggttgctcttctggggtggtcctggctgagaagacgtagagctcggggcatccctccaggcccaaccccttggcccctcgttggcaatttcggacatgtcttgctccccccttttctccggagaaggagttggctgagcagtcgaactcgggccgcgggcattgatccatctgttatcggtcctcaggtcctgctagctcacctggcaagagtatatgggagtattttttcatttttcattggccattatctggttgtggttctgagtgattttcactctgtgcgagaagcattggtgcagcaggcggaggttttttccgaccggccacgagttcccctgattagcattgtaaccaaggagaagggtgttgtatttgcccactatggaccggtttggcggcaacaaagaaagttcagccactcaacacttcgccacttcgggctcgggaagctttctctcgagcccaaaatcatcgaagagttcaaatatgtcaaggcggaaatgcagaagcacggcgaggatccattctgtcccttctcaattattagcaacgccgttagcaacattatctgctcactttgttttggccagagattcgactacaccaacagtgaatttaagaagatgctcggcttcatgagcagggggctggaaatctgtctgaacagccaggtattgctggtgaacatctgtccgtggctgtactacttaccattcgggccatttaaggagctgcgacagatcgaaaaggacatcacgtcattcttgaagaagataataaaagatcaccaggagtcactggaccgcgaaaacccccaggatttcatcgatatgtatttgctacacatggaagaagaacgaaagaacaacagcaactcaagcttcgacgaggaatatctcttttacatcattggggatctcttcattgcggggaccgataccactacgaatagccttttatggtgtctgttgtatatgagcctcaaccccgatgttcaagagaaagtacacgaagagattgagcgggttatcggggctaatcgtgcccccagccttaccgacaaggcccagatgccatacacagaagcgacgatcatggaagtgcagcggctgactgtcgtggtaccccttgctatcccacacatgacctctgaaaatacggttctgcagggatacaccatcccaaaggggactctaatcctgcctaatctctggagcgtccatcgagatcccgccatatgggaaaaacctgaggacttctatccaaatcggttcttggacgaccagggacagctgatcaagaaggaaacgttcattccgtttggtatagggaagcgcgtgtgtatgggcgaacaattagcaaagatggagttattcctgatgtttgtctccctcatgcagtcattcgcttttgcgttaccagaagactcaaagaagcccctgctgactgggcgtttcggcctgacccttgcccctcaccctttcaacattaccatctccagaagatag

SEQ ID NO: 257851 - DNA, 1506 bp, Artificial Sequence
  derived and/or modified sequence
atgagcagccccggccccagccagccccccgccgaggaccccccctggccagctcgcctgctcagggccccgctcgtggggaatttcgggcacgtgctcctgccccccttcctccggcgacggtcgtggctttcttctcgcacccgggctgcggggattgatcctagcgtcataggcccccaggtgctgctggcgcatttggccagggtttatggaagcatcttttcctttttcattggacactatctggtggtggtgctatcagacttccactcagtcagggaagctctcgtgcaacaggctgaggtcttctccgataggcctagagttccattaattagcatcgtgacgaaagaaaagggggttgtgttcgcgcactacggcccagtgtggcggcaacagcgcaagtttagccactccacccttcgtcattttggcctgggtaagctgtctctggaaccaaaaatcatcgaagaatttaagtacgtgaaggcggaaatgcagaaacacggagaagaccctttctgcccttttagcatcatttctaacgctgtttctaacatcatctgcagcctctgtttcggacagaggttcgattatactaatagtgaatttaagaaaatgttgggattcatgtccagaggattagagatctgtcttaattcccaggtcctcctggtgaacatctgtccctggctttattatttgcccttcggaccttttaaggagctgagacaaattgaaaaggacataacatcgtttctgaaaaagatcatcaaagaccatcaggagagcctagacagagaaaatcctcaggattttatagatatgtatctactgcatatggaagaagagcggaaaaataatagcaactccagcttcgatgaagagtatctcttctacattattggggatttgtttatagccggaactgatacgaccacgaattccctgctctggtgcttactatacatgtcgcttaatccggatgtccaagagaaagtacacgaggaaatcgaacgcgtcattggagcgaaccgggctcccagcctgacagacaaggcgcagatgccctatacagaagctactattatggaggtgcagaggctcacggtggttgtccctctagcaatcccacacatgacctctgaaaacacagtccttcaaggatacactattcccaagggcactctgatactgccgaacttgtggagtgtgcaccgggaccctgccatctgggagaagccagaagatttctaccccaataggttcctggatgaccagggccagttgattaagaaagagacattcatcccgtttggcatagggaaacgagtgtgcatgggggagcagttagccaagatggagctgttcctaatgttcgtgtcactaatgcagtccttcgcctttgcactccccgaggactcaaagaagccactcctcaccggcaggttcggcttgacactggccccgcaccccttcaatattacaatttcccgtcggtag

SEQ ID NO: 257852 - DNA, 1635 bp, Artificial Sequence
  derived and/or modified sequence
atgtctagcccgggacccagtcaaccgcctgccgaggacccaccctggcctgcccgacttctgcgggctcctttggggctcctgcgcctcgacccatcaggcggagccttgctcctttgtggcctggtagcattactaggatggagctggctgcgccgacgcagagctcggggtatcccgcctggaccaactccatggccactcgtaggcaattttggccatgtattgctccctccctttctccggagaagatcttggctttcttctcggactcgtgctgccggaatcgacccatccgtgatcggtccgcaggtacttctggctcacctcgctagggtgtatgggtctattttttccttcttcatcggacactacctggttgttgtattgtccgattttcactcagtgagagaggcattagtgcaacaagcagaggtcttctctgatcgtccacgagttccactgatcagtattgtgacaaaggagaaaggcgtggtgtttgcccattacgggcctgtgtggcggcaacagaggaagttctctcactctaccctgcggcacttcggcctcgggaagctgagcctggagcctaagataatcgaggaatttaaatacgtcaaggctgagatgcagaagcatggtgaggatcctttctgtccattctcaattatctctaacgccgtgtccaacatcatttgctccctttgttttggccagcgcttcgattacaccaactctgagttcaaaaaaatgcttggcttcatgtcacgcggattagagatctgtctgaattctcaggtcctgcttgtcaacatctgcccatggctttattacctgcctttcgggcctttcaaagagctgaggcagattgaaaaggacattacgagctttctgaaaaagatcatcaaggaccaccaagaaagcttggaccgtgaaaacccacaggattttattgacatgtatttgctgcacatggaggaggagcgcaagaacaacagtaacagcagctttgacgaagaatatctgttctatattatcggagatctctttatcgccggaaccgacaccacaactaactcactgctgtggtgtctgctttatatgtcactgaaccccgacgtacaggaaaaagtccacgaggagatcgagagagtgattggagccaaccgggctccaagcctgaccgataaagctcaaatgccatatacggaagccacgataatggaggtgcaacgcttaaccgtcgttgtacccctggctatcccacatatgacctccgagaatactgtgctgcaaggttataccatccctaaaggcacgttgattctgccaaatctgtggtctgtgcaccgagatcctgcgatctgggagaaacccgaagacttctaccctaaccggttcctggacgaccaaggccagctcattaagaaggaaacatttatccccttcggaataggcaagcgtgtatgcatgggggaacagcttgcaaaaatggagttgttcctgatgtttgtgagtttaatgcagagctttgcatttgccctccctgaagacagcaagaagcccttgttaacgggcaggttcgggctgaccctggcacctcatccctttaacatcactatttctcgcaggtag

SEQ ID NO: 257853 - DNA, 1506 bp, Artificial Sequence
  derived and/or modified sequence
atgagctcacctggcccatctcaaccccctgcagaggatcccccttggccagctagactgctccgtgctcctctagtgggtaatttcgggcatgtgctactgcctccattccttagaaggcgctcatggcttagctcacggacaagagcagctggaatcgaccccagcgtgatcggtccccaggtgttactggctcatctcgcgagagtttacggctctattttcagtttcttcattggtcattacttggtggttgtgctgtcagatttccatagcgttagagaagctctcgtccagcaagctgaggttttcagcgaccgccctagagtgccactgatcagtattgtgacgaaagaaaagggtgtcgtctttgcccactacggcccagtgtggagacaacagcggaagttttctcattccacccttcggcacttcgggctgggcaagcttagcctggagcccaagatcatcgaggaatttaagtatgtaaaagccgaaatgcagaagcatggggaggatcctttttgccccttttccataataagtaacgctgtgtcgaatattatatgcagcctgtgtttcggccagcggttcgattacacgaattccgagttcaagaagatgctcggttttatgagccgagggctagagatctgtcttaattctcaggtattactcgtaaacatctgtccatggctctactacctgccctttggcccttttaaggaactgaggcaaattgagaaagacattacctcgttcttgaagaagatcattaaagatcaccaggagagtctggaccgagagaatcctcaggactttattgacatgtacctgctgcatatggaggaggagcgaaaaaacaatagtaatagcagcttcgacgaagagtacctcttttatatcataggcgatcttttcatagccggaactgataccaccacaaattcactgctctggtgcctcctttacatgagtcttaatccggatgtgcaggagaaagtgcacgaagaaattgagcgggtgatcggtgcaaaccgagccccaagcttgacagataaggcccagatgccttatacagaagccaccattatggaagtgcaaaggcttaccgtcgtcgtgccccttgcaatacctcacatgacttctgagaataccgtgctgcagggctacaccattcctaaagggacactgatcctgcctaacctgtggtccgtgcatagggaccctgcaatctgggaaaagcctgaagacttctaccctaatcggttcctggacgaccaagggcagctgattaagaaagaaacctttatcccctttgggatcggcaaaagggtgtgcatgggggagcagttagcaaaaatggagttgtttctgatgttcgtaagtttgatgcagagtttcgcctttgccctgcctgaagattcaaagaagccactgctcaccgggaggtttggacttaccctcgctccccacccatttaacattactatttctcggaggtag

SEQ ID NO: 257854 - DNA, 4944 bp, Artificial Sequence
  derived and/or modified sequence
accggacttcggggcaaacttcaggtcccccgcctgctagcccgccaaccccctccgccaggcagccggcgcgcctccaggttccgcccaggcgtcgctgagtggcggcggcggggagaatgcgcgcggcgcagccaatccgggggcgttcctacaccccctgcccgcccccgaccttccagagcagagcaggacactggcgccgcgggtcaggcagctgcgtgcgcgtctcctccaggcagcaaggggaacccgaggccgccggcgcccggaccatgtcgtctccggggccgtcgcagccgccggccgaggacccgccctggcccgcgcgcctcctgcgtgcgcctctggggctgctgcggctggaccccagcgggggcgcgctgctgctatgcggcctcgtagcgctgctgggctggagctggctgcggaggcgccgggcgcggggcatcccgcccgggcccacgccctggcctctggtgggcaacttcggtcacgtgctgctgcctcccttcctccggcggcggagctggctgagcagcaggaccagggccgcagggattgatccctcggtcataggcccgcaggtgctcctggctcacctagcccgcgtgtacggcagcatcttcagcttctttatcggccactacctggtggtggtcctcagcgacttccacagcgtgcgcgaggcgctggtgcagcaggccgaggtcttcagcgaccgcccgcgggtgccgctcatctccatcgtgaccaaggagaagggggttgtgtttgcacattatggtcccgtctggagacaacaaaggaagttctctcattcaactcttcgtcattttgggttgggaaaacttagcttggagcccaagattattgaggagttcaaatatgtgaaagcagaaatgcaaaagcacggagaagaccccttctgccctttctccatcatcagcaatgccgtctctaacatcatttgctccttgtgctttggccagcgctttgattacactaatagtgagttcaagaaaatgcttggttttatgtcacgaggcctagaaatctgtctgaacagtcaagtcctcctggtcaacatatgcccttggctttattaccttccctttggaccatttaaggaattaagacaaattgaaaaggatataaccagtttccttaaaaaaatcatcaaagaccatcaagagtctctggatagagagaaccctcaggacttcatagacatgtaccttctccacatggaagaggagaggaaaaataatagtaacagcagttttgatgaagagtacttattttatatcattggggatctctttattgctgggactgataccacaactaactctttgctctggtgcctgctgtatatgtcgctgaaccccgatgtacaagaaaaggttcatgaagaaattgaaagagtcattggcgccaaccgagctccttccctcacagacaaggcccagatgccctacacagaagccaccatcatggaagtgcagaggctaactgtggtggtgccgcttgccattcctcatatgacctcagagaacacagtgctccaagggtataccattcctaaaggcacattgatcttacccaacctgtggtcagtacatagagacccagccatttgggagaaaccggaggatttctaccctaatcgatttctggatgaccaaggacaactaattaaaaaagaaacctttattccttttgggatagggaagcgggtgtgtatgggagaacaactggcaaagatggaattattcctaatgtttgtgagcctaatgcagagtttcgcatttgctttacctgaggattctaagaagcccctcctgactggaagatttggtctaactttagccccacatccatttaatataactatttcaaggagatgaagagcatctccaagaagagatggtaaaaagatatataaatacatatccttctaagcagattcttcctactgcaaaggacagtgaatccagcaactcagtggatccaagctgggctcagaggtcggaaggagggtagagcacactgggaggtttcatcttggaggattcctcagcaggatacttcagccattttagtaatgcaggtctgtgatttgggggatagaaaacaaagtacctatgaaacgggatatctggattttacttgcagtggcttccaccgatgggccaatcttctcatttcttagtgcctcagacatcccatatgtaaaatgagagtaataaaacttggcttctctctacctctcagcactaatgatggtcaaatgccttacatcttttctgatatctctaaaatgctgttaagttctggagaagaacttcaggagaagaagatctatcagctggcttttaaagacctatgacaacatgaaagtggtgttcagcctggaatgctttgtcagagatgggtgtggatttaggttatactgggggagaacttttctcagcacagattctatgccagcttctttgggcttgttctgtcactatctttttgtttatgattttagtttttactttttgtagatgtgggatgaagtggactctgtcgtgtatattgaggaaaaaagaaattataattttaaaaaatcccttgtaggattattatctaaatttatatgtctaacttctactacaactacaggaacagtgagccttgctacttctttagtagcttcttggcagaattcctttctactgagttatttgcaaagatgcagctctacctttttacttaaggcctgaatggtgagcatggggattttgatactgggactcatcaggaaaggattctgctttcaaactatactgaacattcctgtcctagcgtccctgccaccaggcccaatgcatctgatccttgaatatactctcaaagaattcactctctttttattaagagaactaaattgtttctaaatgtagatggtccctctggaaaagcagttttcagcaggggtggtaaccccttcagagggagtttggaaatgtgtgggtatgattcttggttatcataatgatgggggtgctactggccttctgctgccatgggaccaggatgctaaatgtcaaggtagtcctatacagtgaagaattgtcctgctcaagatgccaggatttcccccagtgagaacatgctctaaggaatgaccacccctttcttttattctcccacagtgctccatgtacagaagtaagcatagcagtcatatgagcaaccacattcctgaacctttcctcatgctggctctacacttaatcctttacttgtatgtttctgtaattcttacataaattctattaagagggtggcatactgtagtggatgaagctgaggcttatagtaggtaaggcacaaagttaaaaagtaacatcactgggtttcaaacctactggtctctgtgactaaagaacactttcagaaccacttcttgattctgccaccacttgatcccataacaggctaccccttggcctcatgctggagttgtgtgtgtctgtcttcatcccaggctgagctccttgaggtgaggatgttgtgctgtttgcctccctcacagtgccttggtcttagtggatgcccagttgtcttgtgaatgacttttaagaagtgtacttaagagaaaaatcctaccttatttgaataattacaagtcatgtttttgttgcttaaaggtgataaatcagtgtatattatttgttaatgtccattaaagccagtttttaaaaaaatcactggacttttgtgtttaccatttaaaacaaccattttaaacaaacttagaacgatgccttagctgtttataggtaacagaatgtaaactcccaccacctggagactaggccatatccagggacctcacactgactttcctaaaggagagaagcagctacgctgttcatactgatagagaagagggcaagaaaagatccagagtggctgttactttgaaaattaaacgaaagatgaaattctgaacttaaaacacttctgtttggccttctataactgatcacccttctttgctctgttttccagataaatggagacaccagatctccctaacctctgacttctgccgttagccatactctgtgtagttagatctcagtctgggaatggcattccagggcaattgtgaacatgaggctagatttttcctttgatttagcacattcctaggcagacttttgcaagctcaaaaaatgaaaataatatctgcttaaccaaaacataatcataggaagaagaaaaattttaaaatgattgatttttgactctacattctttatctaccatactgctcttttcctttttagaaatattactaagcactttccgtatagataaatgaaatacaggctaatctttaggtgtcttaggaatttttgctttttgaaaaagaaaagctaatagcctaactgcagaggaactgagtggatggggtagctgctgtatagatttttagatgagatgatacagtgtggattacactgtaccttgggcgggagagtttgttcttgatatggaattcatatgcttttgaattgcactaataactcagcattaacaagtatattactccttaaattatacatgcattttcaatattcctaaccaaatagtttatagcttattgagaagaagtctgttcttggagagatgttgaaattagatgtttattaaactttaaaatataatgccttaagctgtggcactttaaaaacatctttatatataaattgctaaaaggactgttaatgcttttctcagacacattggcattttacaattttgcacatggtttatttgaaatcaaaaaataactatactttgttttataagtctacctaatatctcatttttgattctcatcgttagcacagttttgttgcttttattaaactattttaa

SEQ ID NO: 257855 - DNA, 1879 bp, Artificial Sequence
  derived and/or modified sequence
agagcaggacactggcgccgcgggtcaggcagctgcgtgcgcgtctcctccaggcagcaaggggaacccgaggccgccggcgcccggaccatgtcgtctccggggccgtcgcagccgccggccgaggacccgccctggcccgcgcgcctcctgcgtgcgcctctggtgggcaacttcggtcacgtgctgctgcctcccttcctccggcggcggagctggctgagcagcaggaccagggccgcagggattgatccctcggtcataggcccgcaggtgctcctggctcacctagcccgcgtgtacggcagcatcttcagcttctttatcggccactacctggtggtggtcctcagcgacttccacagcgtgcgcgaggcgctggtgcagcaggccgaggtcttcagcgaccgcccgcgggtgccgctcatctccatcgtgaccaaggagaagggggttgtgtttgcacattatggtcccgtctggagacaacaaaggaagttctctcattcaactcttcgtcattttgggttgggaaaacttagcttggagcccaagattattgaggagttcaaatatgtgaaagcagaaatgcaaaagcacggagaagaccccttctgccctttctccatcatcagcaatgccgtctctaacatcatttgctccttgtgctttggccagcgctttgattacactaatagtgagttcaagaaaatgcttggttttatgtcacgaggcctagaaatctgtctgaacagtcaagtcctcctggtcaacatatgcccttggctttattaccttccctttggaccatttaaggaattaagacaaattgaaaaggatataaccagtttccttaaaaaaatcatcaaagaccatcaagagtctctggatagagagaaccctcaggacttcatagacatgtaccttctccacatggaagaggagaggaaaaataatagtaacagcagttttgatgaagagtacttattttatatcattggggatctctttattgctgggactgataccacaactaactctttgctctggtgcctgctgtatatgtcgctgaaccccgatgtacaagaaaaggttcatgaagaaattgaaagagtcattggcgccaaccgagctccttccctcacagacaaggcccagatgccctacacagaagccaccatcatggaagtgcagaggctaactgtggtggtgccgcttgccattcctcatatgacctcagagaacacagtgctccaagggtataccattcctaaaggcacattgatcttacccaacctgtggtcagtacatagagacccagccatttgggagaaaccggaggatttctaccctaatcgatttctggatgaccaaggacaactaattaaaaaagaaacctttattccttttgggatagggaagcgggtgtgtatgggagaacaactggcaaagatggaattattcctaatgtttgtgagcctaatgcagagtttcgcatttgctttacctgaggattctaagaagcccctcctgactggaagatttggtctaactttagccccacatccatttaatataactatttcaaggagatgaagagcatctccaagaagagatggtaaaaagatatataaatacatatccttctaagcagattcttcctactgcaaaggacagtgaatccagcaactcagtggatccaagctgggctcagaggtcggaaggagggtagagcacactgggaggtttcatcttggaggattcctcagcaggatacttcagccattttagtaatgcaggtctgtgatttgggggatagaaaacaaagtacctatgaaacgggatatctggattttacttgcagtggcttccaccgatg

SEQ ID NO: 257856 - DNA, 1635 bp, Artificial Sequence
  derived and/or modified sequence
atgagcagccccggccccagccagccccccgccgaggaccccccctggcccgccagactgctgagagcccccctgggcctgctgagactggaccccagcggcggcgccctgctgctgtgcggcctggtggccctgctgggctggagctggctgagaagaagaagagccagaggcatcccccccggccccaccccctggcccctggtgggcaacttcggccacgtgctgctgccccccttcctgagaagaagaagctggctgagcagcagaaccagagccgccggcatcgaccccagcgtgatcggcccccaggtgctgctggcccacctggccagagtgtacggcagcatcttcagcttcttcatcggccactacctggtggtggtgctgagcgacttccacagcgtgagagaggccctggtgcagcaggccgaggtgttcagcgacagacccagagtgcccctgatcagcatcgtgaccaaggagaagggcgtggtgttcgcccactacggccccgtgtggagacagcagagaaagttcagccacagcaccctgagacacttcggcctgggcaagctgagcctggagcccaagatcatcgaggagttcaagtacgtgaaggccgagatgcagaagcacggcgaggaccccttctgccccttcagcatcatcagcaacgccgtgagcaacatcatctgcagcctgtgcttcggccagagattcgactacaccaacagcgagttcaagaagatgctgggcttcatgagcagaggcctggagatctgcctgaacagccaggtgctgctggtgaacatctgcccctggctgtactacctgcccttcggccccttcaaggagctgagacagatcgagaaggacatcaccagcttcctgaagaagatcatcaaggaccaccaggagagcctggacagagagaacccccaggacttcatcgacatgtacctgctgcacatggaggaggagagaaagaacaacagcaacagcagcttcgacgaggagtacctgttctacatcatcggcgacctgttcatcgccggcaccgacaccaccaccaacagcctgctgtggtgcctgctgtacatgagcctgaaccccgacgtgcaggagaaggtgcacgaggagatcgagagagtgatcggcgccaacagagcccccagcctgaccgacaaggcccagatgccctacaccgaggccaccatcatggaggtgcagagactgaccgtggtggtgcccctggccatcccccacatgaccagcgagaacaccgtgctgcagggctacaccatccccaagggcaccctgatcctgcccaacctgtggagcgtgcacagagaccccgccatctgggagaagcccgaggacttctaccccaacagattcctggacgaccagggccagctgatcaagaaggagaccttcatccccttcggcatcggcaagagagtgtgcatgggcgagcagctggccaagatggagctgttcctgatgttcgtgagcctgatgcagagcttcgccttcgccctgcccgaggacagcaagaagcccctgctgaccggcagattcggcctgaccctggccccccaccccttcaacatcaccatcagcagaagatag

SEQ ID NO: 257857 - DNA, 1506 bp, Artificial Sequence
  derived and/or modified sequence
atgagcagccccggccccagccagccccccgccgaggaccccccctggcccgccagactgctgagagcccccctggtgggcaacttcggccacgtgctgctgccccccttcctgagaagaagaagctggctgagcagcagaaccagagccgccggcatcgaccccagcgtgatcggcccccaggtgctgctggcccacctggccagagtgtacggcagcatcttcagcttcttcatcggccactacctggtggtggtgctgagcgacttccacagcgtgagagaggccctggtgcagcaggccgaggtgttcagcgacagacccagagtgcccctgatcagcatcgtgaccaaggagaagggcgtggtgttcgcccactacggccccgtgtggagacagcagagaaagttcagccacagcaccctgagacacttcggcctgggcaagctgagcctggagcccaagatcatcgaggagttcaagtacgtgaaggccgagatgcagaagcacggcgaggaccccttctgccccttcagcatcatcagcaacgccgtgagcaacatcatctgcagcctgtgcttcggccagagattcgactacaccaacagcgagttcaagaagatgctgggcttcatgagcagaggcctggagatctgcctgaacagccaggtgctgctggtgaacatctgcccctggctgtactacctgcccttcggccccttcaaggagctgagacagatcgagaaggacatcaccagcttcctgaagaagatcatcaaggaccaccaggagagcctggacagagagaacccccaggacttcatcgacatgtacctgctgcacatggaggaggagagaaagaacaacagcaacagcagcttcgacgaggagtacctgttctacatcatcggcgacctgttcatcgccggcaccgacaccaccaccaacagcctgctgtggtgcctgctgtacatgagcctgaaccccgacgtgcaggagaaggtgcacgaggagatcgagagagtgatcggcgccaacagagcccccagcctgaccgacaaggcccagatgccctacaccgaggccaccatcatggaggtgcagagactgaccgtggtggtgcccctggccatcccccacatgaccagcgagaacaccgtgctgcagggctacaccatccccaagggcaccctgatcctgcccaacctgtggagcgtgcacagagaccccgccatctgggagaagcccgaggacttctaccccaacagattcctggacgaccagggccagctgatcaagaaggagaccttcatccccttcggcatcggcaagagagtgtgcatgggcgagcagctggccaagatggagctgttcctgatgttcgtgagcctgatgcagagcttcgccttcgccctgcccgaggacagcaagaagcccctgctgaccggcagattcggcctgaccctggccccccaccccttcaacatcaccatcagcagaagatag

SEQ ID NO: 257858 - protein, 448 aa, Artificial Sequence
  derived and/or modified sequence
MGEPGFFVTGDRAGGRSWCLRRVGMSAGWLLLEDGCEVTVGRGFGVTYQLVSKICPLMISRNHCVLKQNPEGQWTIMDNKSLNGVWLNRARLEPLRVYSIHQGDYIQLGVPLENKENAEYEYEVTEEDWETIYPCLSPKNDQMIEKNKELRTKRKFSLDELAGPGAEGPSNLKSKINKVSCESGQPVKSQGKGEVASTPSDNLDPKLTALEPSKTTGAPIYPGFPKVTEVHHEQKASNSSASQRSLQMFKVTMSRILRLKIQMQEKHEAVMNVKKQTQKGNSKKVVQMEQELQDLQSQLCAEQAQQQARVEQLEKTFQEEEQHLQGLEIAQGEKDLKQQLAQALQEHWALMEELNRSKKDFEAIIQAKNKELEQTKEEKEKMQAQKEEVLSHMNDVLENELQCIICSEYFIEQRDCSEDRALRAFERLPGSASLRWSGGFSLAVTPLL

SEQ ID NO: 257859 - DNA, 1347 bp, Artificial Sequence
  derived and/or modified sequence
atgggcgagcccggcttcttcgtgaccggcgacagagccggcggcagaagctggtgcctgagaagagtgggcatgagcgccggctggctgctgctggaggacggctgcgaggtgaccgtgggcagaggcttcggcgtgacctaccagctggtgagcaagatctgccccctgatgatcagcagaaaccactgcgtgctgaagcagaaccccgagggccagtggaccatcatggacaacaagagcctgaacggcgtgtggctgaacagagccagactggagcccctgagagtgtacagcatccaccagggcgactacatccagctgggcgtgcccctggagaacaaggagaacgccgagtacgagtacgaggtgaccgaggaggactgggagaccatctacccctgcctgagccccaagaacgaccagatgatcgagaagaacaaggagctgagaaccaagagaaagttcagcctggacgagctggccggccccggcgccgagggccccagcaacctgaagagcaagatcaacaaggtgagctgcgagagcggccagcccgtgaagagccagggcaagggcgaggtggccagcacccccagcgacaacctggaccccaagctgaccgccctggagcccagcaagaccaccggcgcccccatctaccccggcttccccaaggtgaccgaggtgcaccacgagcagaaggccagcaacagcagcgccagccagagaagcctgcagatgttcaaggtgaccatgagcagaatcctgagactgaagatccagatgcaggagaagcacgaggccgtgatgaacgtgaagaagcagacccagaagggcaacagcaagaaggtggtgcagatggagcaggagctgcaggacctgcagagccagctgtgcgccgagcaggcccagcagcaggccagagtggagcagctggagaagaccttccaggaggaggagcagcacctgcagggcctggagatcgcccagggcgagaaggacctgaagcagcagctggcccaggccctgcaggagcactgggccctgatggaggagctgaacagaagcaagaaggacttcgaggccatcatccaggccaagaacaaggagctggagcagaccaaggaggagaaggagaagatgcaggcccagaaggaggaggtgctgagccacatgaacgacgtgctggagaacgagctgcagtgcatcatctgcagcgagtacttcatcgagcagagagactgcagcgaggacagagccctgagagccttcgagagactgcccggcagcgccagcctgagatggagcggcggcttcagcctggccgtgacccccctgctgtag

SEQ ID NO: 257860 - DNA, 1347 bp, Artificial Sequence
  derived and/or modified sequence
atgggagaacccggctttttcgtgaccggagaccgagccgggggcaggtcctggtgcttaagaagagtgggaatgtctgcaggctggcttctgctggaggacggatgtgaggtgacagtgggccgtggctttggggtcacctaccagctcgtctcaaaaatctgccctctaatgatatcgcggaatcactgcgtcctgaaacaaaaccccgagggacagtggacaattatggacaacaagtcactgaatggggtatggttgaatcgcgcccgcctcgagcccctgcgtgtgtattccatccatcagggggactacattcagctgggagtacctctggagaacaaggaaaacgccgagtacgaatacgaggttaccgaggaagattgggagaccatatacccatgtctcagcccgaagaacgaccagatgatagaaaaaaacaaagaactgagaacgaagaggaagtttagcctggatgagcttgctggcccaggcgccgaggggccctctaatctgaagtctaagattaacaaagtctcatgtgagagtggccagcccgtcaaatctcagggaaaaggagaagtggctagtacgccatctgataatctagatccaaaacttacagccctggagccttcaaaaacaactggtgccccaatctatcctggttttccaaaggtcaccgaagttcaccacgagcagaaggctagtaattcaagcgccagtcagagatcgctgcagatgttcaaagtcactatgtccagaatcttgaggctgaagatccagatgcaggaaaaacatgaagctgttatgaacgttaaaaaacagactcagaagggtaattcgaagaaagtggtacaaatggagcaggagctgcaagacctgcagagccagctgtgcgccgagcaggctcagcagcaggctcgagttgagcagctggaaaagacattccaggaagaggagcagcacctccaaggactcgaaattgctcagggcgaaaaagacttgaaacagcagctagcccaggctttgcaggagcattgggcacttatggaagagctaaatagatctaagaaggacttcgaggccatcatccaggccaaaaacaaggagctggagcaaacaaaggaggaaaaagagaaaatgcaagctcagaaggaagaagtgctgtctcacatgaatgacgtcctggagaatgaactgcagtgtatcatttgcagtgagtacttcatcgagcagcgcgattgctcagaggatcgggcgctgcgtgcatttgagcgccttcctgggagtgcctcacttcgctggtccggagggttttcattagccgtcactccgctcctctag

SEQ ID NO: 257861 - DNA, 1347 bp, Artificial Sequence
  derived and/or modified sequence
atgggagagcccggcttctttgtgactggagacagagctgggggccgctcctggtgcctgcggcgggtgggcatgtctgctggctggctgctgctggaggatggctgtgaggtgacagtgggccggggcttcggcgtgacctaccagctggtgtccaagatctgccccctgatgatcagcaggaaccactgtgtgctgaagcagaaccctgagggccagtggaccatcatggacaacaagagcctgaatggagtgtggctgaacagagcccggctggagcccctgcgggtgtacagcatccaccagggcgactacatccagctgggcgtgcccctggagaacaaggaaaatgcagaatatgaatatgaggtgacagaggaggactgggagaccatctacccctgcctgagccccaagaatgaccagatgattgagaagaacaaggagctgcggaccaagaggaagttcagcctggatgagctggccggccctggagctgagggccccagcaacctgaagagcaagatcaacaaggtgtcctgtgagagcggccagcctgtgaagagccagggcaagggggaggtggccagcacccccagcgacaacctggaccccaagctgacagccctggagcccagcaagaccaccggggcccccatctacccaggcttccccaaggtgacagaggtgcaccacgagcagaaggccagcaacagcagcgccagccagaggagcctgcagatgttcaaggtgaccatgagccgcatcctgcggctgaagatccagatgcaggagaagcatgaagctgtgatgaatgtgaagaagcagacccagaagggcaacagcaagaaggtggtgcagatggagcaggagctgcaggacctgcagagccagctgtgtgccgagcaggcccagcagcaggcccgggtggagcagctggagaagaccttccaggaggaggagcagcacctgcagggcctggagatcgcccagggcgagaaggacctgaagcagcagctggcccaggccctgcaggagcactgggccctgatggaggagctgaacagaagcaagaaggactttgaggccatcatccaggccaagaacaaggagctggagcagaccaaggaggagaaggagaagatgcaggcccagaaggaggaggtgctgagccacatgaatgatgtgctggagaatgagctgcagtgcatcatctgcagcgagtacttcatcgagcagagggactgcagcgaggaccgggccctgcgggcctttgagcggctgcccggcagcgccagcctgcgctggagcggcggcttcagcctggccgtgacccccctgctgtag

SEQ ID NO: 257862 - DNA, 1347 bp, Artificial Sequence
  derived and/or modified sequence
atgggcgagcccggcttcttcgtgaccggcgaccgggccggcggcagatcatggtgcctacgtagggtgggcatgtcagctggatggctgcttctggaagacggttgcgaagttacagtggggagaggctttggggtgacatatcaactggtgagcaaaatatgtccattgatgattagccgaaatcattgcgtgctgaaacagaaccctgagggccaatggactataatggataataaaagtctcaatggagtttggctgaaccgcgctcggttggagcccctgcgggtctacagcattcaccagggtgactatattcaattgggagtcccacttgagaacaaggagaacgccgagtatgagtacgaggtgactgaagaagactgggagaccatatacccatgcttgtcccccaagaacgaccagatgattgagaaaaataaagaactccgcacgaaaaggaaattttccttagacgaactggccggccctggggcagagggcccctccaatttgaaaagcaagatcaataaggtctcgtgcgaatcaggccagcctgttaaatcccaaggaaagggcgaagtagcctccactccttctgacaacctggaccctaaattgaccgcccttgaaccatccaaaactacaggggcaccaatctatcctggcttccccaaagtcactgaggtccaccacgagcagaaggctagcaactcctctgccagtcagcgaagcctccaaatgtttaaagtgactatgtccagaatcttgcgcctgaagatccaaatgcaggagaagcacgaagccgtcatgaatgtcaagaaacagacccagaaaggtaattcgaaaaaggtggtgcagatggaacaggagttacaggacctgcaatcacagctgtgcgcggaacaggcacaacaacaggctagggtggagcaattggaaaagaccttccaggaagaagaacaacacttgcaagggctcgaaatcgcccagggtgaaaaggacctcaaacaacagctggcacaagctctgcaggagcactgggcgctgatggaggagcttaacaggagcaaaaaggattttgaggcaatcatccaagcgaagaacaaagaattggagcagactaaagaggaaaaggaaaagatgcaggcccagaaagaagaggtactcagccatatgaatgatgttcttgaaaatgagctgcagtgcatcatctgcagcgaatacttcatcgagcagagggattgctctgaagatcgggcactgcgcgcattcgagagactccccgggtccgccagcctgcgctggtcaggggggttctccttggcagttactccactgctgtag

SEQ ID NO: 257863 - DNA, 1347 bp, Artificial Sequence
  derived and/or modified sequence
atgggggaacctggcttctttgtgactggggatcgggcagggggtcgaagttggtgtctacgacgcgtcggaatgagcgcaggatggctcttgctggaggatggctgtgaggttactgtggggaggggattcggggtgacttatcagctagtctctaagatttgccctctgatgataagccggaatcattgcgttctcaagcagaacccggagggccagtggacgatcatggacaacaaaagcctgaatggcgtttggcttaatagagcacggctcgagccactgcgagtctatagtatccaccagggggattacattcaattgggcgttcccctcgaaaataaggagaacgcagagtatgagtatgaagtgaccgaggaggactgggagactatttacccctgtttgtctccgaagaacgaccagatgatagaaaagaataaggagctgcggactaagagaaaattctccttggatgaactggccggaccgggagccgaaggcccttcgaatttgaaatcgaagattaacaaagtgtcgtgtgagtccggccagcccgtaaaatctcaaggaaagggcgaggttgcgagcaccccatcagacaatctggatccgaagctcactgcacttgaaccctccaaaacaaccggagcacctatctaccctgggtttcctaaagtgaccgaagttcaccatgaacaaaaagcaagcaatagctctgccagccaacgatcactccagatgtttaaagtcacaatgagcaggatcctcaggctaaagatacaaatgcaggagaagcatgaagcggtgatgaacgtgaaaaaacagacccaaaaaggcaactctaagaaagtggttcagatggaacaggagctacaagacctacagagccagctctgcgcagagcaggcccagcaacaggctcgagtggagcagttagagaaaacattccaagaggaggaacagcatttacaggggctggaaattgctcagggggagaaggatctgaaacagcagctggcacaggccctccaggagcactgggctctgatggaagaactgaaccgctccaagaaagacttcgaagcaattatccaggccaaaaacaaggagttggagcagaccaaggaggaaaaggaaaagatgcaggcacaaaaagaggaagtgctcagtcacatgaatgacgtactcgaaaacgaactgcagtgtattatttgtagcgagtattttatagagcaaagagattgttccgaggaccgcgcactgcgagcctttgagcgactgcctggctctgcgagcttgaggtggagcggaggatttagtctggcagtgacaccccttctgtag

SEQ ID NO: 257864 - DNA, 1800 bp, Artificial Sequence
  derived and/or modified sequence
gggatgcacagaggcagccagaacctaggtcagggtctcgctcggtgctgaccgcccccggggtcgagtaggcgatgggggagcccggcttcttcgtcacaggagaccgcgccggtggccggagctggtgcctgcggcgggtggggatgagcgccgggtggctgctgctggaagatgggtgcgaggtgactgtaggacgaggatttggtgtcacataccaactggtatcaaaaatctgccccctgatgatttctcgaaaccactgtgttttgaagcagaatcctgagggccaatggacaattatggacaacaagagtctaaatggtgtttggctgaacagagcgcgtctggaacctttaagggtctattccattcatcagggagactacatccaacttggagtgcctctggaaaataaggagaatgcggagtatgaatatgaagttactgaagaagactgggagacaatatatccttgtctttccccaaagaatgaccaaatgatagaaaaaaataaggaattgagaactaaaaggaaattcagtttggatgaattagcaggtcctggagctgaaggcccctcaaatttgaaatccaaaataaataaagtgtcttgtgaatctggtcagccagtgaaatcacaggggaaaggtgaagtggccagtacaccctctgacaatttggatcctaagttgactgcccttgagccaagtaagaccacaggggctcccatttaccctggcttccccaaagtcacagaggttcatcatgagcagaaagcctcaaactcttcagcatctcagagaagcttacagatgtttaaggtgaccatgtccaggattctgaggctcaaaatacagatgcaggaaaaacatgaagccgttatgaatgtgaaaaagcagacccaaaaggggaactcaaagaaagttgtgcaaatggagcaggaacttcaggacttacagtcccagctgtgtgcagagcaggctcagcagcaggcaagagtggagcaactagagaagactttccaggaagaggaacagcatcttcagggtttggagatagcccaaggagaaaaggacctgaagcaacagctggcccaggctctgcaggagcattgggctctaatggaagagctaaatcgcagcaagaaggactttgaagcaatcattcaagccaagaacaaagaattagagcagaccaaggaagagaaggagaagatgcaagcacagaaggaagaagttcttagccacatgaatgatgtgctagagaatgagctccaatgtattatttgttcagaatacttcattgagcaaagagattgttctgaagaccgtgctctaagggcatttgaaagactgccaggtagtgcgagcctgagatggtctggaggattctctctagccgtgactccgctgctctgaaggtcaactgagaagtcttgtgggacagagacttgagttaggaagccctcagtcacttgccttccacggtggccagccctgctgccatcattggctgaagcaccaccaggattcacggcacccaactgcttcagggtacttcgtagactctgcctcactacatgtcgaaagagttatttgagttctcttctgtttttttttaatttgttgttgttgttactgttttgatacctcggaaacacctccgttgacagttgttttggataggttgggtgtaccccatggctgcctctgaaggcagtgtctattttgagaggatggcttacctcttctttgtgaaaatactatctcatttcctggaaataaaatgtaaaacctg

SEQ ID NO: 257865 - protein, 453 aa, Artificial Sequence
  derived and/or modified sequence
MEDIQTNAELKSTQEQSVPAESAAVLNDYSLTKSHEMENVDSGEGPANEDEDIGDDSMKVKDEYSERDENVLKSEPMGNAEEPEIPYSYSREYNEYENIKLERHVVSFDSSRPTSGKMNCDVCGLSCISFNVLMVHKRSHTVEKPYKCEFCGRSYKQRSSLEEHKERCRTFLQSTDPGDTASAEARHIKAEMGSERALVLDRLASNVAKRKSSMPQKFIGEKRHCFDVNYNSSYMYEKESELIQTRMMDQAINNAISYLGAEALRPLVQTPPAPTSEMVPVISSMYPIALTRAEMSNGAPQELEKKSIHLPEKSVPSERGLSPNNSGHDSTDTDSNHEERQNHIYQQNHMVLSRARNGMPLLKEVPRSYELLKPPPICPRDSVKVINKEGEVMDVYRCDHCRVLFLDYVMFTIHMGCHGFRDPFECNMCGYRSHDRYEFSSHIARGEHRALLK

SEQ ID NO: 257866 - DNA, 1362 bp, Artificial Sequence
  derived and/or modified sequence
atggaggacatccagaccaacgccgagctgaagagcacccaggagcagagcgtgcccgccgagagcgccgccgtgctgaacgactacagcctgaccaagagccacgagatggagaacgtggacagcggcgagggccccgccaacgaggacgaggacatcggcgacgacagcatgaaggtgaaggacgagtacagcgagagagacgagaacgtgctgaagagcgagcccatgggcaacgccgaggagcccgagatcccctacagctacagcagagagtacaacgagtacgagaacatcaagctggagagacacgtggtgagcttcgacagcagcagacccaccagcggcaagatgaactgcgacgtgtgcggcctgagctgcatcagcttcaacgtgctgatggtgcacaagagaagccacaccgtggagaagccctacaagtgcgagttctgcggcagaagctacaagcagagaagcagcctggaggagcacaaggagagatgcagaaccttcctgcagagcaccgaccccggcgacaccgccagcgccgaggccagacacatcaaggccgagatgggcagcgagagagccctggtgctggacagactggccagcaacgtggccaagagaaagagcagcatgccccagaagttcatcggcgagaagagacactgcttcgacgtgaactacaacagcagctacatgtacgagaaggagagcgagctgatccagaccagaatgatggaccaggccatcaacaacgccatcagctacctgggcgccgaggccctgagacccctggtgcagaccccccccgcccccaccagcgagatggtgcccgtgatcagcagcatgtaccccatcgccctgaccagagccgagatgagcaacggcgccccccaggagctggagaagaagagcatccacctgcccgagaagagcgtgcccagcgagagaggcctgagccccaacaacagcggccacgacagcaccgacaccgacagcaaccacgaggagagacagaaccacatctaccagcagaaccacatggtgctgagcagagccagaaacggcatgcccctgctgaaggaggtgcccagaagctacgagctgctgaagcccccccccatctgccccagagacagcgtgaaggtgatcaacaaggagggcgaggtgatggacgtgtacagatgcgaccactgcagagtgctgttcctggactacgtgatgttcaccatccacatgggctgccacggcttcagagaccccttcgagtgcaacatgtgcggctacagaagccacgacagatacgagttcagcagccacatcgccagaggcgagcacagagccctgctgaagtag

SEQ ID NO: 257867 - DNA, 1362 bp, Artificial Sequence
  derived and/or modified sequence
atggaagatatccagactaatgcggagttaaagagcacccaggagcaatctgttcccgcagaaagtgcagctgttctgaacgactattctctcaccaaaagtcacgaaatggaaaacgttgactctggcgaagggcctgcaaatgaggacgaagatatcggcgacgattcgatgaaggtaaaagacgagtactcggagcgcgacgaaaatgttcttaaatccgaaccgatggggaatgctgaagaacctgagattccgtacagttacagccgggagtacaatgaatatgagaatattaagctagagagacacgtggtctctttcgatagctcacgtcccactagtgggaagatgaactgcgatgtctgcggactgagttgcatttcttttaacgtgctgatggttcacaagcggtcccacaccgtcgagaaaccctacaagtgcgaattttgtggcagaagttacaagcagagatcatctttagaagagcataaagagagatgcaggacctttctccaaagtacagaccctggagatacagccagcgcagaggcccggcatatcaaggctgagatgggcagtgagcgggccctcgttctggacagacttgcctccaatgtggcaaaacggaagtcgtccatgcctcagaaatttatcggggagaaaaggcactgcttcgacgtcaactataattctagctacatgtatgaaaaagagtctgaacttattcagactaggatgatggatcaggccattaacaacgcaatttcttacctgggcgccgaagccttgagacccttggtccaaacacctcccgcaccaacgtccgagatggttccagtgatctcctccatgtaccccattgctttaacgagagctgagatgtccaatggcgccccacaggaactggaaaagaaaagtatccacctgccagaaaagagtgtccccagtgagagaggtctgagccctaataattccggccatgactccacggacactgactctaatcacgaggaaaggcaaaaccacatctaccaacagaatcatatggtgctgtccagagcacgtaacgggatgcctttgctgaaagaggtgcctcgttcctacgagctgcttaagccacctccaatttgcccccgggattctgttaaagtgatcaataaggaaggtgaagtgatggatgtctaccgatgcgaccactgtagggtgctttttttggattatgttatgtttaccattcacatgggttgccacggtttcagggaccccttcgagtgtaacatgtgcggctacaggagtcatgatcgctacgagttctcttcccacattgcccggggcgagcacagagctctcctcaagtag

SEQ ID NO: 257868 - DNA, 1362 bp, Artificial Sequence
  derived and/or modified sequence
atggaggacatccagaccaatgctgagctgaagagcacccaggagcagagcgtgcctgctgagagcgctgctgtgctgaatgactacagcctgaccaagagccatgagatggagaatgtggacagcggggagggccctgccaatgaagatgaagatattggagatgacagcatgaaggtgaaggatgagtacagcgagagagatgaaaatgtgctgaagtctgagcccatgggaaatgctgaggagcctgagatcccctacagctacagccgggagtacaatgaatatgagaacatcaagctggagcggcacgtggtgtcctttgacagcagccggcccaccagcggcaagatgaactgtgatgtgtgtggcctgagctgcatctccttcaacgtgctgatggtgcacaagaggagccacacagtggagaagccctacaagtgtgagttctgtggccgcagctacaagcagaggagcagcctggaggagcacaaggagcgctgcaggaccttcctgcagagcacagatcctggggacacagccagcgctgaggcccggcacatcaaggccgagatgggcagcgagcgggccctggtgctggaccggctggccagcaatgtggccaagaggaagagctccatgccccagaagttcatcggggagaagaggcactgctttgatgtgaactacaacagcagctacatgtatgagaaggagagcgagctgatccagaccaggatgatggaccaggccatcaacaatgccatctcctacctgggcgctgaggccctgcggcccctggtgcagaccccaccagcccccaccagcgagatggtgcctgtgatcagctccatgtaccccatcgccctgaccagggctgagatgagcaatggagccccccaggagctggagaagaagagcatccacctgcctgagaagtctgtgcccagcgagcggggcctgagccccaacaacagcggccatgacagcacagacacagacagcaaccacgaggagcggcagaaccacatctaccagcagaaccacatggtgctgagccgggccagaaatggcatgcccctgctgaaggaggtgcccaggagctatgagctgctgaagcccccacccatctgcccccgggacagcgtgaaggtgatcaacaaggagggggaggtgatggatgtgtaccgctgtgaccactgccgggtgctcttcctggactatgtgatgttcaccatccacatgggctgccacggcttccgggacccctttgagtgcaacatgtgtggctaccgcagccatgacagatatgagttcagcagccacatcgcccggggggagcaccgggccctgctgaagtag

SEQ ID NO: 257869 - DNA, 1362 bp, Artificial Sequence
  derived and/or modified sequence
atggaagatatacaaacaaatgcggaactgaaaagcactcaggagcagtctgtgcccgcagaaagtgcagcggttttgaatgactacagtttaaccaaatctcatgaaatggaaaatgtggacagtggagaaggcccagccaatgaagatgaagacataggagatgattcaatgaaagtgaaagatgaatacagtgaaagagatgagaatgttttaaagtcagaacccatgggaaatgcagaagagcctgaaatcccttacagctattcaagagaatataatgaatatgaaaacattaagttggagagacatgttgtctcattcgatagtagcaggccaaccagtggaaagatgaactgcgatgtgtgtggattatcctgcatcagcttcaatgtcttaatggttcataagcgaagccatactgtggagaaaccctacaaatgtgagttttgtggaaggagttacaagcagagaagttcccttgaggagcacaaggagcgctgccgtacatttcttcagagcactgacccaggggacactgcaagtgcggaggcaagacacatcaaagcagagatgggaagtgaaagagctctcgtactggacagattagcaagcaatgtggcaaaacgaaaaagctcaatgcctcagaaattcattggtgagaagcgccactgctttgatgtcaactataattcaagttacatgtatgagaaagagagtgagctcatacagacccgcatgatggaccaagccatcaataacgccatcagctatcttggcgccgaagccctgcgccccttggtccagacaccgcctgctcccacctcggagatggttccagttatcagcagcatgtatcccatagccctcacccgggctgagatgtcaaacggtgcccctcaagagctggaaaagaaaagcatccaccttccagagaagagcgtgccttctgagagaggcctctctcccaacaatagtggccacgactccacggacactgacagcaaccatgaagaacgccagaatcacatctatcagcaaaatcacatggtcctgtctcgggcccgcaatgggatgccacttctgaaggaggttccccgctcttacgaactcctcaagcccccgcccatctgcccaagagactccgtcaaagtgatcaacaaggaaggggaggtgatggatgtgtatcggtgtgaccactgccgcgtcctcttcctggactatgtgatgttcacgattcacatgggctgccacggcttccgtgaccctttcgagtgtaacatgtgtggatatcgaagccatgatcggtatgagttctcgtctcacatagccagaggagaacacagagccctgctgaagtga

SEQ ID NO: 257870 - DNA, 1362 bp, Artificial Sequence
  derived and/or modified sequence
atggaggacatccagaccaacgccgagctgaagagcacccaggagcagtcagtccccgctgagtctgccgcggttctgaacgattacagtctgactaagtcccacgagatggagaatgtggactccggcgaggggccagccaacgaggacgaagatatcggggatgacagcatgaaagtaaaagatgagtactctgagcgagacgagaacgtgctgaagtcagagccaatgggcaacgccgaggaaccagagatcccctactcctatagccgggaatataatgagtacgaaaacatcaaattggagaggcacgtggtatcattcgactccagccgaccaaccagcggcaagatgaactgtgacgtctgtggcctttcttgcatctccttcaacgtgttaatggttcacaagagatcccatactgtggaaaaaccgtataaatgtgagttctgcgggcgttcatacaagcagcgctcctccctggaggagcataaggaacgctgccgcacattcctacagagtacagatcccggcgataccgcgtctgctgaggccagacacatcaaggctgagatgggaagcgagcgggccctcgtgcttgaccgcctggccagcaacgtggcaaaaaggaagagctccatgccccagaaattcattggcgagaagaggcactgctttgacgttaactacaattcatcatacatgtacgagaaagagagtgaactcatccaaacccgtatgatggaccaagccatcaataatgccatatcttatctgggagctgaagcattgcggcctcttgtccagactcctccagctcctaccagcgagatggttccagtgatctcgtccatgtatcccattgcactgacacgcgccgaaatgtccaacggcgcacctcaggaactagaaaagaagtccatacacttacctgagaagtctgtgcccagcgagcggggcctctcaccaaacaatagcggacatgattccaccgatactgattcaaatcatgaggagagacaaaaccatatttatcaacaaaatcacatggtgctgtcccgggcccgcaacgggatgccactgctcaaagaggtaccacggtcttacgagctcctgaaacccccgcctatctgtcctcgggactcagtgaaggtgatcaataaagaaggcgaggtgatggatgtctacaggtgcgaccactgcagagtacttttcctcgactacgtgatgttcacaatacatatgggatgccacggattcagagaccctttcgaatgtaacatgtgtggttaccggtctcacgatcggtatgagttttcctcgcatattgccaggggtgagcaccgcgccctcctgaaatag

SEQ ID NO: 257871 - DNA, 1362 bp, Artificial Sequence
  derived and/or modified sequence
atggaagatatacagaccaacgcagagctgaaaagcacccaagagcagtccgtgccagctgagagcgcagcagtgctgaacgattatagcctgacaaaaagtcacgaaatggagaacgtggactctggggagggtcccgcaaacgaagacgaagacataggggatgacagcatgaaagtgaaagatgagtacagtgaacgggatgagaatgttcttaagtctgagcctatggggaatgccgaagagcctgagatcccttactcctactcaagggagtacaatgagtacgaaaacattaagctggagcgccatgtggtgtcctttgactcctcccgccctactagcggcaagatgaattgtgacgtctgcgggctatcttgtatcagctttaacgttttgatggtccacaaaaggtcccacactgtggaaaagccttataagtgcgaattttgtggacgctcatacaagcagcggtcttccttagaagaacacaaggagcgctgtaggaccttcctgcaatcaactgatcccggagacaccgcttctgccgaagcccgtcacattaaagctgaaatgggttcagagagagccctcgtcctggacagattggcatccaatgtcgcgaaacgtaaaagctccatgcctcagaagttcatcggggagaagcgccactgttttgatgtgaactataattcgagctatatgtacgagaaagagagtgagttgatccagacccgaatgatggaccaggctatcaataacgctataagttaccttggggctgaggccttgaggcccttagttcagacgccgcctgccccaacctcggaaatggtccctgtgatctctagcatgtatccgatcgcactgacacgcgcagaaatgtcaaatggcgcacctcaggagctggaaaagaagagcatccacctgccggaaaaaagtgtgccatcagagcgcggattgagtccaaataacagcgggcatgattctacagacacagatagcaaccacgaagagcgtcagaatcacatataccagcagaatcatatggtattatctcgcgcaaggaacggcatgccgctcctgaaggaggttcctcggtcatatgagctgcttaagcctcccccaatttgccccagggatagcgtcaaagtgattaacaaggaaggggaggtcatggacgtgtaccgctgcgaccactgccgggtcctgtttctagactacgtcatgtttacgattcatatgggttgccacggatttagagatccattcgagtgcaacatgtgtgggtacagatcccacgatcggtatgagttctctagccatatagctaggggagagcaccgcgctctactgaaatag

SEQ ID NO: 257872 - protein, 470 aa, Artificial Sequence
  derived and/or modified sequence
MEDIQTNAELKSTQEQSVPAESAAVLNDYSLTKSHEMENVDSGEGPANEDEDIGDDSMKVKDEYSERDENVLKSEPMGNAEEPEIPYSYSREYNEYENIKLERHVVSFDSSRPTSGKMNCDVCGLSCISFNVLMVHKRSHTGERPFQCNQCGASFTQKGNLLRHIKLHTGEKPFKCHLCNYACQRRDALTGHLRTHSASAEARHIKAEMGSERALVLDRLASNVAKRKSSMPQKFIGEKRHCFDVNYNSSYMYEKESELIQTRMMDQAINNAISYLGAEALRPLVQTPPAPTSEMVPVISSMYPIALTRAEMSNGAPQELEKKSIHLPEKSVPSERGLSPNNSGHDSTDTDSNHEERQNHIYQQNHMVLSRARNGMPLLKEVPRSYELLKPPPICPRDSVKVINKEGEVMDVYRCDHCRVLFLDYVMFTIHMGCHGFRDPFECNMCGYRSHDRYEFSSHIARGEHRALLK

SEQ ID NO: 257873 - DNA, 1413 bp, Artificial Sequence
  derived and/or modified sequence
atggaggacatccagaccaacgccgagctgaagagcacccaggagcagagcgtgcccgccgagagcgccgccgtgctgaacgactacagcctgaccaagagccacgagatggagaacgtggacagcggcgagggccccgccaacgaggacgaggacatcggcgacgacagcatgaaggtgaaggacgagtacagcgagagagacgagaacgtgctgaagagcgagcccatgggcaacgccgaggagcccgagatcccctacagctacagcagagagtacaacgagtacgagaacatcaagctggagagacacgtggtgagcttcgacagcagcagacccaccagcggcaagatgaactgcgacgtgtgcggcctgagctgcatcagcttcaacgtgctgatggtgcacaagagaagccacaccggcgagagacccttccagtgcaaccagtgcggcgccagcttcacccagaagggcaacctgctgagacacatcaagctgcacaccggcgagaagcccttcaagtgccacctgtgcaactacgcctgccagagaagagacgccctgaccggccacctgagaacccacagcgccagcgccgaggccagacacatcaaggccgagatgggcagcgagagagccctggtgctggacagactggccagcaacgtggccaagagaaagagcagcatgccccagaagttcatcggcgagaagagacactgcttcgacgtgaactacaacagcagctacatgtacgagaaggagagcgagctgatccagaccagaatgatggaccaggccatcaacaacgccatcagctacctgggcgccgaggccctgagacccctggtgcagaccccccccgcccccaccagcgagatggtgcccgtgatcagcagcatgtaccccatcgccctgaccagagccgagatgagcaacggcgccccccaggagctggagaagaagagcatccacctgcccgagaagagcgtgcccagcgagagaggcctgagccccaacaacagcggccacgacagcaccgacaccgacagcaaccacgaggagagacagaaccacatctaccagcagaaccacatggtgctgagcagagccagaaacggcatgcccctgctgaaggaggtgcccagaagctacgagctgctgaagcccccccccatctgccccagagacagcgtgaaggtgatcaacaaggagggcgaggtgatggacgtgtacagatgcgaccactgcagagtgctgttcctggactacgtgatgttcaccatccacatgggctgccacggcttcagagaccccttcgagtgcaacatgtgcggctacagaagccacgacagatacgagttcagcagccacatcgccagaggcgagcacagagccctgctgaagtag

SEQ ID NO: 257874 - DNA, 1413 bp, Artificial Sequence
  derived and/or modified sequence
atggaagatatccagacaaacgccgaacttaaatcaacacaggagcaaagcgtgccagccgagtcagccgccgtgctgaacgactattccctgaccaagagtcatgaaatggagaatgtagactccggggaggggcccgctaatgaagacgaggacatcggggatgacagcatgaaggttaaagatgaatactccgagcgggatgaaaacgtcctgaagagtgagcccatggggaatgctgaagagccagaaatcccctatagttacagccgcgaatacaatgaatacgaaaatatcaagctggagagacacgtggttagctttgattcttccagacctacatccggtaagatgaattgtgacgtgtgcggcttgagttgtattagcttcaacgtgctcatggttcataagagaagccataccggcgagcgcccattccagtgcaaccagtgcggagcttcgttcacccagaagggcaatctcctgaggcacatcaaattacataccggcgagaaacctttcaagtgtcatttatgcaattatgcctgccagaggagggatgccctcacaggacacttgcgaacccactctgcctccgccgaagcccgacacattaaagctgagatggggagtgaacgcgccttagtacttgaccggctggcctcaaacgtagcaaagagaaagagcagcatgcctcaaaagtttatcggcgaaaagaggcattgctttgatgtgaattacaattccagctacatgtacgaaaaagaatctgagctgattcagacacggatgatggatcaggccattaacaatgctatctcttatctgggcgcggaggccctgaggcccttagtgcagacccctcccgcccccactagcgagatggtccctgttatctcttctatgtatcctatcgcgctaactcgggctgagatgtctaatggggcaccacaagaactggaaaagaagtcaattcacctcccggaaaaaagtgtgccatcagagaggggcctgtctcccaataatagcggccatgatagcactgacacggacagcaatcatgaggaacggcagaaccacatttaccaacaaaatcacatggttctgtccagagcacgaaatggcatgccactgctcaaggaagtaccgcgctcctacgagctcttgaagccccctccaatatgcccccgggattctgtaaaagttattaacaaagagggcgaagttatggacgtttatcgctgtgatcattgcagagttctcttccttgattatgtcatgtttaccatccatatgggatgccacggttttagggacccatttgagtgcaatatgtgcgggtataggagccatgaccgatacgagttctcatcacacatcgcaaggggcgagcatagggctctcctaaagtag

SEQ ID NO: 257875 - DNA, 1413 bp, Artificial Sequence
  derived and/or modified sequence
atggaagatatacaaacaaatgcggaactgaaaagcactcaggagcagtctgtgcccgcagaaagtgcagcggttttgaatgactacagtttaaccaaatctcatgaaatggaaaatgtggacagtggagaaggcccagccaatgaagatgaagacataggagatgattcaatgaaagtgaaagatgaatacagtgaaagagatgagaatgttttaaagtcagaacccatgggaaatgcagaagagcctgaaatcccttacagctattcaagagaatataatgaatatgaaaacattaagttggagagacatgttgtctcattcgatagtagcaggccaaccagtggaaagatgaactgcgatgtgtgtggattatcctgcatcagcttcaatgtcttaatggttcataagcgaagccatactggtgaacgcccattccagtgtaatcagtgtggggcatcttttactcagaaaggtaacctcctccgccacattaaactgcacacaggggaaaaaccttttaagtgtcacctctgcaactatgcatgccaaagaagagatgcgctcacggggcatcttaggacacattctgcaagtgcggaggcaagacacatcaaagcagagatgggaagtgaaagagctctcgtactggacagattagcaagcaatgtggcaaaacgaaaaagctcaatgcctcagaaattcattggtgagaagcgccactgctttgatgtcaactataattcaagttacatgtatgagaaagagagtgagctcatacagacccgcatgatggaccaagccatcaataacgccatcagctatcttggcgccgaagccctgcgccccttggtccagacaccgcctgctcccacctcggagatggttccagttatcagcagcatgtatcccatagccctcacccgggctgagatgtcaaacggtgcccctcaagagctggaaaagaaaagcatccaccttccagagaagagcgtgccttctgagagaggcctctctcccaacaatagtggccacgactccacggacactgacagcaaccatgaagaacgccagaatcacatctatcagcaaaatcacatggtcctgtctcgggcccgcaatgggatgccacttctgaaggaggttccccgctcttacgaactcctcaagcccccgcccatctgcccaagagactccgtcaaagtgatcaacaaggaaggggaggtgatggatgtgtatcggtgtgaccactgccgcgtcctcttcctggactatgtgatgttcacgattcacatgggctgccacggcttccgtgaccctttcgagtgtaacatgtgtggatatcgaagccatgatcggtatgagttctcgtctcacatagccagaggagaacacagagccctgctgaagtga

SEQ ID NO: 257876 - DNA, 1413 bp, Artificial Sequence
  derived and/or modified sequence
atggaggacatccagaccaatgctgagctgaagagcacccaggagcagagcgtgcctgctgagagcgctgctgtgctgaatgactacagcctgaccaagagccatgagatggagaatgtggacagcggggagggccctgccaatgaagatgaagatattggagatgacagcatgaaggtgaaggatgagtacagcgagagagatgaaaatgtgctgaagtctgagcccatgggaaatgctgaggagcctgagatcccctacagctacagccgggagtacaatgaatatgagaacatcaagctggagcggcacgtggtgtcctttgacagcagccggcccaccagcggcaagatgaactgtgatgtgtgtggcctgagctgcatctccttcaacgtgctgatggtgcacaagaggagccacactggagagcggcccttccagtgcaaccagtgtggggccagcttcacccagaagggcaacctgctgcggcacatcaagctgcacactggagagaagcccttcaagtgccacctgtgcaactatgcctgccagaggagagatgccctgaccggccacctgcggacccacagcgccagcgctgaggcccggcacatcaaggccgagatgggcagcgagcgggccctggtgctggaccggctggccagcaatgtggccaagaggaagagctccatgccccagaagttcatcggggagaagaggcactgctttgatgtgaactacaacagcagctacatgtatgagaaggagagcgagctgatccagaccaggatgatggaccaggccatcaacaatgccatctcctacctgggcgctgaggccctgcggcccctggtgcagaccccaccagcccccaccagcgagatggtgcctgtgatcagctccatgtaccccatcgccctgaccagggctgagatgagcaatggagccccccaggagctggagaagaagagcatccacctgcctgagaagtctgtgcccagcgagcggggcctgagccccaacaacagcggccatgacagcacagacacagacagcaaccacgaggagcggcagaaccacatctaccagcagaaccacatggtgctgagccgggccagaaatggcatgcccctgctgaaggaggtgcccaggagctatgagctgctgaagcccccacccatctgcccccgggacagcgtgaaggtgatcaacaaggagggggaggtgatggatgtgtaccgctgtgaccactgccgggtgctcttcctggactatgtgatgttcaccatccacatgggctgccacggcttccgggacccctttgagtgcaacatgtgtggctaccgcagccatgacagatatgagttcagcagccacatcgcccggggggagcaccgggccctgctgaagtag

SEQ ID NO: 257877 - DNA, 1413 bp, Artificial Sequence
  derived and/or modified sequence
atggaggacatccagaccaacgccgagctgaagagcacccaggagcagagcgtgccagcagagtctgcagctgtcctcaacgactactcattgaccaaatcacacgaaatggaaaatgttgacagcggcgaggggccagcaaatgaggacgaggatatcggagacgattcaatgaaagtcaaggatgagtatagtgagagagacgaaaacgttttaaagtctgaacccatgggaaatgccgaggagccagaaattccatacagttatagtcgagagtataacgagtacgaaaacataaagttggaacgtcacgtggtttcatttgacagcagccggccaacctccggaaaaatgaattgcgacgtctgtggtctatcatgtattagctttaatgtgttgatggtccacaagagatcccatacaggggaacggccatttcagtgtaaccaatgcggcgcttcttttacacaaaaaggcaacttgctgaggcatatcaaacttcacacaggtgaaaaaccattcaaatgtcatttgtgtaattacgcttgccagcgccgcgatgccctgacagggcatctgcggactcattccgcctcagccgaagcgcgccatataaaggccgagatggggagcgagcgcgcactggtccttgacaggctcgccagcaatgtggcgaaacgaaaatcttctatgccccagaaattcattggagaaaagcgccattgttttgatgtgaattacaactcttcatacatgtatgagaaagagtcggaactgatccagacaagaatgatggatcaggcgatcaataatgccatttcctatctaggggcagaggcccttaggccgttggtgcaaacaccccccgcgccaacgtcagagatggttcccgtgatttcttctatgtatccaatagccttgaccagagctgagatgtccaacggtgccccgcaggagttagagaaaaagtctatacatcttcccgaaaaaagtgttccgtcagagcgcggactatcccccaacaatagtgggcatgacagcactgacacagattccaatcacgaggaaagacagaaccacatttatcagcaaaaccacatggttttgtcacgcgccaggaacggtatgcccctgctgaaggaagtgcccagaagttatgaacttcttaaaccgcctcctatatgtcccagagactcggttaaagtgattaacaaggaaggtgaggttatggatgtctaccgttgcgaccactgtcgcgtgttgtttctagattacgttatgttcacgatccacatgggatgccatgggtttcgagaccctttcgagtgtaacatgtgcggctatagatcccacgatcgttacgagtttagctctcatatcgctcgcggagagcaccgcgctctgctgaagtag

SEQ ID NO: 257878 - DNA, 1413 bp, Artificial Sequence
  derived and/or modified sequence
atggaggacattcagactaatgctgaactcaagtccacgcaagaacagtctgtacccgctgaaagcgccgcagtcttaaacgattacagtctaacgaaatcacatgaaatggaaaatgtcgactcgggcgagggaccagcaaatgaggatgaggacatcggcgacgattcgatgaaggtgaaggacgaatattccgaacgcgacgagaacgtgttgaaatctgaaccgatgggcaacgccgaagaacccgaaatcccttattcttatagtcgcgagtataatgaatacgaaaacatcaaactcgagcgacacgtcgtgagtttcgactccagcaggcccacatccggcaaaatgaactgcgatgtctgcggtctatcctgtatctctttcaacgtgctgatggtgcacaagagatcacacaccggggagcgtcccttccagtgtaaccaatgtggcgctagcttcacgcagaagggaaacctgctgcgtcacatcaaattgcacactggtgagaaacctttcaaatgccacttatgcaactatgcttgtcagcgaagagacgctctgactggccacctgaggacccacagtgccagcgccgaagcccgtcacataaaggctgaaatgggtagtgaacgtgcactggtcctagatagattagcgtctaatgtggctaaaagaaaatcgagtatgccccagaagtttattggggagaagcggcactgttttgacgtcaattacaattcctcctatatgtatgagaaagagagcgaacttatccagactcggatgatggatcaggccattaacaatgccatctcgtacctgggcgcagaggcattgcggccactggtgcagacaccacctgcccctacctctgaaatggtgccagtcattagcagcatgtaccccatcgctctgacacgagctgagatgagcaacggcgctcctcaggaacttgagaaaaaatcaatacacctacctgagaaaagcgttccaagcgagcgcggactctctccaaataacagcgggcacgacagtaccgacacagactcaaatcatgaggagcgccagaatcatatttatcagcaaaaccacatggtcttgagccgcgctagaaatggcatgccgcttctcaaggaagtcccacggtcctatgaattactgaagccacccccaatttgcccaagggactctgtgaaagtgatcaataaggaaggcgaggtcatggacgtttacagatgtgatcactgccgggtgctttttttggactacgtgatgtttaccatacacatggggtgtcatggcttcagggatccgttcgagtgtaacatgtgtggataccgttcacatgatcggtacgagtttagcagtcacattgcacggggtgagcaccgggcattgttgaaatag

SEQ ID NO: 257879 - protein, 470 aa, Artificial Sequence
  derived and/or modified sequence
MEDIQTNAELKSTQEQSVPAESAAVLNDYSLTKSHEMENVDSGEGPANEDEDIGDDSMKVKDEYSERDENVLKSEPMGNAEEPEIPYSYSREYNEYENIKLERHVVSFDSSRPTSGKMNCDVCGLSCISFNVLMVHKRSHTGERPFQCNQCGASFTQKGNLLRHIKLHTGEKPFKCHLCNYACQRRDALTGHLRTHSVEKPYKCEFCGRSYKQRSSLEEHKERCRTFLQSTDPGDTGEKRHCFDVNYNSSYMYEKESELIQTRMMDQAINNAISYLGAEALRPLVQTPPAPTSEMVPVISSMYPIALTRAEMSNGAPQELEKKSIHLPEKSVPSERGLSPNNSGHDSTDTDSNHEERQNHIYQQNHMVLSRARNGMPLLKEVPRSYELLKPPPICPRDSVKVINKEGEVMDVYRCDHCRVLFLDYVMFTIHMGCHGFRDPFECNMCGYRSHDRYEFSSHIARGEHRALLK

SEQ ID NO: 257880 - DNA, 1413 bp, Artificial Sequence
  derived and/or modified sequence
atggaggacatccagaccaacgccgagctgaagagcacccaggagcagagcgtgcccgccgagagcgccgccgtgctgaacgactacagcctgaccaagagccacgagatggagaacgtggacagcggcgagggccccgccaacgaggacgaggacatcggcgacgacagcatgaaggtgaaggacgagtacagcgagagagacgagaacgtgctgaagagcgagcccatgggcaacgccgaggagcccgagatcccctacagctacagcagagagtacaacgagtacgagaacatcaagctggagagacacgtggtgagcttcgacagcagcagacccaccagcggcaagatgaactgcgacgtgtgcggcctgagctgcatcagcttcaacgtgctgatggtgcacaagagaagccacaccggcgagagacccttccagtgcaaccagtgcggcgccagcttcacccagaagggcaacctgctgagacacatcaagctgcacaccggcgagaagcccttcaagtgccacctgtgcaactacgcctgccagagaagagacgccctgaccggccacctgagaacccacagcgtggagaagccctacaagtgcgagttctgcggcagaagctacaagcagagaagcagcctggaggagcacaaggagagatgcagaaccttcctgcagagcaccgaccccggcgacaccggcgagaagagacactgcttcgacgtgaactacaacagcagctacatgtacgagaaggagagcgagctgatccagaccagaatgatggaccaggccatcaacaacgccatcagctacctgggcgccgaggccctgagacccctggtgcagaccccccccgcccccaccagcgagatggtgcccgtgatcagcagcatgtaccccatcgccctgaccagagccgagatgagcaacggcgccccccaggagctggagaagaagagcatccacctgcccgagaagagcgtgcccagcgagagaggcctgagccccaacaacagcggccacgacagcaccgacaccgacagcaaccacgaggagagacagaaccacatctaccagcagaaccacatggtgctgagcagagccagaaacggcatgcccctgctgaaggaggtgcccagaagctacgagctgctgaagcccccccccatctgccccagagacagcgtgaaggtgatcaacaaggagggcgaggtgatggacgtgtacagatgcgaccactgcagagtgctgttcctggactacgtgatgttcaccatccacatgggctgccacggcttcagagaccccttcgagtgcaacatgtgcggctacagaagccacgacagatacgagttcagcagccacatcgccagaggcgagcacagagccctgctgaagtag

SEQ ID NO: 257881 - DNA, 1413 bp, Artificial Sequence
  derived and/or modified sequence
atggaagatattcagactaacgcggagctaaaatccacacaggaacagtccgttcccgctgaaagcgcggccgtcctgaacgactacagcctcactaaaagccatgaaatggaaaatgtggactccggagaggggcccgcaaacgaagatgaggacatcggggacgattccatgaaagtgaaggatgaatacagcgagcgggacgaaaatgtcctcaagtccgaacccatggggaatgccgaggagcccgaaattccatatagctactctcgcgaatataacgaatacgagaatatcaaattggaacggcacgttgttagcttcgacagctcccggcccacaagtggcaagatgaattgtgacgtttgcggcctcagttgtatttccttcaacgtgttgatggtccacaagcgttcgcataccggagaaagacccttccagtgtaatcagtgcggggcatcctttacgcagaaagggaatttgcttaggcacatcaaactccacactggggaaaagccctttaaatgtcacctgtgtaattacgcatgccaaaggcgggatgcactaacaggacatctcaggacccacagtgtggaaaagccttataagtgtgagttctgtgggaggtcttacaagcagcggtcgtcactagaagagcacaaagagagatgtcggactttcctccagagtactgaccccggtgacacaggggagaaacgacattgcttcgacgtcaattataatagctcatatatgtatgagaaagagagcgagctgatccagacaagaatgatggaccaggcaattaacaatgctatctcctacttgggtgcagaagctctccgtccgctcgtacagacaccgccagcccctacatccgaaatggtgcccgttattagcagtatgtatccaattgcgctcacaagggccgagatgtcaaatggtgcgccacaagaactggaaaagaaaagcattcacttacccgagaaatctgtgcctagcgaaaggggcctgtcccccaacaactccgggcacgacagcacagatacggactcgaatcacgaggagagacagaatcatatctaccagcagaatcatatggtcctgtcccgggctcgtaatggcatgcccctcctaaaagaggtcccgaggtcatacgagcttctcaaacccccccctatctgccctcgcgacagtgtcaaagttatcaacaaggagggcgaggtgatggatgtctacagatgcgatcattgccgtgtgttgtttctggactatgtgatgtttaccatccatatgggttgccatggcttccgagaccctttcgagtgcaacatgtgcgggtatcgctctcacgatcgttatgaattttctagtcatattgcgagaggcgagcacagggcactgcttaagtag

SEQ ID NO: 257882 - DNA, 1413 bp, Artificial Sequence
  derived and/or modified sequence
atggaagatatacaaacaaatgcggaactgaaaagcactcaggagcagtctgtgcccgcagaaagtgcagcggttttgaatgactacagtttaaccaaatctcatgaaatggaaaatgtggacagtggagaaggcccagccaatgaagatgaagacataggagatgattcaatgaaagtgaaagatgaatacagtgaaagagatgagaatgttttaaagtcagaacccatgggaaatgcagaagagcctgaaatcccttacagctattcaagagaatataatgaatatgaaaacattaagttggagagacatgttgtctcattcgatagtagcaggccaaccagtggaaagatgaactgcgatgtgtgtggattatcctgcatcagcttcaatgtcttaatggttcataagcgaagccatactggtgaacgcccattccagtgtaatcagtgtggggcatcttttactcagaaaggtaacctcctccgccacattaaactgcacacaggggaaaaaccttttaagtgtcacctctgcaactatgcatgccaaagaagagatgcgctcacggggcatcttaggacacattctgtggagaaaccctacaaatgtgagttttgtggaaggagttacaagcagagaagttcccttgaggagcacaaggagcgctgccgtacatttcttcagagcactgacccaggggacactggtgagaagcgccactgctttgatgtcaactataattcaagttacatgtatgagaaagagagtgagctcatacagacccgcatgatggaccaagccatcaataacgccatcagctatcttggcgccgaagccctgcgccccttggtccagacaccgcctgctcccacctcggagatggttccagttatcagcagcatgtatcccatagccctcacccgggctgagatgtcaaacggtgcccctcaagagctggaaaagaaaagcatccaccttccagagaagagcgtgccttctgagagaggcctctctcccaacaatagtggccacgactccacggacactgacagcaaccatgaagaacgccagaatcacatctatcagcaaaatcacatggtcctgtctcgggcccgcaatgggatgccacttctgaaggaggttccccgctcttacgaactcctcaagcccccgcccatctgcccaagagactccgtcaaagtgatcaacaaggaaggggaggtgatggatgtgtatcggtgtgaccactgccgcgtcctcttcctggactatgtgatgttcacgattcacatgggctgccacggcttccgtgaccctttcgagtgtaacatgtgtggatatcgaagccatgatcggtatgagttctcgtctcacatagccagaggagaacacagagccctgctgaagtga

SEQ ID NO: 257883 - DNA, 1413 bp, Artificial Sequence
  derived and/or modified sequence
atggaggacatccagaccaatgctgagctgaagagcacccaggagcagagcgtgcctgctgagagcgctgctgtgctgaatgactacagcctgaccaagagccatgagatggagaatgtggacagcggggagggccctgccaatgaagatgaagatattggagatgacagcatgaaggtgaaggatgagtacagcgagagagatgaaaatgtgctgaagtctgagcccatgggaaatgctgaggagcctgagatcccctacagctacagccgggagtacaatgaatatgagaacatcaagctggagcggcacgtggtgtcctttgacagcagccggcccaccagcggcaagatgaactgtgatgtgtgtggcctgagctgcatctccttcaacgtgctgatggtgcacaagaggagccacactggagagcggcccttccagtgcaaccagtgtggggccagcttcacccagaagggcaacctgctgcggcacatcaagctgcacactggagagaagcccttcaagtgccacctgtgcaactatgcctgccagaggagagatgccctgaccggccacctgcggacccacagcgtggagaagccctacaagtgtgagttctgtggccgcagctacaagcagaggagcagcctggaggagcacaaggagcgctgcaggaccttcctgcagagcacagatcctggggacaccggggagaagaggcactgctttgatgtgaactacaacagcagctacatgtatgagaaggagagcgagctgatccagaccaggatgatggaccaggccatcaacaatgccatctcctacctgggcgctgaggccctgcggcccctggtgcagaccccaccagcccccaccagcgagatggtgcctgtgatcagctccatgtaccccatcgccctgaccagggctgagatgagcaatggagccccccaggagctggagaagaagagcatccacctgcctgagaagtctgtgcccagcgagcggggcctgagccccaacaacagcggccatgacagcacagacacagacagcaaccacgaggagcggcagaaccacatctaccagcagaaccacatggtgctgagccgggccagaaatggcatgcccctgctgaaggaggtgcccaggagctatgagctgctgaagcccccacccatctgcccccgggacagcgtgaaggtgatcaacaaggagggggaggtgatggatgtgtaccgctgtgaccactgccgggtgctcttcctggactatgtgatgttcaccatccacatgggctgccacggcttccgggacccctttgagtgcaacatgtgtggctaccgcagccatgacagatatgagttcagcagccacatcgcccggggggagcaccgggccctgctgaagtag

SEQ ID NO: 257884 - DNA, 1413 bp, Artificial Sequence
  derived and/or modified sequence
atggaggacatccagaccaacgccgagctgaagagcacccaggagcagtctgtcccagcggagtcagcggccgtgctcaatgactacagtttgaccaaatcacatgaaatggaaaatgtggattccggagagggacccgcaaacgaagacgaggatatcggcgatgattctatgaaggttaaggacgagtatagcgagagagacgaaaacgtgctgaaatcagagcccatgggaaacgctgaagagcccgagataccatattcatacagtagagagtataacgagtatgagaacattaagctggagaggcatgtggtttctttcgattcttcccggcctacttctggtaaaatgaattgcgatgtctgtggcctgtcttgcatatcatttaacgttctgatggtgcataaacgctcacataccggtgagaggcctttccagtgcaaccagtgcggggcatctttcactcagaagggtaatctcctgcgccacatcaagttacacactggcgagaagccgttcaaatgtcacctatgcaattacgcctgccagcgccgagacgctcttaccgggcaccttcgtacacactcagtagaaaagccctacaagtgtgaattttgtgggaggagttataaacaaagatcaagcctggaggaacataaagagaggtgcagaactttcctccagtcaaccgatccgggggatacgggagagaagcgtcattgctttgacgttaactacaactcgagctatatgtacgaaaaagaaagcgagctgatccagacaagaatgatggatcaggccattaataacgccatctcttatttgggcgcggaagcactccgcccacttgtgcagaccccgcctgccccaacctctgagatggtgcccgttataagtagtatgtatcccattgcactgacgcgagctgagatgtcaaacggcgccccacaggaactggaaaagaaatcaatccatctcccagagaaaagcgtaccatccgagagaggcctctccccaaataactccgggcatgattcaacagacacagatagcaaccatgaagaacggcaaaaccacatataccagcagaatcacatggtgctgtcacgggctcgtaatggaatgccactactcaaagaggtgcccaggtcttacgagttgctcaagcccccaccaatatgccctcgcgatagcgtgaaggtgatcaataaggaaggagaggtgatggacgtctataggtgtgatcattgcagagtcctcttcctcgactatgtgatgtttactatacacatgggatgccacggctttagagacccatttgaatgcaatatgtgtggctacaggtcgcacgaccgatacgagttcagctcgcacatcgcacgcggagagcaccgtgctctgctgaagtag

SEQ ID NO: 257885 - DNA, 1413 bp, Artificial Sequence
  derived and/or modified sequence
atggaggatatacagaccaatgcagaactgaagagcacacaggaacagagcgttccggctgagtctgcggcagttctgaatgactatagcctgacgaagtcacacgaaatggaaaatgtagattccggggaagggccagctaacgaagatgaggatatcggcgatgatagtatgaaggtgaaggacgaatactctgagcgggatgagaacgtcctgaaaagcgagcccatgggcaacgcagaagagcctgaaatcccatacagttacagcagggagtataatgaatacgagaatattaagctggaaagacacgtggtctccttcgactcctctcggcctacctcaggcaaaatgaactgcgacgtgtgtggactctcctgtatctcgttcaacgtcctaatggttcataagcgatcacataccggggaacgccctttccaatgcaaccaatgcggtgcttcattcacccagaaggggaatctactgcgacatatcaaattacacaccggggagaagccatttaagtgccatctttgtaattatgcatgccagaggcgagacgcgttaactgggcacctgagaacacactcagttgagaagccctacaaatgcgaattctgcgggcgttcctacaagcagagatcctctctcgaggaacataaggaacggtgccgaactttcctgcaatcaacagacccaggcgacactggcgagaaacgccattgcttcgacgtgaactacaattcctcttacatgtacgagaaagaaagcgagctgatccagactaggatgatggaccaggccattaataacgcaattagctacttgggggctgaagctctaagacctttagtacagactccgcctgcccctacctcagagatggttccggtgatctctagcatgtatcctatcgccctcacacgggctgagatgtccaacggtgccccacaggaactcgaaaagaaaagtatccacttgccagagaagagcgtgccatccgagcggggtcttagccccaataacagcgggcacgactcaaccgatactgatagtaaccatgaggaacggcagaatcatatctaccaacagaaccacatggtgctgagtcgcgctcggaatggaatgcctctcctgaaagaggttcctcgctcctacgaattactgaaacctcccccaatttgtccaagggactctgttaaggttatcaacaaggaaggcgaagtgatggatgtctaccggtgcgaccattgtcgtgtgcttttccttgactacgtaatgttcactatccacatggggtgtcacgggtttagggacccatttgaatgcaacatgtgtggctaccggtcccacgatagatatgagttttcgagtcatatcgctcgaggcgagcaccgggctctccttaagtag

SEQ ID NO: 257886 - protein, 414 aa, Artificial Sequence
  derived and/or modified sequence
MEDIQTNAELKSTQEQSVPAESAAVLNDYSLTKSHEMENVDSGEGPANEDEDIGDDSMKVKDEYSERDENVLKSEPMGNAEEPEIPYSYSREYNEYENIKLERHVVSFDSSRPTSGKMNCDVCGLSCISFNVLMVHKRSHTASAEARHIKAEMGSERALVLDRLASNVAKRKSSMPQKFIGEKRHCFDVNYNSSYMYEKESELIQTRMMDQAINNAISYLGAEALRPLVQTPPAPTSEMVPVISSMYPIALTRAEMSNGAPQELEKKSIHLPEKSVPSERGLSPNNSGHDSTDTDSNHEERQNHIYQQNHMVLSRARNGMPLLKEVPRSYELLKPPPICPRDSVKVINKEGEVMDVYRCDHCRVLFLDYVMFTIHMGCHGFRDPFECNMCGYRSHDRYEFSSHIARGEHRALLK

SEQ ID NO: 257887 - DNA, 1245 bp, Artificial Sequence
  derived and/or modified sequence
atggaggacatccagaccaacgccgagctgaagagcacccaggagcagagcgtgcccgccgagagcgccgccgtgctgaacgactacagcctgaccaagagccacgagatggagaacgtggacagcggcgagggccccgccaacgaggacgaggacatcggcgacgacagcatgaaggtgaaggacgagtacagcgagagagacgagaacgtgctgaagagcgagcccatgggcaacgccgaggagcccgagatcccctacagctacagcagagagtacaacgagtacgagaacatcaagctggagagacacgtggtgagcttcgacagcagcagacccaccagcggcaagatgaactgcgacgtgtgcggcctgagctgcatcagcttcaacgtgctgatggtgcacaagagaagccacaccgccagcgccgaggccagacacatcaaggccgagatgggcagcgagagagccctggtgctggacagactggccagcaacgtggccaagagaaagagcagcatgccccagaagttcatcggcgagaagagacactgcttcgacgtgaactacaacagcagctacatgtacgagaaggagagcgagctgatccagaccagaatgatggaccaggccatcaacaacgccatcagctacctgggcgccgaggccctgagacccctggtgcagaccccccccgcccccaccagcgagatggtgcccgtgatcagcagcatgtaccccatcgccctgaccagagccgagatgagcaacggcgccccccaggagctggagaagaagagcatccacctgcccgagaagagcgtgcccagcgagagaggcctgagccccaacaacagcggccacgacagcaccgacaccgacagcaaccacgaggagagacagaaccacatctaccagcagaaccacatggtgctgagcagagccagaaacggcatgcccctgctgaaggaggtgcccagaagctacgagctgctgaagcccccccccatctgccccagagacagcgtgaaggtgatcaacaaggagggcgaggtgatggacgtgtacagatgcgaccactgcagagtgctgttcctggactacgtgatgttcaccatccacatgggctgccacggcttcagagaccccttcgagtgcaacatgtgcggctacagaagccacgacagatacgagttcagcagccacatcgccagaggcgagcacagagccctgctgaagtag

SEQ ID NO: 257888 - DNA, 1245 bp, Artificial Sequence
  derived and/or modified sequence
atggaggatatacaaaccaacgctgagcttaaatccacccaagagcagagcgtcccagctgagagcgcagccgtgctgaacgattatagtttgaccaaatcacacgagatggagaacgtcgatagtggcgaaggaccagcaaacgaggacgaggatataggcgacgactctatgaaggtaaaggatgagtatagcgaacgcgacgagaacgtcctcaagtcagaaccaatgggtaatgctgaggaacctgaaatcccttactcttatagtcgggaatataatgaatacgaaaacatcaagttggagcggcacgtggtttcctttgatagtagtaggccaactagtggcaaaatgaactgtgacgtatgtgggttgtcgtgtattagttttaacgtgctgatggtgcataagaggagtcacacagcctctgctgaagctagacacattaaagccgaaatgggatcagagcgggccctggtcctggacaggttggcctctaacgttgcaaagcgtaaaagtagcatgcctcagaagtttattggtgagaagagacactgtttcgacgtgaattacaacagctcgtatatgtatgagaaggagagcgagctcatccagacccggatgatggaccaggccattaataacgccattagctatctaggggcagaagccctccgcccgctggtgcaaactcctcctgctcctaccagcgagatggtcccagtcatcagctccatgtacccgatcgcattaacccgggctgagatgagcaatggggcacctcaggagctcgagaaaaagtcaatccatctaccagagaagagcgtgccatctgaaagagggctgtccccaaataattccgggcacgacagcaccgataccgacagcaatcacgaagaacgtcagaaccacatatatcagcagaaccatatggtgctctctcgtgccaggaatgggatgccactcctcaaagaagtaccaagaagttatgagcttctgaagcctcccccaatctgccctcgcgattccgtgaaggttattaataaagaaggagaagtgatggatgtctaccggtgcgaccattgccgcgtcctcttccttgactacgtgatgtttacaattcatatggggtgtcacggcttccgggatcctttcgaatgtaatatgtgcgggtatcgtagtcatgataggtatgagttctcatcccatatagcccgcggcgaacacagggctttgttgaagtag

SEQ ID NO: 257889 - DNA, 2152 bp, Artificial Sequence
  derived and/or modified sequence
gcaggagcacgtggagaggccgagtagccacagcggcagctccagcccggcccggcagcgacatggaagatatacaaacaaatgcggaactgaaaagcactcaggagcagtctgtgcccgcagaaagtgcagcggttttgaatgactacagtttaaccaaatctcatgaaatggaaaatgtggacagtggagaaggcccagccaatgaagatgaagacataggagatgattcaatgaaagtgaaagatgaatacagtgaaagagatgagaatgttttaaagtcagaacccatgggaaatgcagaagagcctgaaatcccttacagctattcaagagaatataatgaatatgaaaacattaagttggagagacatgttgtctcattcgatagtagcaggccaaccagtggaaagatgaactgcgatgtgtgtggattatcctgcatcagcttcaatgtcttaatggttcataagcgaagccatactgcaagtgcggaggcaagacacatcaaagcagagatgggaagtgaaagagctctcgtactggacagattagcaagcaatgtggcaaaacgaaaaagctcaatgcctcagaaattcattggtgagaagcgccactgctttgatgtcaactataattcaagttacatgtatgagaaagagagtgagctcatacagacccgcatgatggaccaagccatcaataacgccatcagctatcttggcgccgaagccctgcgccccttggtccagacaccgcctgctcccacctcggagatggttccagttatcagcagcatgtatcccatagccctcacccgggctgagatgtcaaacggtgcccctcaagagctggaaaagaaaagcatccaccttccagagaagagcgtgccttctgagagaggcctctctcccaacaatagtggccacgactccacggacactgacagcaaccatgaagaacgccagaatcacatctatcagcaaaatcacatggtcctgtctcgggcccgcaatgggatgccacttctgaaggaggttccccgctcttacgaactcctcaagcccccgcccatctgcccaagagactccgtcaaagtgatcaacaaggaaggggaggtgatggatgtgtatcggtgtgaccactgccgcgtcctcttcctggactatgtgatgttcacgattcacatgggctgccacggcttccgtgaccctttcgagtgtaacatgtgtggatatcgaagccatgatcggtatgagttctcgtctcacatagccagaggagaacacagagccctgctgaagtgaatatctggtctcagggattgctcctatgtattcagcatcgtttctaaaaaccaatgacctcgcctaacagattgctctcaaaacatactcagttccaaacttcttttcataccatttttagctgtgttcacaggggtagccagggaaacactgtcttccttcagaaattattcgcaggtctagcatattattacttttgtgaaacctttgttttcccatcagggacttgaattttatggaatttaaaagccaaaaaggtatttggtcattatcttctacagcagtggaatgagtggtcccggagatgtgctatatgaaacattctttctgagatatatcaaccacacgtggaaaagcctttcagtcatacatgcaaatccacaaagaggaagagctgaccagctgaccttgctgggaagcctcacccttctgcccttcacaggctgaagggttaagatctaatctccctaatctaaatgacagtctaagagtaagtaaaagaacagccataaaataagtatctgttacgagtaactgaagaccccattctccaagcatcagatccatttcctatcacaacatttttaaaaaatgtcatctgatggcacttctgcttctgtcctttaccttcccatctccagtgaaaagctgagctgctttgggctaaaccagttgtctatagaagaaaatctatgccagaagaactcatggttttaaatatagaccatcatcgaaactccagaaatttatccactgtggatgatgacatcgctttcctttggtcaaggttggcagagcaagggtataaagggggaaattgtttggcagcaccaacagaaaacaaa

SEQ ID NO: 257890 - DNA, 1245 bp, Artificial Sequence
  derived and/or modified sequence
atggaggacatccagaccaatgctgagctgaagagcacccaggagcagagcgtgcctgctgagagcgctgctgtgctgaatgactacagcctgaccaagagccatgagatggagaatgtggacagcggggagggccctgccaatgaagatgaagatattggagatgacagcatgaaggtgaaggatgagtacagcgagagagatgaaaatgtgctgaagtctgagcccatgggaaatgctgaggagcctgagatcccctacagctacagccgggagtacaatgaatatgagaacatcaagctggagcggcacgtggtgtcctttgacagcagccggcccaccagcggcaagatgaactgtgatgtgtgtggcctgagctgcatctccttcaacgtgctgatggtgcacaagaggagccacacagccagcgctgaggcccggcacatcaaggccgagatgggcagcgagcgggccctggtgctggaccggctggccagcaatgtggccaagaggaagagctccatgccccagaagttcatcggggagaagaggcactgctttgatgtgaactacaacagcagctacatgtatgagaaggagagcgagctgatccagaccaggatgatggaccaggccatcaacaatgccatctcctacctgggcgctgaggccctgcggcccctggtgcagaccccaccagcccccaccagcgagatggtgcctgtgatcagctccatgtaccccatcgccctgaccagggctgagatgagcaatggagccccccaggagctggagaagaagagcatccacctgcctgagaagtctgtgcccagcgagcggggcctgagccccaacaacagcggccatgacagcacagacacagacagcaaccacgaggagcggcagaaccacatctaccagcagaaccacatggtgctgagccgggccagaaatggcatgcccctgctgaaggaggtgcccaggagctatgagctgctgaagcccccacccatctgcccccgggacagcgtgaaggtgatcaacaaggagggggaggtgatggatgtgtaccgctgtgaccactgccgggtgctcttcctggactatgtgatgttcaccatccacatgggctgccacggcttccgggacccctttgagtgcaacatgtgtggctaccgcagccatgacagatatgagttcagcagccacatcgcccggggggagcaccgggccctgctgaagtag

SEQ ID NO: 257891 - DNA, 1245 bp, Artificial Sequence
  derived and/or modified sequence
atggaggacatccagaccaacgccgagctgaagagcacccaggagcagtcagtgcctgcggaatctgctgccgtgctgaatgactattcactgactaagtcacatgaaatggagaatgtggacagtggggaagggcccgctaatgaagatgaggacatcggcgatgattcaatgaaggtcaaagatgagtacagtgagcgggacgagaacgtcctcaagtcggagccgatgggaaatgcggaggagcccgaaatcccctattcctacagcagggaatacaatgaatatgagaacataaaacttgagaggcacgttgtctctttcgattcatcacgccccaccagcgggaagatgaattgcgatgtatgtggcctgagctgcatcagctttaatgtgctgatggtgcataaacgctcacatacggccagtgccgaggcacgccacattaaggcggagatgggctctgagcgagccttggtgcttgacagacttgcctctaatgtcgccaaaagaaagagttcaatgcctcaaaagttcattggtgagaagcgtcattgtttcgacgttaactacaatagctcgtacatgtatgagaaagaatcagaactaattcagactcgaatgatggatcaagctattaacaacgcgatctcgtatctgggggccgaggcacttaggccgctggtgcaaaccccccccgcccctacctcagagatggtgcctgtgatcagcagtatgtatccaatcgcattgaccagggccgaaatgtcaaatggggccccccaagaactggaaaagaagtcaattcatctcccggagaaaagcgtgccgagtgaacgcggattatctccaaacaactccggccacgattccacagacacagactctaaccacgaagaacggcaaaatcacatttaccagcaaaaccatatggtgctctcaagagccaggaatggcatgcccctgttgaaagaggtccctcggagttatgagttgctcaagcctcctccgatttgcccaagagattccgtaaaagttatcaacaaggagggggaggtcatggacgtctaccggtgtgatcactgccgtgttcttttcctggattatgttatgtttacgattcacatgggatgccatggttttagggaccccttcgaatgcaatatgtgcgggtacaggagccatgacagatacgagttcagttctcacattgctaggggtgagcatcgggccttgctcaaatag

SEQ ID NO: 257892 - DNA, 1245 bp, Artificial Sequence
  derived and/or modified sequence
atggaagacatccaaacaaacgccgaacttaagtctacccaggagcaaagcgtgcctgctgagtcagccgctgtgttgaatgactactcccttaccaaatcccacgagatggaaaacgtggattctggagagggacccgcaaatgaggatgaagacataggtgacgacagcatgaaggtaaaggacgagtactccgaaagggacgagaacgtgctcaaaagcgaacctatgggcaacgctgaggaacccgagattccctacagttactcacgagaatacaacgaatacgaaaacataaaactcgagagacacgttgtgtcattcgactccagccggcctacgtcaggaaagatgaattgcgacgtgtgtggattgagctgcatcagcttcaatgtgctgatggtgcataaaagatcgcataccgccagtgcagaagccagacacattaaagccgagatgggatccgagcgggctctggtgttagaccggcttgcttccaacgtggcaaagagaaaatcttcaatgcctcaaaaattcatcggtgagaaacgacactgttttgacgttaattacaattcgagctacatgtatgagaaggaatccgagctcattcaaactcggatgatggatcaagcaatcaataatgctatctcttatttaggcgctgaagccttacggccactggtgcagactccgcctgcccctacaagtgaaatggtacccgtcattagttctatgtaccctatagcactcacaagggcagaaatgtccaacggagccccacaggaattggagaaaaaaagcatccacctgcctgaaaaatctgtcccctccgaaagaggtctctctccgaacaacagcgggcacgatagcaccgacacagactccaatcacgaggagaggcagaatcacatctatcagcagaatcacatggtgttgtcccgagcccgtaatgggatgcccctgctgaaggaggtgcccaggtcctatgaacttctgaaaccaccaccaatttgccccagagactccgtcaaagtaataaacaaagagggggaggtgatggacgtgtaccgatgtgatcactgcagggtgctgtttctagactacgttatgttcactatacatatgggctgccacggctttcgcgatcctttcgagtgcaacatgtgtggatatcgctcccacgatcgatacgagttttcttcgcacatcgctcggggtgaacatagggcattgcttaagtag

SEQ ID NO: 257893 - protein, 431 aa, Artificial Sequence
  derived and/or modified sequence
MEDIQTNAELKSTQEQSVPAESAAVLNDYSLTKSHEMENVDSGEGPANEDEDIGDDSMKVKDEYSERDENVLKSEPMGNAEEPEIPYSYSREYNEYENIKLERHVVSFDSSRPTSGKMNCDVCGLSCISFNVLMVHKRSHTGERPFQCNQCGASFTQKGNLLRHIKLHTGEKPFKCHLCNYACQRRDALTGHLRTHSGEKRHCFDVNYNSSYMYEKESELIQTRMMDQAINNAISYLGAEALRPLVQTPPAPTSEMVPVISSMYPIALTRAEMSNGAPQELEKKSIHLPEKSVPSERGLSPNNSGHDSTDTDSNHEERQNHIYQQNHMVLSRARNGMPLLKEVPRSYELLKPPPICPRDSVKVINKEGEVMDVYRCDHCRVLFLDYVMFTIHMGCHGFRDPFECNMCGYRSHDRYEFSSHIARGEHRALLK

SEQ ID NO: 257894 - DNA, 1296 bp, Artificial Sequence
  derived and/or modified sequence
atggaggacatccagaccaacgccgagctgaagagcacccaggagcagagcgtgcccgccgagagcgccgccgtgctgaacgactacagcctgaccaagagccacgagatggagaacgtggacagcggcgagggccccgccaacgaggacgaggacatcggcgacgacagcatgaaggtgaaggacgagtacagcgagagagacgagaacgtgctgaagagcgagcccatgggcaacgccgaggagcccgagatcccctacagctacagcagagagtacaacgagtacgagaacatcaagctggagagacacgtggtgagcttcgacagcagcagacccaccagcggcaagatgaactgcgacgtgtgcggcctgagctgcatcagcttcaacgtgctgatggtgcacaagagaagccacaccggcgagagacccttccagtgcaaccagtgcggcgccagcttcacccagaagggcaacctgctgagacacatcaagctgcacaccggcgagaagcccttcaagtgccacctgtgcaactacgcctgccagagaagagacgccctgaccggccacctgagaacccacagcggcgagaagagacactgcttcgacgtgaactacaacagcagctacatgtacgagaaggagagcgagctgatccagaccagaatgatggaccaggccatcaacaacgccatcagctacctgggcgccgaggccctgagacccctggtgcagaccccccccgcccccaccagcgagatggtgcccgtgatcagcagcatgtaccccatcgccctgaccagagccgagatgagcaacggcgccccccaggagctggagaagaagagcatccacctgcccgagaagagcgtgcccagcgagagaggcctgagccccaacaacagcggccacgacagcaccgacaccgacagcaaccacgaggagagacagaaccacatctaccagcagaaccacatggtgctgagcagagccagaaacggcatgcccctgctgaaggaggtgcccagaagctacgagctgctgaagcccccccccatctgccccagagacagcgtgaaggtgatcaacaaggagggcgaggtgatggacgtgtacagatgcgaccactgcagagtgctgttcctggactacgtgatgttcaccatccacatgggctgccacggcttcagagaccccttcgagtgcaacatgtgcggctacagaagccacgacagatacgagttcagcagccacatcgccagaggcgagcacagagccctgctgaagtag

SEQ ID NO: 257895 - DNA, 1296 bp, Artificial Sequence
  derived and/or modified sequence
atggaggatatccagaccaacgcagagctgaagagtacacaggaacagagtgtgccggccgaatcagcagctgtgttgaacgattattctcttacaaagtcacacgaaatggagaatgtggacagcggagagggaccggcaaacgaggacgaagatattggcgacgattcgatgaaagtgaaggatgagtacagcgaacgggacgagaatgtactcaagtccgaaccaatgggtaacgcggaagaacccgaaatcccctatagctattcaagggagtataacgaatatgaaaacattaaactcgagcgacatgtggtgtcctttgattcgtcgcgcccaactagtggaaaaatgaattgtgatgtgtgcggtctgtcttgcatctcatttaatgtgcttatggtacacaagcgctcacatacaggagaacggccctttcagtgcaatcaatgcggcgcctcttttactcaaaaaggcaacctgctgaggcacattaagctgcacacaggggaaaagccctttaaatgccacctgtgcaattatgcatgtcaaagaagagatgctttgaccgggcatcttcgaacacatagtggcgaaaaacggcactgttttgatgtgaattataacagttcttatatgtatgagaaggaatctgagttaatccagacccgaatgatggatcaggctataaataacgccatctcctatctgggcgcagaggcactaagacccctcgtccagacgccccccgcgccgacttctgagatggtgcctgtgatctctagcatgtatcccatcgccctcactagagcagaaatgtcaaatggtgcccctcaggagttggagaaaaagtctatccacctgccagaaaaaagcgtaccaagcgaaaggggtctgtccccgaacaattcagggcatgatagcaccgacacagatagcaaccatgaagaaagacagaaccacatctatcagcagaaccacatggtcctctctcgggctcgcaacgggatgcccctcttgaaggaagtgcccagaagttatgagttacttaaaccaccacccatctgccccagagacagcgtcaaggtcattaataaggagggggaagtgatggatgtttacaggtgtgaccattgtcgcgtgttattcctggattatgtcatgttcactattcacatgggttgccacgggtttagggaccccttcgaatgcaacatgtgtggctacagaagtcacgaccggtacgaattctcttcacacatcgcgagaggtgaacatagggcactcttgaagtag

SEQ ID NO: 257896 - DNA, 1296 bp, Artificial Sequence
  derived and/or modified sequence
atggaagatatacaaacaaatgcggaactgaaaagcactcaggagcagtctgtgcccgcagaaagtgcagcggttttgaatgactacagtttaaccaaatctcatgaaatggaaaatgtggacagtggagaaggcccagccaatgaagatgaagacataggagatgattcaatgaaagtgaaagatgaatacagtgaaagagatgagaatgttttaaagtcagaacccatgggaaatgcagaagagcctgaaatcccttacagctattcaagagaatataatgaatatgaaaacattaagttggagagacatgttgtctcattcgatagtagcaggccaaccagtggaaagatgaactgcgatgtgtgtggattatcctgcatcagcttcaatgtcttaatggttcataagcgaagccatactggtgaacgcccattccagtgtaatcagtgtggggcatcttttactcagaaaggtaacctcctccgccacattaaactgcacacaggggaaaaaccttttaagtgtcacctctgcaactatgcatgccaaagaagagatgcgctcacggggcatcttaggacacattctggtgagaagcgccactgctttgatgtcaactataattcaagttacatgtatgagaaagagagtgagctcatacagacccgcatgatggaccaagccatcaataacgccatcagctatcttggcgccgaagccctgcgccccttggtccagacaccgcctgctcccacctcggagatggttccagttatcagcagcatgtatcccatagccctcacccgggctgagatgtcaaacggtgcccctcaagagctggaaaagaaaagcatccaccttccagagaagagcgtgccttctgagagaggcctctctcccaacaatagtggccacgactccacggacactgacagcaaccatgaagaacgccagaatcacatctatcagcaaaatcacatggtcctgtctcgggcccgcaatgggatgccacttctgaaggaggttccccgctcttacgaactcctcaagcccccgcccatctgcccaagagactccgtcaaagtgatcaacaaggaaggggaggtgatggatgtgtatcggtgtgaccactgccgcgtcctcttcctggactatgtgatgttcacgattcacatgggctgccacggcttccgtgaccctttcgagtgtaacatgtgtggatatcgaagccatgatcggtatgagttctcgtctcacatagccagaggagaacacagagccctgctgaagtga

SEQ ID NO: 257897 - DNA, 1296 bp, Artificial Sequence
  derived and/or modified sequence
atggaggacatccagaccaatgctgagctgaagagcacccaggagcagagcgtgcctgctgagagcgctgctgtgctgaatgactacagcctgaccaagagccatgagatggagaatgtggacagcggggagggccctgccaatgaagatgaagatattggagatgacagcatgaaggtgaaggatgagtacagcgagagagatgaaaatgtgctgaagtctgagcccatgggaaatgctgaggagcctgagatcccctacagctacagccgggagtacaatgaatatgagaacatcaagctggagcggcacgtggtgtcctttgacagcagccggcccaccagcggcaagatgaactgtgatgtgtgtggcctgagctgcatctccttcaacgtgctgatggtgcacaagaggagccacactggagagcggcccttccagtgcaaccagtgtggggccagcttcacccagaagggcaacctgctgcggcacatcaagctgcacactggagagaagcccttcaagtgccacctgtgcaactatgcctgccagaggagagatgccctgaccggccacctgcggacccacagcggggagaagaggcactgctttgatgtgaactacaacagcagctacatgtatgagaaggagagcgagctgatccagaccaggatgatggaccaggccatcaacaatgccatctcctacctgggcgctgaggccctgcggcccctggtgcagaccccaccagcccccaccagcgagatggtgcctgtgatcagctccatgtaccccatcgccctgaccagggctgagatgagcaatggagccccccaggagctggagaagaagagcatccacctgcctgagaagtctgtgcccagcgagcggggcctgagccccaacaacagcggccatgacagcacagacacagacagcaaccacgaggagcggcagaaccacatctaccagcagaaccacatggtgctgagccgggccagaaatggcatgcccctgctgaaggaggtgcccaggagctatgagctgctgaagcccccacccatctgcccccgggacagcgtgaaggtgatcaacaaggagggggaggtgatggatgtgtaccgctgtgaccactgccgggtgctcttcctggactatgtgatgttcaccatccacatgggctgccacggcttccgggacccctttgagtgcaacatgtgtggctaccgcagccatgacagatatgagttcagcagccacatcgcccggggggagcaccgggccctgctgaagtag

SEQ ID NO: 257898 - DNA, 1296 bp, Artificial Sequence
  derived and/or modified sequence
atggaggacatccagaccaacgccgagctgaagagcacccaggagcagtcggtcccagccgagagcgccgccgtgctcaatgattattctctcaccaaaagccacgagatggagaacgtcgattccggggaagggcctgcaaacgaggatgaggacataggcgatgattctatgaaggttaaggacgaatactccgagagggacgagaacgttctcaagagtgaacccatgggaaacgccgaggagcctgaaattccatactcttactcacgcgagtacaacgagtatgaaaacattaaattggagaggcacgtggtctccttcgacagttcacgccctacttccggaaagatgaactgtgacgtatgtggcctttcctgtattagcttcaacgttctgatggttcacaagcggagccatacaggcgagcgaccattccagtgcaatcagtgcggagccagcttcacacagaaaggcaacctactcaggcacatcaagctgcacactggcgagaagccgtttaaatgtcatctgtgtaactatgcctgtcaaaggcgagacgctttaacagggcatcttcgcacacacagcggtgaaaaacgacactgttttgatgtcaattacaactcttcttacatgtacgaaaaggaatccgagctcatccagactcggatgatggaccaggccataaacaatgcaattagctatcttggggctgaagctcttcggccgctggtacagactccccctgcccctacaagcgagatggtccctgtgatttcgtccatgtaccccatagcacttacccgggcagagatgagtaacggagcccctcaggaactagagaagaagtcaatacacctgcctgagaagtccgtgcccagcgaaagaggtctgtctcccaataactcagggcatgattctaccgacaccgattctaatcacgaggagcgtcagaatcacatttaccagcagaaccacatggtgctgtccagagcccgcaatgggatgcccctactcaaagaggtgccccggagttatgaactcctgaagcctcctcccatttgccccagggacagtgtcaaagtaattaataaggagggtgaggtcatggacgtgtaccgatgcgatcattgccgtgtgctcttcctggattacgtgatgttcacgatacacatgggctgccacgggtttcgagatcccttcgaatgtaacatgtgcggctatcgctcccatgataggtacgaattctcctctcatatcgcaaggggagagcatagggcactgttgaagtag

SEQ ID NO: 257899 - DNA, 1296 bp, Artificial Sequence
  derived and/or modified sequence
atggaggacattcagactaatgccgaactgaaatccactcaggaacaatctgtccccgctgagtctgcagccgtgcttaatgattactccctgacaaagagtcatgaaatggaaaacgtggatagcggagaaggaccagcaaatgaggacgaggacatcggagatgattctatgaaggtgaaagatgagtattctgagagggacgagaatgtgctgaagtccgaacctatgggcaacgctgaagaaccagagatcccgtactcctactcgcgcgagtataacgagtatgagaatatcaagctggaaagacacgtggtgagcttcgacagtagccggccaacctccggtaaaatgaactgcgatgtgtgtggattgtcatgcatcagttttaacgtcctcatggtccacaaaaggtcccacaccggtgagcggccatttcagtgcaaccaatgcggcgcatcttttacacagaagggtaatctcctccgtcacataaaactccacacgggtgagaaaccatttaagtgtcatctgtgtaattacgcatgtcagaggagagatgccctaaccggacatttgaggacacactctggcgagaaaagacactgttttgacgtcaattataacagtagctatatgtatgagaaggaaagcgagttgattcagacgcgcatgatggaccaggcaatcaacaatgctatctcctatctgggagccgaggcgttacggcctcttgtgcagacccccccagcacccacctcggaaatggtgcccgttatctcctccatgtaccccattgcgctgacccgggctgaaatgtccaatggcgcaccacaggagctggaaaaaaagtccatacacctgcctgaaaaatctgtcccatcggaacgaggtctgtctcctaacaattccggccacgattccaccgatacggatagcaaccacgaggagaggcaaaatcacatatatcaacaaaatcacatggtcctgagcagagccagaaacggcatgccgctccttaaggaggtccccagaagttacgagttgctcaaaccaccaccgatctgtcctagagattcagtaaaggtgatcaacaaagagggcgaggtaatggatgtgtataggtgtgaccactgcagggtgctcttcttggactatgtgatgttcacgattcatatgggatgtcatggctttcgcgacccatttgaatgcaacatgtgtggctatcgctcacacgaccgatacgagttctcctctcatattgcacgcggagaacacagagctcttctgaagtag

SEQ ID NO: 257900 - protein, 424 aa, Artificial Sequence
  derived and/or modified sequence
MQGARAPRDQGRSPGRMSALGRSSVILLTYVLAATELTCLFMQFSIVPYLSRKLGLDSIAFGYLQTTFGVLQLLGGPVFGRFADQRGARAALTLSFLAALALYLLLAAASSPALPGVYLLFASRLPGALMHTLPAAQMVITDLSAPEERPAALGRLGLCFGVGVILGSLLGGTLVSAYGIQCPAILAALATLLGAVLSFTCIPASTKGAKTDAQAPLPGGPRASVFDLKAIASLLRLPDVPRIFLVKVASNCPTGLFMVMFSIISMDFFQLEAAQAGYLMSFFGLLQMVTQGLVIGQLSSHFSEEVLLRASVLVFIVVGLAMAWMSSVFHFCLLVPGLVFSLCTLNVVTDSMLIKAVSTSDTGTMLGLCASVQPLLRTLGPTVGGLLYRSFGVPVFGHVQVAINTLVLLVLWRKPMPQRKDKVR

SEQ ID NO: 257901 - protein, 134 aa, Artificial Sequence
  derived and/or modified sequence
MQGARAPRDQGRSPGRMSALGRSSVILLTYVLAATELTCLFMQFSIVPYLSRKLGLDSIAFGYLQTTFGVLQLLGGPVFGRFADQRGARAALTLSFLAALALYLLLAAASSPALPGVYLLFASRLPGALMHTLP

SEQ ID NO: 257902 - DNA, 1275 bp, Artificial Sequence
  derived and/or modified sequence
atgcagggcgccagagcccccagagaccagggcagaagccccggcagaatgagcgccctgggcagaagcagcgtgatcctgctgacctacgtgctggccgccaccgagctgacctgcctgttcatgcagttcagcatcgtgccctacctgagcagaaagctgggcctggacagcatcgccttcggctacctgcagaccaccttcggcgtgctgcagctgctgggcggccccgtgttcggcagattcgccgaccagagaggcgccagagccgccctgaccctgagcttcctggccgccctggccctgtacctgctgctggccgccgccagcagccccgccctgcccggcgtgtacctgctgttcgccagcagactgcccggcgccctgatgcacaccctgcccgccgcccagatggtgatcaccgacctgagcgcccccgaggagagacccgccgccctgggcagactgggcctgtgcttcggcgtgggcgtgatcctgggcagcctgctgggcggcaccctggtgagcgcctacggcatccagtgccccgccatcctggccgccctggccaccctgctgggcgccgtgctgagcttcacctgcatccccgccagcaccaagggcgccaagaccgacgcccaggcccccctgcccggcggccccagagccagcgtgttcgacctgaaggccatcgccagcctgctgagactgcccgacgtgcccagaatcttcctggtgaaggtggccagcaactgccccaccggcctgttcatggtgatgttcagcatcatcagcatggacttcttccagctggaggccgcccaggccggctacctgatgagcttcttcggcctgctgcagatggtgacccagggcctggtgatcggccagctgagcagccacttcagcgaggaggtgctgctgagagccagcgtgctggtgttcatcgtggtgggcctggccatggcctggatgagcagcgtgttccacttctgcctgctggtgcccggcctggtgttcagcctgtgcaccctgaacgtggtgaccgacagcatgctgatcaaggccgtgagcaccagcgacaccggcaccatgctgggcctgtgcgccagcgtgcagcccctgctgagaaccctgggccccaccgtgggcggcctgctgtacagaagcttcggcgtgcccgtgttcggccacgtgcaggtggccatcaacaccctggtgctgctggtgctgtggagaaagcccatgccccagagaaaggacaaggtgagatag

SEQ ID NO: 257903 - DNA, 1275 bp, Artificial Sequence
  derived and/or modified sequence
atgcagggagcccgagctccccgcgaccagggccgaagccccggccgcatgagcgcactgggacgatcatccgtcatcctgctgacctatgttctggcagcaacggaactgacgtgtttgttcatgcagtttagtattgttccatacctatcccgaaagctgggtttagattccatcgctttcggctatttacagacaacattcggggttttgcagcttctcggtggccctgtgttcggcagattcgccgatcagcggggggctcgagctgcccttaccctcagcttcctcgcagcactcgcattatatctgctgctcgccgccgcctcaagtccagccttgcccggggtgtacctactgttcgcctctaggcttcccggggccctgatgcataccctgccagctgcacagatggtgattaccgacctgtccgctccagaggaaaggcctgccgccttaggccgcctcggactctgtttcggagtgggagttatcctcggcagtttgcttggcgggacattggtgtccgcttacggaatccagtgcccagccattctagccgcattggccaccctgttaggggccgttttaagctttacctgtatcccagcctctaccaagggggccaagaccgatgcacaggcccccctccccggcgggcccagggctagcgtcttcgacctgaaagctattgctagcctcctgagattgcccgacgttccacgcatatttctagtgaaagtcgcaagtaactgtcccacaggcttattcatggtgatgttttctattattagcatggattttttccagttggaggcagcccaggccggatatctgatgagcttttttggactgctccagatggtgactcaggggctggttatcggccagctgtcaagccatttctctgaagaagtgctattgcgagcctccgtgttggtattcatcgtcgttggactagcaatggcctggatgtcttcagtgttccacttctgcctccttgtgcccggactcgtatttagcctctgcacccttaacgtggtgaccgatagcatgttgatcaaagcggtctcaacaagtgacactggaaccatgcttggcctgtgtgcctccgttcagccgttgctcaggactttgggtcccactgtgggcggattactatacaggagctttggcgtgccagtgttcggccacgtccaagtcgccataaacaccctggtattgctcgtgctctggcgcaaacccatgccacaaagaaaggacaaagtgcggtag

SEQ ID NO: 257904 - DNA, 1275 bp, Artificial Sequence
  derived and/or modified sequence
atgcagggggctagggccccacgcgaccagggtaggtccccaggacgtatgtctgccctcggtcgctctagtgtgattctcttaacgtacgtccttgccgccactgagcttacctgcctcttcatgcaattttccattgtcccctacctgtcgaggaagttaggcttggattcaatcgcattcggctatctgcagactacctttggagtgctccagctgcttggggggccagtgtttgggaggtttgcagaccagcggggggctcgggccgcccttactttatcatttctggcagctctggctctctacttgttgcttgccgctgctagctccccggcactgcccggcgtctacctcctgttcgcgagccgcctgccaggcgctctgatgcacacgctgcctgctgcgcagatggtcattacagatctgtcggctcccgaggagaggcctgccgccctgggtcgcttgggtctctgtttcggtgtgggtgtcatcctgggatcactgctgggcggcactttagtgtcggcatacgggattcagtgccctgccatattggctgcgctagcaactttgctgggagctgtcctgtctttcacctgtattcccgcatctaccaagggggctaagacagacgcacaggcacctctccccggaggacctagggccagtgtgttcgatcttaaagcgatcgccagtcttctccggctccctgacgtgccccgcatcttccttgtgaaggtggcatccaactgtcccacagggctgttcatggtgatgtttagcataatcagcatggatttcttccagttagaagccgcacaggctgggtacctgatgagcttcttcggcctgttgcagatggtcacacagggccttgttattggccagctgtcttctcatttttctgaggaggttctcttaagagctagcgtcctcgtttttatcgtggtcggtttggcaatggcctggatgtcatcagtcttccacttctgcctgctagttcccggtctggttttcagcctctgtacgttgaacgtcgttactgacagcatgctgataaaagcggtgtccacctcagacactggtaccatgttgggcctgtgtgcgtctgtacagccgctcctccggacactcggccccactgtgggcggcctcctctaccgtagttttggcgttcctgtctttggccacgttcaggtggctatcaacacactcgtcctgctggttctctggagaaaacccatgccacaacggaaagataaggtgaggtag

SEQ ID NO: 257905 - DNA, 1275 bp, Artificial Sequence
  derived and/or modified sequence
atgcaaggagcccgagcgccaagggatcagggacggagcccgggtcgcatgagcgctctaggtaggtcatcggtgatcttactcacttacgtgttggccgcgactgagcttacatgtctcttcatgcagttcagcatcgttccctacttatcccgcaagcttgggttggatagcatcgcattcggatatttacaaacaacatttggagtactgcagctcctggggggcccagtatttggacgatttgcagaccagagaggggctcgtgccgcattaacgctctccttcctggccgctctggcactctatcttttactcgccgctgcttcatctcctgccctgcccggcgtctacctgctgttcgcaagtagattgcctggcgccctaatgcacaccctgcctgccgcacagatggtcatcaccgatctaagtgcgccagaggagcgtccagcagctcttggaaggctcggcttgtgttttggagtgggtgtaatactgggctccctgctgggaggcaccctcgtcagcgcctacggcatacagtgccccgcaattctggccgctctcgccacattgcttggcgccgtcctcagctttacctgtatccctgccagtaccaagggggccaaaaccgatgcccaggctccccttcctggtggaccccgtgcaagtgtgttcgatttaaaggccattgcctcgctgctgaggttacccgacgttcctaggatttttctggtgaaggttgccagcaactgccctacaggcctgttcatggtgatgttcagcattattagcatggacttctttcaattggaggccgctcaggccggatacctcatgagctttttcgggcttctccaaatggttacacagggccttgtgattggccagctctctagccattttagtgaggaagtccttctcagggcttctgtgctggtgttcattgtggttgggctcgccatggcgtggatgtccagcgtgtttcatttttgtttacttgttcctgggcttgttttcagcctatgcacactcaacgtggtgacagactccatgctgataaaagcggtcagcacgtccgacaccggaactatgctgggcctatgtgcctccgtccagcctctcttacggacacttggacccacagtgggagggctgttataccggagctttggagtcccagtctttggccatgtacaggtcgcaattaacaccctcgtgctgttggtgctctggcgaaaacctatgccccagaggaaagataaagtgcgatag

SEQ ID NO: 257906 - DNA, 1275 bp, Artificial Sequence
  derived and/or modified sequence
atgcagggcgcccgggccccccgggaccagggccgcagccctggccgcatgtctgccctgggccgcagcagcgtcatcctgctgacctacgtgctggccgccacagagctgacctgcctcttcatgcagttcagcatcgtgccctacctgagcaggaagctgggcctggacagcatcgccttcggctacctgcagaccaccttcggcgtgctgcagctgctgggcggccctgtgtttggccgctttgctgaccagagaggagcccgggccgccctgaccctgtccttcctggccgccctggccctgtacctgctgctggccgccgccagcagccctgccctgcccggggtgtacctgctgtttgccagccggctgcccggggccctgatgcacaccctgcctgctgcccagatggtgatcacagacctgagcgcccctgaggagaggcctgctgccctgggccgcctgggcctgtgcttcggcgtgggcgtcatcctgggcagcctgctgggcggcaccctggtgtctgcctacggcatccagtgcccagccatcctggccgccctggccaccctgctgggcgctgtgctgtccttcacctgcatcccagccagcaccaagggggccaagacagatgcccaggcccccctgcccggcggcccccgggcctctgtgtttgacctgaaggccatcgccagcctgctgcggctgcctgatgtgccccgcatcttcctggtgaaggtggccagcaactgccccaccggcctcttcatggtgatgttcagcatcatctccatggacttcttccagctggaggccgcccaggccggctacctgatgtccttcttcggcctgctgcagatggtgacccagggcctggtgattggccagctgagcagccacttcagcgaggaggtgctgctgcgggcctctgtgctggtgttcatcgtggtgggcctggccatggcctggatgagctctgtgttccacttctgcctgctggtgcccggcctggtgttcagcctgtgcaccctgaatgtggtgacagacagcatgctgatcaaggctgtgtccaccagtgacaccggcaccatgctgggcctgtgtgcctctgtgcagcccctgctgcggaccctgggccccaccgtgggcggcctgctgtaccgcagctttggagtgcctgtgtttggccacgtgcaggtggccatcaacaccctggtgctgctggtgctgtggaggaagcccatgccccagaggaaggacaaggtgaggtag

SEQ ID NO: 257907 - DNA, 1275 bp, Artificial Sequence
  derived and/or modified sequence
atgcagggcgcccgggccccccgggaccagggccggagccccggcagaatgtctgctctgggtaggtcctccgtgatcctgctgacctacgtgctcgccgcaaccgagctgacctgcttgtttatgcaattttctatagtgccgtacctgagccgcaaattggggctggactcaatcgcttttggttatctccagactacattcggcgtactgcaactgttgggtggacccgtttttgggcgcttcgccgatcagcgcggagcgcgggctgctctgaccttgtctttcttagccgcactggctctgtacctgcttctcgccgcagcatccagtccggctctgccaggcgtctatctgctttttgcgagtagactacccggggcgctgatgcatacactgccagcggcccaaatggttattaccgacctgtctgctcctgaggagagacccgcggcactgggccggctcggcctttgttttggagtgggcgttattctgggcagtttgctcggcggcaccttggtgtctgcctatgggattcagtgtcccgccatccttgccgccctggccaccctgctaggagccgtcctctctttcacctgcatcccggcttcgaccaagggcgccaagacggatgcccaagccccactccctggcgggcccagagcgtcagtctttgacttgaaggcaatcgcgtctctgctgagattgccagatgtgcctcgcatttttcttgtgaaggttgcttctaactgccctacgggactctttatggtcatgttttccattatctcgatggacttcttccagctggaggccgctcaagccgggtacttgatgtctttttttggccttctacagatggtcacacaagggttggttattggccagctcagctcccactttagcgaggaggtcctgctccgcgcatcagtgcttgtgtttattgtcgtgggtttggctatggcttggatgtccagcgtgtttcatttttgtctactggtcccaggcctagtgttctccctgtgtacccttaatgtggtaaccgattctatgctcattaaagccgtcagcacttctgatactggcaccatgctcggcctgtgcgcttcggttcagcctctgctgaggactctggggcctacagtaggtggtctgctctacagatccttcggcgtgcccgtgtttggacacgtacaggttgcaattaatactctggtcctgctggtactgtggcgcaaaccaatgcctcagcgtaaggataaagtgcgatag

SEQ ID NO: 257908 - DNA, 1275 bp, Artificial Sequence
  derived and/or modified sequence
atgcagggcgcccgggccccccgggaccagggccggagccccggccggatgtccgcactgggtcgttcatctgtgatcttattgacctacgtcctggcagcaacagagttgacctgcctgtttatgcagtttagcatcgtaccttacttgagccgcaagcttggtctggacagtattgcctttggctatctgcagacaacctttggagtgctacagcttctgggtggccccgttttcgggcgctttgcggatcagagaggggcacgcgctgctcttaccttgtcttttctggctgcccttgctctttatttgctgcttgccgcggcctcaagccccgcattgccaggcgtgtacctgctgttcgccagtagattgccaggtgccctaatgcacactcttccagcagctcaaatggtcattactgatctgtctgcccctgaggaaaggcctgccgccctgggaaggctggggctgtgttttggcgtcggtgtgattctgggcagtcttcttggcggcaccctggtgagcgcgtatggcattcagtgtcccgccatccttgccgcactcgcaacattactgggagcagtgcttagttttacttgcatacctgccagcacaaaaggagctaaaacagacgctcaggcccctctccctggaggtccccgagcgagcgtttttgacctgaaggccatcgccagcctgctgcggctcccagatgttcctagaatcttcttagttaaagtagcttctaattgcccgactggactgttcatggttatgttcagtattatctcaatggattttttccagttggaagctgcacaggcggggtaccttatgtctttcttcggcctgcttcagatggttacacaaggcttggtgatcgggcagctctctagtcatttttcagaagaagtgttgttgagagcttcagtgctcgtgttcatcgtggttggcttagccatggcctggatgtcctctgtgttccacttctgtctcctcgtgcccggcctggtgtttagcttgtgcaccctgaacgtggttaccgactctatgcttattaaggctgtgagtacctccgatacgggcacaatgctcgggctatgcgcatccgtgcagcccctgcttaggaccctcggccctactgtcgggggtctgctgtaccgtagttttggggtccctgtgtttggccatgtccaagttgccattaacaccctggtccttctagttttgtggcgaaagcccatgccccaacggaaggataaagtcaggtag

SEQ ID NO: 257909 - DNA, 1275 bp, Artificial Sequence
  derived and/or modified sequence
atgcagggcgcccgggccccccgggaccagggccggagccccggcagaatgagtgcgttaggcaggtcctctgtgatcctgctgacatatgtgctggcagccactgagctgacttgtttgtttatgcaattctcaatcgtgccctacttatcccgcaagctggggttggacagtattgctttcggatatctgcagactacattcggcgtgctgcagctgctcggcggccctgtgttcggccggttcgccgatcagcggggggcccgagcggcactcaccctttcatttttggcagccctcgctctgtatttactcctcgctgctgcaagttctcccgcacttccgggggtctatctgctctttgcaagtcggctgcccggagctctcatgcacacactcccagcagcacaaatggtgattactgacctgagtgcacctgaagaaaggccggctgccttaggtagattgggcttgtgcttcggtgtcggagttatcttaggctcgcttctcggcgggacgctcgtctccgcttatggcatccaatgtccggcgatcctcgctgccctggctacattactgggcgctgtactgagctttacctgtatccccgcatcgactaagggagcaaagaccgatgcacaggccccactgcctggcggtcccagggcatccgtatttgatctcaaggctatagcctccctgctgcgactgccagacgtgcctcggatttttctcgtcaaggtggcctcaaactgtcctacaggtctcttcatggtgatgttcagcattatctccatggacttcttccagctggaagccgcccaagccggctatctgatgagtttctttggtctgctgcagatggtgacacaaggattagtgatcggccaattgtcgtcccatttctctgaggaagtcttacttagagcatcagttctggtatttatcgtcgtcgggctggctatggcgtggatgtccagcgtgtttcacttttgtctgctggtgccagggttggttttctcgttgtgtacattgaatgtcgtgaccgattccatgctgattaaggccgtgtctaccagtgacactggtacaatgctcggattgtgcgcttcagttcagcccttgctgagaactctcggcccaacggtcggggggctcctatatcggtcattcggagtccccgtttttggacacgtccaggtggcaatcaatactctggttctcctcgtactgtggaggaaaccgatgcctcagcgaaaggataaagtcagatag

SEQ ID NO: 257910 - DNA, 1275 bp, Artificial Sequence
  derived and/or modified sequence
atgcagggagccagagcccctcgggatcagggacgctcccctggacgcatgtccgcacttgggaggtccagtgtgatcctcctgacctacgtactggccgcaacagagctaacgtgtctgtttatgcaatttagtattgtgccgtacttaagtcgcaaactggggttggactctattgcctttggctatctacaaaccaccttcggcgtgctccagctgctcggtggccctgtgttcgggaggtttgccgatcagcggggagcacgggctgctctgaccctaagctttttggccgcactagccttgtatctgctactggcggctgcaagcagcccagcgctgcccggtgtctatctccttttcgcaagtcgtttgcctggcgctttgatgcatacactgcctgcggctcagatggtgatcacggatctgtccgcaccagaagagagaccagcagccctcgggagactcggcctgtgttttggagttggggtcattctcgggagcctgttgggtggaactctggtgagtgcctacgggattcaatgtcctgctattttggcagctttggcaactttgctaggcgctgtattaagttttacgtgcattcccgctagtaccaaaggggcaaagacagatgcacaggctccactgcctggcggtccccgtgcatccgtcttcgatttgaaggcaatagcatctctgctgagactgccggacgttccacggatattcctagtgaaagtcgcctccaactgcccaacaggccttttcatggttatgttcagcattatcagcatggatttcttccagttggaggcagcacaggctggatacttgatgtcgttctttggactcctgcagatggttacccagggccttgtcatcggtcagttgagttcacatttttctgaggaagtattgcttagggcatcggtgctcgtgtttatcgtagtggggctggctatggcttggatgtccagtgtgttccatttctgtctgttggttccaggactcgttttctccctgtgcaccctcaatgtggtgacagattcaatgttgatcaaagccgtgagcaccagcgataccggtacgatgcttggactgtgtgcttcggttcagcctctcctgcggaccctcgggccaaccgttggaggcctgctgtataggagctttggcgtccctgtgtttgggcatgtgcaggtcgccatcaatactctggtcctgctggtcctgtggaggaagcctatgccacagcgcaaagacaaggtgcgctag

SEQ ID NO: 257911 - DNA, 1275 bp, Artificial Sequence
  derived and/or modified sequence
atgcagggcgctagagccccaagagatcagggcaggtcacctgggagaatgagcgccctgggtcgctcatccgtaatcctgcttacttacgttctggccgcaaccgagctcacctgcctgttcatgcagtttagtatcgtcccatacctgtcccgcaaactggggctggattctatcgctttcgggtacttgcaaaccaccttcggcgtgctgcagttgctgggaggcccagtttttggcaggttcgcagatcagcgcggagctcgagccgctctcaccctatctttcctagctgcccttgctttgtatcttctgttggcggcagcgagctcccccgctttgcccggtgtttatctgctgttcgcctcccgcctgcctggagcgttgatgcatacccttccggctgcccaaatggtgattactgacctaagcgccccagaggagaggccagccgcactgggccgactgggactatgctttggggtgggtgttatccttgggtctcttttaggaggtaccctggtttcagcttacggaatccagtgtcctgcaatcctggccgctttagcgactcttctgggggctgtactgtcatttacctgcatccccgcaagcaccaagggtgctaaaacggacgcacaggccccattgccaggcggaccccgtgcaagcgtctttgacctgaaggcgatcgccagcttgttgaggctgccagatgtcccaagaattttcctagtcaaggtggcttctaattgtcccaccgggttatttatggtaatgttctcgataatcagtatggacttcttccagcttgaggctgcccaggcaggttacctgatgtcttttttcgggctgctccaaatggtaactcagggcctggtcatcggacaattgagctcccatttcagtgaggaagtgctcctcagagccagcgtgctggtgtttattgtggtcgggctggccatggcctggatgagttcagtgttccacttctgtttactggtccctggcttggtgttcagcttgtgtactctgaacgtagttaccgactccatgttgatcaaagctgtatccactagcgatacaggcactatgttgggactctgcgctagcgtgcagccgcttcttcggactttaggtccaactgtgggcggattattatatcgctcctttggagtcccggttttcgggcacgtgcaggtggccattaacacactggtgctgctggttctatggcgaaaacctatgcctcagcgcaaggataaggtgagatag

SEQ ID NO: 257912 - DNA, 1275 bp, Artificial Sequence
  derived and/or modified sequence
atgcagggcgctcgggctccaagagatcaaggtaggagccccggaaggatgtctgccctgggcaggtccagtgtaatcctgctaacgtacgtacttgcagcaactgagctgacgtgcctctttatgcagttcagcattgtcccttatctgtcccggaagctggggttagacagcattgcattcggctacctgcaaacaacttttggcgtgttacagctgctgggcggtccagttttcggaaggtttgcggatcagagaggggcacgggcagcactaacactgagcttcctcgccgctctagctctgtacctccttctagcagctgcgtcaagtcctgcactaccaggcgtttatctactatttgcatctcgactgcccggagccctgatgcacacccttcctgctgcacaaatggtgataacagacttgtcggcacctgaagaaagaccggctgcactgggacggcttggactgtgcttcggcgtaggagttattttgggctcccttctaggtggcactctcgtctctgcctacggaattcagtgtccggcaatcctggcagcgctggccaccctactgggagcagtactctctttcacctgcatcccagcttccactaaaggagccaaaactgatgcccaggccccactgccaggtggccctcgggcatctgtatttgatctgaaagccattgcatctttactaagactccccgatgtgcctagaattttcctggtgaaagttgcttccaattgtcccacaggcctcttcatggtcatgttttcgattatttctatggacttcttccagctggaagccgcacaggccggatacttgatgtctttcttcggcctgctgcagatggtgacgcaaggtttggtgattggccagctgtcctctcatttctctgaagaagtgcttctgcgagcttcggtgctagtgttcatcgtggtcggtctcgctatggcctggatgtccagtgtctttcacttttgcctgctagtcccgggtttagtattcagcctgtgtacacttaacgtggtgactgactctatgctcatcaaagcagttagcaccagtgataccgggactatgctcgggctgtgcgccagtgtgcagcccctgttgagaacattagggcctactgtcggcggactgctgtaccggtccttcggcgtgcccgtcttcggacatgtgcaggtggcaatcaacacacttgttctgttggtgctgtggaggaaacctatgccccagaggaaggataaagtccggtag

SEQ ID NO: 257913 - protein, 221 aa, Artificial Sequence
  derived and/or modified sequence
MSDGDYDYLIKFLALGDSGVGKTSVLYQYTDGKFNSKFITTVGIDFREKRVVYRASGPDGATGRGQRIHLQLWDTAGQERFRSLTTAFFRDAMGFLLLFDLTNEQSFLNVRNWISQLQMHAYCENPDIVLCGNKSDLEDQRVVKEEEAIALAEKYGIPYFETSAANGTNISQAIEMLLDLIMKRMERCVDKSWIPEGVVRSNGHASTDQLSEEKEKGACGC

SEQ ID NO: 257914 - protein, 213 aa, Artificial Sequence
  derived and/or modified sequence
MSDGDYDYLIKFLALGDSGVGKTSVLYQYTDGKFNSKFITTVGIDFREKRVVYRASGPDGATGRGQRIHLQLWDTAGQERFRSLTTAFFRDAMGFLLLFDLTNEQSFLNVRNWISQLQMHAYCENPDIVLCGNKSDLEDQRVVKEKYGIPYFETSAANGTNISQAIEMLLDLIMKRMERCVDKSWIPEGVVRSNGHASTDQLSEEKEKGACGC

SEQ ID NO: 257915 - DNA, 666 bp, Artificial Sequence
  derived and/or modified sequence
atgagtgacggcgattacgattacctcataaagtttctagctctcggggactcaggcgtcggcaaaacctccgtgctgtaccagtacacagatgggaagttcaactcaaagttcattacgacagttgggattgattttagagagaagcgtgtggtctatagggctagcggacctgacggcgccaccggacggggtcagcgaatccacttgcagttgtgggacaccgcaggacaggagcgatttaggtcactcaccactgccttctttagagatgctatgggattcctattgttatttgaccttactaatgagcagagtttcctcaacgtcagaaactggatctcccaactgcagatgcacgcttattgcgagaatccagatattgtgctctgtgggaataaaagtgacttggaagaccaacgcgtcgtgaaggaggaggaggccattgccctcgccgaaaaatacggcattccatattttgagaccagcgccgctaatggcacgaacatttcgcaagcaatcgagatgctgcttgatcttatcatgaagaggatggagcgctgtgtggataagagctggatcccagagggcgtggtcagatccaacggtcacgcgagcaccgaccagctgagcgaagagaaggagaagggggcctgcggctgctag

SEQ ID NO: 257916 - DNA, 642 bp, Artificial Sequence
  derived and/or modified sequence
atgtcagacggtgactatgattacttgatcaaatttctggctctgggcgactcgggggtgggtaagactagcgttctataccaatatacagacgggaaattcaacagtaagtttattactaccgtagggattgacttcagagaaaaacgcgtagtctatagggcctccggcccagatggcgcgacaggacggggccagcgcatccatcttcagctgtgggacactgccggtcaagaacgcttcaggtccctgactacagctttttttcgagatgccatggggttccttttgctcttcgacctgactaacgagcagagttttctcaatgtacggaattggatttctcagctgcagatgcatgcttattgtgagaaccccgacatcgtgttgtgtgggaataaatccgacctggaagatcagagagtggttaaggaaaagtacggaatcccatactttgaaacatcggccgctaatggcacaaatattagccaggccatcgagatgctcctggacctgattatgaagcggatggagaggtgcgtcgataagtcttggatccccgagggggtggttcgcagtaacgggcatgcaagcaccgaccagctgtccgaagaaaaggagaaaggagcgtgtggatgctag

SEQ ID NO: 257917 - DNA, 666 bp, Artificial Sequence
  derived and/or modified sequence
atgagtgacggggattacgactacttaattaagtttctcgccctgggcgactcaggggtcggcaagacatcagtgctgtatcagtacaccgacggaaagttcaattctaagttcattactactgttggcatagactttcgggaaaagagagttgtgtaccgggcgtcaggtccagatggggccacggggaggggtcagaggatacacctccagctgtgggacaccgccggccaagagcgcttccgatccttgacaacagccttcttccgtgacgccatgggtttcctactccttttcgacctcacaaatgagcagagctttctcaatgtgagaaactggatcagtcagttgcaaatgcacgcgtactgtgaaaaccctgacatcgtgttgtgcggcaacaagtctgacttggaagatcagcgggtggtgaaagaagaagaggcaatcgccctggcagaaaagtacggcataccttacttcgagacatccgctgccaatggaacaaacatttcccaggcgatcgagatgttgctagatctgatcatgaaacggatggaacggtgcgtggataagtcttggattcctgagggtgttgtacgctcaaatggacacgctagtacggaccagctgtcggaggagaaggagaaaggtgcttgcggatgctag

SEQ ID NO: 257918 - DNA, 666 bp, Artificial Sequence
  derived and/or modified sequence
atgtctgatggagactatgactacctgatcaagttcctggccctgggggacagcggcgtgggcaagacctctgtgctgtaccagtacacagatggcaagttcaacagcaagttcatcaccaccgtgggcatcgacttccgggagaagagggtggtgtaccgggccagcggcccagatggagccaccggccggggccagaggatccacctgcagctgtgggacacagctggccaggagcgcttccgcagcctgaccacagccttcttcagagatgccatgggcttcctgctgctgtttgacctgaccaatgagcagagcttcctgaatgtgaggaactggatcagccagctgcagatgcacgcctactgtgagaacccagacatcgtgctgtgtggcaacaagagtgacctggaggaccagagggtggtgaaggaggaggaggccatcgccctggccgagaagtatggcatcccctactttgagaccagcgctgccaacggcaccaacatcagccaggccatcgagatgctgctggacctgatcatgaagaggatggagcgctgtgtggacaagtcctggatccctgagggcgtggtgcgcagcaatggccacgccagcacagaccagctgtctgaggagaaggagaagggggcctgtggctgctag

SEQ ID NO: 257919 - DNA, 642 bp, Artificial Sequence
  derived and/or modified sequence
atgtctgatggagactatgactacctgatcaagttcctggccctgggggacagcggcgtgggcaagacctctgtgctgtaccagtacacagatggcaagttcaacagcaagttcatcaccaccgtgggcatcgacttccgggagaagagggtggtgtaccgggccagcggcccagatggagccaccggccggggccagaggatccacctgcagctgtgggacacagctggccaggagcgcttccgcagcctgaccacagccttcttcagagatgccatgggcttcctgctgctgtttgacctgaccaatgagcagagcttcctgaatgtgaggaactggatcagccagctgcagatgcacgcctactgtgagaacccagacatcgtgctgtgtggcaacaagagtgacctggaggaccagagggtggtgaaggagaagtatggcatcccctactttgagaccagcgctgccaacggcaccaacatcagccaggccatcgagatgctgctggacctgatcatgaagaggatggagcgctgtgtggacaagtcctggatccctgagggcgtggtgcgcagcaatggccacgccagcacagaccagctgtctgaggagaaggagaagggggcctgtggctgctag

SEQ ID NO: 257920 - DNA, 666 bp, Artificial Sequence
  derived and/or modified sequence
atgagcgacggcgactacgactacctgatcaagttcctggccctgggggactctggggttggcaagacgtccgtgctgtaccaatataccgacgggaaatttaatagcaagtttattacgacagtgggcatcgattttcgggagaagcgagtggtgtacagagcgagtgggccagacggcgccacagggcgtggacaaaggatccacctgcagctgtgggatacagccggacaagaacggttccgttcgctgaccaccgcgttttttcgcgatgccatggggttcctgctactgttcgacttaacaaacgaacagagcttcttgaacgttagaaactggatctcgcaactccagatgcacgcttattgtgagaatcctgacattgtgttgtgcggaaacaagtcggatctggaagatcaacgcgtggttaaggaggaggaggccatcgctctcgcggagaaatacgggatcccatactttgagaccagtgccgccaatgggactaacatctcccaggccattgagatgcttctggaccttatcatgaaacgcatggagcggtgtgtagacaagagctggatacccgaaggcgtggtccgatcgaacggacatgcttccacggatcagctgtctgaagagaaagagaagggcgcgtgtggatgctag

SEQ ID NO: 257921 - DNA, 642 bp, Artificial Sequence
  derived and/or modified sequence
atgagcgacggcgactacgactacctgatcaagttcctggccctgggggacagcggagttggaaagactagtgtcctgtatcaatacaccgatggaaaattcaatagcaagtttattactacggttggaatcgacttccgtgaaaagcgagtggtgtacagagccagtggcccggatggagctaccggtcggggccagagaattcacttgcagttatgggacacggcgggccaggaaagattccgctccctgactaccgcattttttagggacgctatgggtttcttgctgctattcgacctgacgaatgagcaaagcttcctgaatgtgcgaaattggatctcccagctgcagatgcacgcctactgtgagaatccggatatagttctgtgcggtaacaaatccgacctggaggatcagcgagtagtgaaggaaaaatacgggatcccctatttcgaaacatcagcagccaatgggacaaacatctcccaggcaatcgagatgcttttggacctgatcatgaagcggatggaacgctgcgttgacaagagctggattccggagggagtggtccggagcaacgggcatgcctcgacagaccaactcagtgaggaaaaagaaaaaggggcctgcggatgttag

SEQ ID NO: 257922 - DNA, 666 bp, Artificial Sequence
  derived and/or modified sequence
atgagcgacggcgactacgactacctgatcaagttcctggccctgggggactcgggcgtaggcaaaacttccgtgctgtatcaatataccgacggcaagttcaacagtaaattcatcaccactgttggcatcgattttagagagaaaagggtggtgtacagagcaagcggtccggacggggcaacaggccgcggtcagcgcatccatctgcagctttgggataccgcaggacaggaacgatttcgctcgttgaccactgcgtttttcagagatgccatgggcttcctgctgctgtttgatctgaccaacgagcagagcttcctcaacgtcagaaactggatctcacagctccagatgcatgcctactgtgagaacccggatatagtcctgtgcggtaataagtcggatctggaggaccagcgagtggtgaaagaagaagaagcaattgccctggcagagaagtatgggatcccctactttgagaccagcgccgccaatggcacaaatatcagccaagctatcgagatgcttttagacctcatcatgaaacgaatggagcgctgcgttgataagtcatggattcctgagggcgtcgtcagatcgaatgggcatgcatcaaccgaccaactgagcgaggaaaaggaaaagggcgcttgcggctgctag

SEQ ID NO: 257923 - DNA, 666 bp, Artificial Sequence
  derived and/or modified sequence
atgtctgacggtgactatgattacctgattaaatttttagcgttgggtgactcaggtgtgggtaagacatccgttctgtaccagtatacagatggtaaattcaatagcaaattcatcacgacggtgggcattgatttccgagaaaaaagagtggtttaccgagctagcggccctgatggcgctaccggaaggggacagcggatccatctacagctctgggacacagcagggcaggaaaggttcagatcgctgaccacagctttcttccgcgacgccatgggttttctcctgctgttcgacctaaccaacgaacagtcgttcttgaacgtgcggaattggatctcacaactgcaaatgcatgcatactgcgaaaatcctgatatcgtgctctgcggtaacaagtccgacttagaggatcagcgcgtggtaaaggaggaggaggccatcgcactggcagaaaagtatgggatcccttattttgaaacctccgctgctaacggcaccaatatttcacaggccatagaaatgcttttggacctcatcatgaagagaatggaaaggtgcgtggataagtcatggatccctgagggtgtggtgcgctccaatgggcacgcctccactgatcagctttccgaagagaaggagaagggagcttgcggctgttag

SEQ ID NO: 257924 - DNA, 642 bp, Artificial Sequence
  derived and/or modified sequence
atgtctgatggagattatgattaccttattaagtttcttgcccttggcgatagcggcgtcgggaagaccagtgtcctgtaccagtacacagacggaaaatttaattctaaatttatcacgacagtgggtattgactttagagagaaaagagttgtgtacagggcgtcagggccagacggagcaaccggcagaggccaaaggatccacctgcagttatgggacactgcgggtcaggagcgtttcagaagccttaccaccgcttttttccgagacgcaatgggttttctactactgtttgatttaacgaacgagcagagttttctgaacgtgagaaattggattagccagttgcaaatgcacgcttactgcgagaatccagatattgttttgtgcggtaacaagagtgacttagaggaccaacgggtagtaaaggaaaagtatggtattccctactttgaaacctcagcggcaaacgggacaaatatcagccaggccattgagatgctattggatcttattatgaagcgtatggagcgttgcgttgacaagtcctggatacctgaaggtgtggtaaggtctaacggccatgcctccactgatcagctgtccgaggagaaggaaaaaggggcttgcgggtgttag

SEQ ID NO: 257925 - DNA, 666 bp, Artificial Sequence
  derived and/or modified sequence
atgtccgatggcgactacgactacctgatcaaattcctggccctcggggattccggcgtgggaaagactagcgtactctatcaatataccgatggaaagtttaactctaaattcattaccactgttggcatcgatttccgcgagaaaagggtggtatatcgcgcaagcggtcccgacggggctacgggcagaggccaacgcattcacctccagctctgggacactgccggacaggaaaggtttcgatcactcactactgcctttttcagggatgcaatgggtttcctgctgcttttcgacctcactaacgagcagtctttcctgaacgtacggaattggataagccagcttcagatgcacgcctactgtgaaaatccagacattgtcctctgtggcaataagtcggacttggaagatcagagagtggtcaaggaagaagaagccatagccctggccgaaaaatatggcatcccttacttcgagaccagcgcggcaaatggaacaaacatcagtcaggccatcgagatgttgctggaccttattatgaaacggatggagagatgcgtggacaaaagctggatccccgagggggtcgtgcgcagtaacggtcatgccagcaccgaccagttgtccgaagagaaagaaaagggcgcatgtggctgctag

SEQ ID NO: 257926 - DNA, 2799 bp, Artificial Sequence
  derived and/or modified sequence
cgccaacgacccaaaaaaggccggcggcgggtggacgcggcgcgcgaggacccgagccaggcggggacaggacggcggggcgagccagacaaaaagtaaccttcctgaagaggacatgtgattggaagttgtcaattgttgaagcattggtaactccagtctctaacgttttagaaaatcataacaagcggttctctaccctgtaaaggtgaactactgagttcttcattatgtctgatggagattatgattacctcatcaagtttttagctttgggagactctggtgtagggaagaccagtgtactttaccaatatacagatggtaaatttaactccaaatttatcacaacagtgggcattgatttcagggaaaaaagagtggtgtacagagccagtgggccggatggagccactggcagaggccagagaatccacctgcagttatgggacacagcagggcaggagaggtttcgtagcttaacgacagcgttcttcagagatgctatgggttttcttctactttttgatctgacaaatgagcaaagtttcctcaatgtcagaaactggataagccagctacagatgcatgcatattgtgaaaacccagatatagtgctgtgtggaaacaagagtgatctggaggaccagagagtagtgaaagaggaggaagccatagcactcgcagagaaatatggaatcccctactttgaaactagtgctgccaatgggacaaacataagccaagcaattgagatgcttctggacctgataatgaagcgaatggaacggtgtgtggacaagtcctggattcctgaaggagtggtgcgatcaaatggtcatgcctctacggatcagttaagtgaagaaaaggagaaaggggcatgtggctgttgagaagtcaagtaagcgacatagtagttcaggtggcccatgcctgggatcttctctatgattgatacatggcacagtgagagattaatgggcattgtgtacaaattgcttctcaccatccccattagacctacgaataaagcatccggttctaaaattaatttgttgcagctttgtaaatatttctttaagattcagcctgagagttaggagaaatatttcagagccaaaagtgccttatacaaccttagcctattatagtaaatcattcaaggattcagaattttgcagtcacagaagagtgtatttattatgtagaatgaatgagggtactgtcacctgccttaatgtaggtaggcccagagtcttacatttaagatcttacatgcagttataaaaccgccacagtcttcaatccagatttgaagactcatgccataggtgacattctaaaataccattaaagccacttaaatgttaaataagaatatacatgcacatcagctcaatgtctttgagtattaattttatgtaagcattctatttaacatgaatataggacaaatcatggctatatctatagaccttggataaactggattgaccaattatacactcacggtgacttttttattggtgggaaggggattggggtggggcaggctggcttaatgtaatatgagcaaccaaagtgggacttctgtctccccgctatattcccattgctctgaatggttgattgaagggtcagggaactagattttatggctttagttcactgtgattgtacatttatacttggcctatgtgctggccgcacctgaacatagctggtgcttatgccgagttatttgcgatgagtaaatatttagtttctttttcttcatatttataatgttgatctggcatcctcaggctgcagctttattagcttataacttactcatctctatctttaccagcaggctctgtattgttgatatttgcaacttgttttgcttttccattggtggaattgaaataattagtttttaattacataagatgcctgtttgctatttggtggaagatagatgttcatattgaagcagtcacatttgtactgtagttcaataaaagaaaaatgaagtattctgtagcctatatttttcatagagctcatgagcatttactgtacttgctgggtcttgccaagatcatttattccgctgcattgccaaagtgtcttcataccaaattaaaggtggttttaatatatgtttcatggaagttgtttataaaattcaaaggtatttcatttaggtgaaaagtcttatttattaaagtggtttgaataaagtagatcaaaacttccagagatcttaatggctatataggaagaaatatcactcaccataatttaaataaagaataaaaatacttgtattttgtggtggcaaatgtttggtagaactgtaattagaaaaatacaagtatatttgcgtgatggttacactagaagcccagactttacgactacacaatatattcatgtatctaaactgtacttgtaccccctaaatttatttttaaaaaaggaaaaataaaagtatcatgaaaaaacctatttttttttccactgtccttccactactcccataacaaacttatccatggttggtaaaattttacatatttctatccttgaaatgaaggcttcttttaaattccaaagaagtcatggaggcctgtgcatttgaattgtatatgctagtgaggaaaagatttagacatttcaagagcagggttggccaggcgcggtggctcacacctgtaatcccagcactttgggaggccgaggagggcggatcacgaggtcaggagatcgagaccatcctggctaacacagtgaaaccccatctctact

SEQ ID NO: 257927 - DNA, 2790 bp, Artificial Sequence
  derived and/or modified sequence
gttttgaaagttgatggagcgaactgcttttccaaagactcttttgaaaaactttttaagtaggccattctgactttaacatttctctttgtcttaacattagacaaaaagtaaccttcctgaagaggacatgtgattggaagttgtcaattgttgaagcattggtaactccagtctctaacgttttagaaaatcataacaagcggttctctaccctgtaaaggtgaactactgagttcttcattatgtctgatggagattatgattacctcatcaagtttttagctttgggagactctggtgtagggaagaccagtgtactttaccaatatacagatggtaaatttaactccaaatttatcacaacagtgggcattgatttcagggaaaaaagagtggtgtacagagccagtgggccggatggagccactggcagaggccagagaatccacctgcagttatgggacacagcagggcaggagaggtttcgtagcttaacgacagcgttcttcagagatgctatgggttttcttctactttttgatctgacaaatgagcaaagtttcctcaatgtcagaaactggataagccagctacagatgcatgcatattgtgaaaacccagatatagtgctgtgtggaaacaagagtgatctggaggaccagagagtagtgaaagagaaatatggaatcccctactttgaaactagtgctgccaatgggacaaacataagccaagcaattgagatgcttctggacctgataatgaagcgaatggaacggtgtgtggacaagtcctggattcctgaaggagtggtgcgatcaaatggtcatgcctctacggatcagttaagtgaagaaaaggagaaaggggcatgtggctgttgagaagtcaagtaagcgacatagtagttcaggtggcccatgcctgggatcttctctatgattgatacatggcacagtgagagattaatgggcattgtgtacaaattgcttctcaccatccccattagacctacgaataaagcatccggttctaaaattaatttgttgcagctttgtaaatatttctttaagattcagcctgagagttaggagaaatatttcagagccaaaagtgccttatacaaccttagcctattatagtaaatcattcaaggattcagaattttgcagtcacagaagagtgtatttattatgtagaatgaatgagggtactgtcacctgccttaatgtaggtaggcccagagtcttacatttaagatcttacatgcagttataaaaccgccacagtcttcaatccagatttgaagactcatgccataggtgacattctaaaataccattaaagccacttaaatgttaaataagaatatacatgcacatcagctcaatgtctttgagtattaattttatgtaagcattctatttaacatgaatataggacaaatcatggctatatctatagaccttggataaactggattgaccaattatacactcacggtgacttttttattggtgggaaggggattggggtggggcaggctggcttaatgtaatatgagcaaccaaagtgggacttctgtctccccgctatattcccattgctctgaatggttgattgaagggtcagggaactagattttatggctttagttcactgtgattgtacatttatacttggcctatgtgctggccgcacctgaacatagctggtgcttatgccgagttatttgcgatgagtaaatatttagtttctttttcttcatatttataatgttgatctggcatcctcaggctgcagctttattagcttataacttactcatctctatctttaccagcaggctctgtattgttgatatttgcaacttgttttgcttttccattggtggaattgaaataattagtttttaattacataagatgcctgtttgctatttggtggaagatagatgttcatattgaagcagtcacatttgtactgtagttcaataaaagaaaaatgaagtattctgtagcctatatttttcatagagctcatgagcatttactgtacttgctgggtcttgccaagatcatttattccgctgcattgccaaagtgtcttcataccaaattaaaggtggttttaatatatgtttcatggaagttgtttataaaattcaaaggtatttcatttaggtgaaaagtcttatttattaaagtggtttgaataaagtagatcaaaacttccagagatcttaatggctatataggaagaaatatcactcaccataatttaaataaagaataaaaatacttgtattttgtggtggcaaatgtttggtagaactgtaattagaaaaatacaagtatatttgcgtgatggttacactagaagcccagactttacgactacacaatatattcatgtatctaaactgtacttgtaccccctaaatttatttttaaaaaaggaaaaataaaagtatcatgaaaaaacctatttttttttccactgtccttccactactcccataacaaacttatccatggttggtaaaattttacatatttctatccttgaaatgaaggcttcttttaaattccaaagaagtcatggaggcctgtgcatttgaattgtatatgctagtgaggaaaagatttagacatttcaagagcagggttggccaggcgcggtggctcacacctgtaatcccagcactttgggaggccgaggagggcggatcacgaggtcaggagatcgagaccatcctggctaacacagtgaaaccccatctctact

SEQ ID NO: 257928 - DNA, 3459 bp, Artificial Sequence
  derived and/or modified sequence
gatgcctgttttgaaagttgatggagcgaactgcttttccaaagactcttttgaaaaactttttaagtaggccattctgactttaacatttctctttgtcttaacattagacaaaaagtaaccttcctgaagaggacatgtgattggaagttgtcaattgttgaagcattggtaactccagtctctaacgttttagaaaatcataacaagcggttctctaccctgtaaaggtgaactactgagttcttcattatgtctgatggagattatgattacctcatcaagtttttagctttgggagactctggtgtagggaagaccagtgtactttaccaatatacagatggtaaatttaactccaaatttatcacaacagtgggcattgatttcagggaaaaaagagtggtgtacagagccagtgggccggatggagccactggcagaggccagagaatccacctgcagttatgggacacagcagggcaggagaggtttcgtagcttaacgacagcgttcttcagagatgctatgggttttcttctactttttgatctgacaaatgagcaaagtttcctcaatgtcagaaactggataagccagctacagatgcatgcatattgtgaaaacccagatatagtgctgtgtggaaacaagagtgatctggaggaccagagagtagtgaaagaggaggaagccatagcactcgcagagaaatatggaatcccctactttgaaactagtgctgccaatgggacaaacataagccaagcaattgagatgcttctggacctgataatgaagcgaatggaacggtgtgtggacaagtcctggattcctgaaggagtggtgcgatcaaatggtcatgcctctacggatcagttaagtgaagaaaaggagaaaggggcatgtggctgttgagaagtcaagtaagcgacatagtagttcaggtggcccatgcctgggatcttctctatgattgatacatggcacagtgagagattaatgggcattgtgtacaaattgcttctcaccatccccattagacctacgaataaagcatccggttctaaaattaatttgttgcagctttgtaaatatttctttaagattcagcctgagagttaggagaaatatttcagagccaaaagtgccttatacaaccttagcctattatagtaaatcattcaaggattcagaattttgcagtcacagaagagtgtatttattatgtagaatgaatgagggtactgtcacctgccttaatgtaggtaggcccagagtcttacatttaagatcttacatgcagttataaaaccgccacagtcttcaatccagatttgaagactcatgccataggtgacattctaaaataccattaaagccacttaaatgttaaataagaatatacatgcacatcagctcaatgtctttgagtattaattttatgtaagcattctatttaacatgaatataggacaaatcatggctatatctatagaccttggataaactggattgaccaattatacactcacggtgacttttttattggtgggaaggggattggggtggggcaggctggcttaatgtaatatgagcaaccaaagtgggacttctgtctccccgctatattcccattgctctgaatggttgattgaagggtcagggaactagattttatggctttagttcactgtgattgtacatttatacttggcctatgtgctggccgcacctgaacatagctggtgcttatgccgagttatttgcgatgagtaaatatttagtttctttttcttcatatttataatgttgatctggcatcctcaggctgcagctttattagcttataacttactcatctctatctttaccagcaggctctgtattgttgatatttgcaacttgttttgcttttccattggtggaattgaaataattagtttttaattacataagatgcctgtttgctatttggtggaagatagatgttcatattgaagcagtcacatttgtactgtagttcaataaaagaaaaatgaagtattctgtagcctatatttttcatagagctcatgagcatttactgtacttgctgggtcttgccaagatcatttattccgctgcattgccaaagtgtcttcataccaaattaaaggtggttttaatatatgtttcatggaagttgtttataaaattcaaaggtatttcatttaggtgaaaagtcttatttattaaagtggtttgaataaagtagatcaaaacttccagagatcttaatggctatataggaagaaatatcactcaccataatttaaataaagaataaaaatacttgtattttgtggtggcaaatgtttggtagaactgtaattagaaaaatacaagtatatttgcgtgatggttacactagaagcccagactttacgactacacaatatattcatgtatctaaactgtacttgtaccccctaaatttatttttaaaaaaggaaaaataaaagtatcatgaaaaaacctatttttttttccactgtccttccactactcccataacaaacttatccatggttggtaaaattttacatatttctatccttgaaatgaaggcttcttttaaattccaaagaagtcatggaggcctgtgcatttgaattgtatatgctagtgaggaaaagatttagacatttcaagagcagggttggccaggcgcggtggctcacacctgtaatcccagcactttgggaggccgaggagggcggatcacgaggtcaggagatcgagaccatcctggctaacacagtgaaaccccatctctactaaaaaaaaaaaaaaaaaaaaaatgggctgggcgtggtggtgggcacctgtagtcccagctactcaggaggctgaggcaggagaatggcgtgaacctgggaggcggagcttgcagtgagccgagattgcgccactgcactccagcctgggcgacagaggagactctgtctcaaaaaaaaaaaaaaaaaaaaagagcagggtcataatcacacagcagtgccttatatagttgccataagacttcagtgcagtacaacataattttacagctacatatcagggcatattctatatggtgtatttgtgttagaataacacattaaatgtctttaaacataaaaataagaatgtttgcatgtttcagttttcaagaaccaaatgagtaattagctatagattccactggccttaaacatacaattaagtgtatacatgatatagtgcacacacaaaagccacctttaattattgaaataacctgtattctttttggaaatcatttaagtttggtattgaagtactatattttttgtgcatcaatgtatttttctatttacaagcctatgtaaaagtgaagtgtatcttcagtgaaccatgtgccaattaagctgtaataaaaaagtggtctagtctgtcaaa

SEQ ID NO: 257929 - DNA, 666 bp, Artificial Sequence
  derived and/or modified sequence
atgagcgacggcgactacgactacctgatcaagttcctggccctgggcgacagcggcgtgggcaagaccagcgtgctgtaccagtacaccgacggcaagttcaacagcaagttcatcaccaccgtgggcatcgacttcagagagaagagagtggtgtacagagccagcggccccgacggcgccaccggcagaggccagagaatccacctgcagctgtgggacaccgccggccaggagagattcagaagcctgaccaccgccttcttcagagacgccatgggcttcctgctgctgttcgacctgaccaacgagcagagcttcctgaacgtgagaaactggatcagccagctgcagatgcacgcctactgcgagaaccccgacatcgtgctgtgcggcaacaagagcgacctggaggaccagagagtggtgaaggaggaggaggccatcgccctggccgagaagtacggcatcccctacttcgagaccagcgccgccaacggcaccaacatcagccaggccatcgagatgctgctggacctgatcatgaagagaatggagagatgcgtggacaagagctggatccccgagggcgtggtgagaagcaacggccacgccagcaccgaccagctgagcgaggagaaggagaagggcgcctgcggctgctag

SEQ ID NO: 257930 - DNA, 642 bp, Artificial Sequence
  derived and/or modified sequence
atgagcgacggcgactacgactacctgatcaagttcctggccctgggcgacagcggcgtgggcaagaccagcgtgctgtaccagtacaccgacggcaagttcaacagcaagttcatcaccaccgtgggcatcgacttcagagagaagagagtggtgtacagagccagcggccccgacggcgccaccggcagaggccagagaatccacctgcagctgtgggacaccgccggccaggagagattcagaagcctgaccaccgccttcttcagagacgccatgggcttcctgctgctgttcgacctgaccaacgagcagagcttcctgaacgtgagaaactggatcagccagctgcagatgcacgcctactgcgagaaccccgacatcgtgctgtgcggcaacaagagcgacctggaggaccagagagtggtgaaggagaagtacggcatcccctacttcgagaccagcgccgccaacggcaccaacatcagccaggccatcgagatgctgctggacctgatcatgaagagaatggagagatgcgtggacaagagctggatccccgagggcgtggtgagaagcaacggccacgccagcaccgaccagctgagcgaggagaaggagaagggcgcctgcggctgctag

SEQ ID NO: 257931 - protein, 90 aa, Artificial Sequence
  derived and/or modified sequence
MADVEDGEETCALASHSGSSGSKSGGDKMFSLKKWNAVAMWSWDVECDTCAICRVQMPVLDVKLKTNKRTVLWSGENVIIPSTTAACPCG

SEQ ID NO: 257932 - DNA, 273 bp, Artificial Sequence
  derived and/or modified sequence
atggctgatgtggaggacggcgaagaaacctgtgctctggcatcacactctggcagctccggcagtaagtcagggggcgacaagatgtttagcttgaaaaaatggaacgccgtggcaatgtggagctgggacgttgaatgtgatacgtgtgcaatctgtcgcgtgcagatgcctgttctcgacgtgaagcttaaaacaaataagcggaccgtgttgtggagcggggaaaatgtgatcattccaagtaccaccgccgcttgcccgtgcggttag

SEQ ID NO: 257933 - DNA, 273 bp, Artificial Sequence
  derived and/or modified sequence
atggctgatgtggaggatggagaggagacctgtgccctggccagccacagcggcagcagcggcagcaagagcggcggggacaagatgttcagcctgaagaagtggaatgctgtggccatgtggagctgggatgtggagtgtgacacctgtgccatctgccgggtgcagatgcctgtgctggatgtgaagctgaagaccaacaagaggacagtgctgtggagcggggagaatgtcatcatccccagcaccacagctgcctgcccctgtggctag

SEQ ID NO: 257934 - DNA, 273 bp, Artificial Sequence
  derived and/or modified sequence
atggccgacgtggaggacggcgaggagacctgcgccctggccagccattctggctccagtggcagcaagtctggcggggacaaaatgttttcactgaagaaatggaacgctgtggcaatgtggtcttgggacgtcgaatgtgacacctgtgctatttgtagagttcaaatgcctgtcctcgacgtgaagttgaaaacaaacaagaggaccgtgctgtggtccggggagaacgtcattattccttcgaccactgccgcgtgtccttgtgggtag

SEQ ID NO: 257935 - DNA, 273 bp, Artificial Sequence
  derived and/or modified sequence
atggcggacgtggaagacggtgaagaaacatgcgcgttggcatcccacagcggcagtagtggtagtaagtccgggggtgacaagatgttctccctcaaaaagtggaacgcagtcgcaatgtggtcctgggacgtcgaatgcgacacgtgtgcaatttgtagggtgcagatgccagtcctggacgtcaaactgaaaactaataagcggactgtgctctggtccggcgagaacgtgatcatccccagcaccaccgctgcatgcccctgcggttag

SEQ ID NO: 257936 - DNA, 805 bp, Artificial Sequence
  derived and/or modified sequence
ccttccccaagccaacgtctccgccgtcggctccgcggcgccgccatggccgacgtggaagacggagaggaaacctgcgccctggcctctcactccgggagctcaggctccaagtcgggaggcgacaagatgttctccctcaagaagtggaacgcggtggccatgtggagctgggacgtggagtgcgatacgtgcgccatctgcagggtccagatgcctgtcttagatgtcaagctgaaaacaaacaagaggactgtgttgtggtctggggagaatgtaatcattccttccacaactgctgcatgtccctgtgggtgaaacagaacaatcgctgccctctctgccagcaggactgggtggtccaaagaatcggcaaatgagagtggttagaaggcttcttagcgcagttgttcagagccctggtggatcttgtaatccagtgccctacaaaggctagaacactacaggggatgaattcttcaaataggagccgatggatctgtggtcctttgggactcatcaaagccttggtttagcattttgtcagttttatcttcagaaattctctgcgattaagaagataatttattaaaggtggtccttcctacctctgtggtgtgtgtcgcgcacacagcttagaagtgctataaaaaaggaaagagctccaaattgaatcacctttataatttacccatttctatacaacaggcagtggaagcagtttcagagaactttttgcatgcttatggttgatcagttaaaaaagaatgttacagtaacaaataaagtgcagtttaaaacccaa

SEQ ID NO: 257937 - DNA, 273 bp, Artificial Sequence
  derived and/or modified sequence
atggccgacgtggaggacggcgaggagacctgcgccctggccagccacagcggcagcagcggcagcaagagcggcggcgacaagatgttcagcctgaagaagtggaacgccgtggccatgtggagctgggacgtggagtgcgacacctgcgccatctgcagagtgcagatgcccgtgctggacgtgaagctgaagaccaacaagagaaccgtgctgtggagcggcgagaacgtgatcatccccagcaccaccgccgcctgcccctgcggctag

SEQ ID NO: 257938 - protein, 190 aa, Artificial Sequence
  derived and/or modified sequence
MTAVGVQAQRPLGQRQPRRSFFESFIRTLIITCVALAVVLSSVSICDGHWLLAEDRLFGLWHFCTTTNQTICFRDLGQAHVPGLAVGMGLVRSVGALAVVAAIFGLEFLMVSQLCEDKHSQCKWVMGSILLLVSFVLSSGGLLGFVILLRNQVTLIGFTLMFWCEFTASFLLFLNAISGLHINSITHPWE

SEQ ID NO: 257939 - DNA, 573 bp, Artificial Sequence
  derived and/or modified sequence
atgaccgccgtgggcgtgcaggcccagagacccctgggccagagacagcccagaagaagcttcttcgagagcttcatcagaaccctgatcatcacctgcgtggccctggccgtggtgctgagcagcgtgagcatctgcgacggccactggctgctggccgaggacagactgttcggcctgtggcacttctgcaccaccaccaaccagaccatctgcttcagagacctgggccaggcccacgtgcccggcctggccgtgggcatgggcctggtgagaagcgtgggcgccctggccgtggtggccgccatcttcggcctggagttcctgatggtgagccagctgtgcgaggacaagcacagccagtgcaagtgggtgatgggcagcatcctgctgctggtgagcttcgtgctgagcagcggcggcctgctgggcttcgtgatcctgctgagaaaccaggtgaccctgatcggcttcaccctgatgttctggtgcgagttcaccgccagcttcctgctgttcctgaacgccatcagcggcctgcacatcaacagcatcacccacccctgggagtag

SEQ ID NO: 257940 - DNA, 573 bp, Artificial Sequence
  derived and/or modified sequence
atgactgccgtgggcgtgcaggcacagcgtcccctcgggcagcgacagcctagacggtccttcttcgaatcgttcattcgcacgctgatcattacatgtgtggccttggccgtggtcctcagtagtgtcagcatctgcgacggccactggcttctagccgaggacagactcttcggactctggcatttctgtaccaccactaaccagacaatttgttttagggacctcggacaggctcatgtaccaggccttgccgtagggatgggtctggttcggtccgttggcgccctggccgtggtggctgcgatatttggcttggaattcctgatggtctcccagctgtgtgaggataagcatagccaatgtaaatgggtaatggggagtatcctgttgctggtgtcctttgtattgtcgagtgggggcttgctaggcttcgtgattctgttgcgtaaccaggttaccctgataggatttaccttaatgttttggtgtgaattcactgcctccttccttttgttcctgaacgcaatctctgggttgcacatcaatagcattactcacccctgggaatag

SEQ ID NO: 257941 - DNA, 573 bp, Artificial Sequence
  derived and/or modified sequence
atgacagctgtgggcgtgcaggcccagaggcccctgggccagaggcagccccggcgctccttctttgagagcttcatccgcaccctcatcatcacctgtgtggccctggccgtggtgctgagctctgtgtccatctgtgatggccactggctgctggccgaggaccggctgtttggcctgtggcacttctgcaccaccaccaaccagaccatctgcttccgggacctgggccaggcccacgtgcccggcctggccgtgggcatgggcctggtgcgctctgtgggcgccctggccgtggtggccgccatcttcggcctggagttcctgatggtgtcccagctgtgtgaggacaagcacagccagtgcaagtgggtgatgggcagcatcctgctgctggtgtcctttgtgctgagcagcggcggcctgctgggctttgtgatcctgctgaggaaccaggtgaccctcatcggcttcaccctgatgttctggtgtgagttcaccgccagcttcctgctcttcctgaatgccatcagcggcctgcacatcaacagcatcacccacccctgggagtag

SEQ ID NO: 257942 - DNA, 573 bp, Artificial Sequence
  derived and/or modified sequence
atgaccgccgtgggcgtgcaggcccagcggcccctgggccagcggcagccaaggagatcgttttttgaatccttcatcaggacactcatcatcacatgtgttgccctcgcagtggtcttgagttccgtgagtatctgcgacggacattggctgctcgccgaggataggctgttcgggctgtggcacttctgcactacaacaaatcaaactatctgcttcagggacctgggacaggcccatgttccaggcctggcagtgggtatggggcttgtcaggtccgtgggtgccctggcggtggtggctgccatattcgggcttgagtttttgatggtgagtcagctttgcgaggataagcatagtcagtgcaaatgggtaatgggctcgattctactgttggtgtcttttgtgcttagcagcggcggactgctagggtttgtgattcttctgagaaatcaggtgaccttgataggatttacactaatgttttggtgcgaattcacagcatccttcctgttgtttcttaacgccatcagtggcctgcatatcaatagcatcacgcacccttgggagtag

SEQ ID NO: 257943 - DNA, 573 bp, Artificial Sequence
  derived and/or modified sequence
atgaccgccgtgggcgtgcaggcgcagcgcccactgggccagcgccagcccagaagaagcttcttcgagagcttcatccgcactctgatcatcacttgcgtggcccttgcagtcgtgctgagctcagtgtccatttgcgacggacattggctgttagcggaagatcggctattcggactgtggcatttttgcaccaccacaaaccagactatttgtttcagggatctggggcaggcacacgtcccagggctcgctgtgggtatgggactcgtgaggagtgtgggcgctctggctgttgtcgcagcaatttttggcctggaatttcttatggtgagccagctgtgcgaagacaagcatagccagtgcaagtgggtcatgggatccattttacttctggttagttttgtgctgtcttctggtggactgctaggatttgttatactcctgcggaaccaggtcactctaattggatttacccttatgttttggtgcgaattcaccgcatcattcctgttgtttttgaatgcaattagcggcctgcatatcaacagcataacccacccctgggagtag

SEQ ID NO: 257944 - DNA, 1688 bp, Artificial Sequence
  derived and/or modified sequence
gcgatcgaggctgcagcgcggccgccgggcgcagcatgactgccgtcggcgtgcaggcccagaggcctttgggccaaaggcagccccgccggtccttctttgaatccttcatccggaccctcatcatcacgtgtgtggccctggctgtggtcctgtcctcggtctccatttgtgatgggcactggctcctggctgaggaccgcctcttcgggctctggcacttctgcaccaccaccaaccagacgatctgcttcagagacctgggccaggcccatgtgcccgggctggccgtgggcatgggcctggtacgcagcgtgggcgccttggccgtggtggccgccatttttggcctggagttcctcatggtgtcccagttgtgcgaggacaaacactcacagtgcaagtgggtcatgggttccatcctcctcctggtgtctttcgtcctctcctccggcgggctcctgggttttgtgatcctcctcaggaaccaagtcacactcatcggcttcaccctaatgttttggtgcgaattcactgcctccttcctcctcttcctgaacgccatcagcggccttcacatcaacagcatcacccatccctgggaatgaccgtggaaattttaggccccctccagggacatcagattccacaagaaaatatggtcaaaatgggacttttccagcatgtggcctctggtggggctgggttggacaagggccttgaaacggctgcctgtttgccgataacttgtgggtggtcagccagaaatggcccgggggcctctgcacctggtctgcagggccagaggccaggagggtgcctcagtgccaccaactgcacaggcttagccagatgttgattttagaggaagaaaaaaacattttaaaactccttcttgaattttcttccctggactggaatacagttggaagcacaggggtaactggtacctgagctagctgcacagccaaggatagttcatgcctgtttcattgacacgtgctgggataggggctgcagaatccctggggctcccagggttgttaagaatggatcattcttccagctaagggtccaatcagtgcctaggactttcttccaccagctcaaagggccttcgtatgtatgtccctggcttcagctttggtcatgccaaagaggcagagttcaggattccctcagaatgccctgcacacagtaggtttccaaaccatttgactcggtttgcctccctgcccgttgtttaaaccttacaaaccctggataaccccatcttctagcagctggctgtgcctctgggagctctgcctatcagaaccctaccttaaggtgggtttccttccgagaagagttcttgagcaagctctcccaggagggcccacctgactgctaatacacagccctccccaaggcccgtgtgtgcatgtgtctgtcttttgtgagggttagacagcctcagggcaccatttttaatcccagaacacatttcaaagagcacgtatctagacctgctggactctgcagggggtgagggggaacagcgagagcttgggtaatgattaacacccatgctggggatgcatggaggtgaagggggccaggaaccagtggagatttccatccttgccagcacgtctgtacttctgttcattaaagtgctccctttctagtcctttttctgcccagaa

SEQ ID NO: 257945 - protein, 563 aa, Artificial Sequence
  derived and/or modified sequence
MEGPLTPPPLQGGGAAAVPEPGARQHPGHETAAQRYSARLLQAGYEPESMADYLISGGTGYVPEDGLTAQQLFASADGLTYNDFLILPGFIDFIADEVDLTSALTRKITLKTPLISSPMDTVTEADMAIAMALMGGIGFIHHNCTPEFQANEVRKVKKFEQGFITDPVVLSPSHTVGDVLEAKMRHGFSGIPITETGTMGSKLVGIVTSRDIDFLAEKDHTTLLSEVMTPRIELVVAPAGVTLKEANEILQRSKKGKLPIVNDCDELVAIIARTDLKKNRDYPLASKDSQKQLLCGAAVGTREDDKYRLDLLTQAGVDVIVLDSSQGNSVYQIAMVHYIKQKYPHLQVIGGNVVTAAQAKNLIDAGVDGLRVGMGCGSICITQEVMACGRPQGTAVYKVAEYARRFGVPIIADGGIQTVGHVVKALALGASTVMMGSLLAATTEAPGEYFFSDGVRLKKYRGMGSLDAMEKSSSSQKRYFSEGDKVKIAQGVSGSIQDKGSIQKFVPYLIAGIQHGCQDIGARSLSVLRSMMYSGELKFEKRTMSAQIEGGVHGLHSYEKRLY

SEQ ID NO: 257946 - DNA, 1692 bp, Artificial Sequence
  derived and/or modified sequence
atggagggtccacttacccccccgccactccagggcggcggcgcagctgctgtgcccgagcccggcgctcgccagcacccaggacatgagaccgctgcccagaggtacagcgcccgcctcctgcaggcaggctatgagccagagtccatggctgattatcttataagcggcggtactgggtacgtccccgaagatggcctcacagctcaacagttgttcgcgtcagcagacgggctgacctataacgattttttaatcctgcccggcttcattgatttcattgccgatgaggtcgacctcacttctgctttgactcggaagattacactcaagacaccccttatttcatctccgatggacaccgtgaccgaagctgatatggctatcgcaatggcactgatgggcgggatcggctttatccaccataactgcacccccgaattccaggccaacgaggtgagaaaggtgaaaaaattcgagcaggggtttattacagacccggtggtgctatctcctagtcacacggtgggagacgtgttagaagccaaaatgcgtcacggctttagtggcattcccatcacggaaacagggacaatggggtctaaactggtgggcatcgttacaagccgggacatcgacttcctagccgagaaagaccacaccacactactgagtgaggtgatgaccccaagaattgagctcgtggtggcgccagccggcgttactctcaaggaagcgaacgagatcctgcaaaggtccaagaaagggaaattacccatagtgaatgactgtgatgaactggtggcgattattgctcgcactgacttaaaaaagaatcgggattaccccctggctagtaaagattcacagaagcaactgctgtgtggtgccgcagttggtacaagagaggatgataagtatcgtcttgaccttctcacacaggcaggagtggacgtgatcgtgctcgactcttcgcagggcaactcagtttatcaaatcgcaatggttcactatatcaaacagaaatatccccacctacaggtgattggagggaatgtggttacagccgcacaagccaagaatctgatcgacgctggtgtggatggccttcgggtcgggatgggatgcggctccatatgcattactcaggaggtgatggcctgtggtaggccccaggggacagccgtatacaaagtagcagagtacgcccggcgcttcggcgttccaataatcgcagacggaggaattcagacagtggggcacgtggtgaaggccctcgctttgggcgcatctacagtcatgatggggagtcttctggcagccaccacggaggcacccggagagtatttcttcagcgatggcgtgcgcttaaagaaataccgcggaatgggctccctggacgcaatggaaaaaagctcctcgtcccaaaaaaggtatttttccgaaggagacaaagtcaagatcgcgcaaggtgttagcgggagcatacaagacaagggctccatacagaaatttgttccgtatctcatcgccggtatccagcacggctgccaggatattggggcccgctcactaagcgtcctacgatcaatgatgtatagtggcgaactcaaatttgagaaacgtacaatgtccgcccagatagagggcggagtgcacggattgcactcctacgagaaacggctctattag

SEQ ID NO: 257947 - DNA, 2395 bp, Artificial Sequence
  derived and/or modified sequence
ggctgcgctcactgcccagccggggccccgggagcctccaggctcccgcccgccctgagctgcggcctccgcatggaggggccactcactccaccaccgctgcagggaggcggagccgccgctgttccggagcccggagcccggcaacacccgggacacgagacggcggcgcagcggtacagcgcccgactgctgcaggccggctacgagcccgagagcatggcggactacctgatcagcggcggcaccggctacgtgcccgaggatgggctcaccgcgcagcagctcttcgccagcgccgacggcctcacctacaacgacttcctgattctcccaggattcatagacttcatagctgatgaggtggacctgacctcagccctgacccggaagatcacgctgaagacgccactgatctcctcccccatggacactgtgacagaggctgacatggccattgccatggctaagtttgaacagggcttcatcacggaccctgtggtgctgagcccctcgcacactgtgggcgatgtgctggaggccaagatgcggcatggcttctctggcatccccatcactgagacgggcaccatgggcagcaagctggtgggcatcgtcacctcccgagacatcgactttcttgctgagaaggaccacaccaccctcctcagtgaggtgatgacgccaaggattgaactggtggtggctccagcaggtgtgacgttgaaagaggcaaatgagatcctgcagcgtagcaagaaagggaagctgcctatcgtcaatgattgcgatgagctggtggccatcatcgcccgcaccgacctgaagaagaaccgagactaccctctggcctccaaggattcccagaagcagctgctctgtggggcagctgtgggcacccgtgaggatgacaaataccgtctggacctgctcacccaggcgggcgtcgacgtcatagtcttggactcgtcccaagggaattcggtgtatcagatcgccatggtgcattacatcaaacagaagtacccccacctccaggtgattggggggaacgtggtgacagcagcccaggccaagaacctgattgatgctggtgtggacgggctgcgcgtgggcatgggctgcggctccatctgcatcacccaggaagtgatggcctgtggtcggccccagggcactgctgtgtacaaggtggctgagtatgcccggcgctttggtgtgcccatcatagccgatggcggcatccagaccgtgggacacgtggtcaaggccctggcccttggagcctccacagtgatgatgggctccctgctggccgccactacggaggcccctggcgagtacttcttctcagacggggtgcggctcaagaagtaccggggcatgggctcactggatgccatggagaagagcagcagcagccagaaacgatacttcagcgagggggataaagtgaagatcgcgcagggtgtctcgggctccatccaggacaaaggatccattcagaagttcgtgccctacctcatagcaggcatccaacacggctgccaggatatcggggcccgcagcctgtctgtccttcggtccatgatgtactcaggagagctcaagtttgagaagcggaccatgtcggcccagattgagggtggtgtccatggcctgcactcttacgaaaagcggctgtactgaggacagcggtggaggccgaggtggtggaggggatgcaccccagtgtccacttttgggcacagcctccctccataactgagtggtccacagatttgcactacgggttctccagctcctttccaggcagagaggaggggaggtcctgaggggactgctgcccctcactcggcatcccctgcagagtcaggactgctcccggggccaggctgccctgggagcccccctccgagcccagccagccaggctctcaggccctgcgcctgcctcaggtctttcttgctgcagcctgctccagcctggcccccaccccaggggcaggcggcccctcctggcttctcctgtagggcacctccctgcccctagcctcccaggaaatggtgctctcctggccctgcctctggcccttcccgggccgctgcccctcagccatgtggcacttctgagctcctgacctaggccaaggggaggtctctgcccccttccccggccctgggctacccttgggtcctgctcctcaggccgctcccctgtccctggccatgggtaggagactgccctggtcatggccgcctgcctgtcattcctgactcaccaccgtccccaggtgaaccattcctcccttctcctcagctgcagtcgaaggctttaactttgcacacttgggatcacagttgcgtcattgtgtattaaatacttggaataaatc

SEQ ID NO: 257948 - DNA, 2479 bp, Artificial Sequence
  derived and/or modified sequence
actcgaccgggctgcgctcactgcccagccggggccccgggagcctccaggctcccgcccgccctgagctgcggcctccgcatggaggggccactcactccaccaccgctgcagggaggcggagccgccgctgttccggagcccggagcccggcaacacccgggacacgagacggcggcgcagcggtacagcgcccgactgctgcaggccggctacgagcccgagagcatggcggactacctgatcagcggcggcaccggctacgtgcccgaggatgggctcaccgcgcagcagctcttcgccagcgccgacggcctcacctacaacgacttcctgattctcccaggattcatagacttcatagctgatgaggtggacctgacctcagccctgacccggaagatcacgctgaagacgccactgatctcctcccccatggacactgtgacagaggctgacatggccattgccatggctctgatgggaggtattggtttcattcaccacaactgcaccccagagttccaggccaacgaggtgcggaaggtcaagaagtttgaacagggcttcatcacggaccctgtggtgctgagcccctcgcacactgtgggcgatgtgctggaggccaagatgcggcatggcttctctggcatccccatcactgagacgggcaccatgggcagcaagctggtgggcatcgtcacctcccgagacatcgactttcttgctgagaaggaccacaccaccctcctcagtgaggtgatgacgccaaggattgaactggtggtggctccagcaggtgtgacgttgaaagaggcaaatgagatcctgcagcgtagcaagaaagggaagctgcctatcgtcaatgattgcgatgagctggtggccatcatcgcccgcaccgacctgaagaagaaccgagactaccctctggcctccaaggattcccagaagcagctgctctgtggggcagctgtgggcacccgtgaggatgacaaataccgtctggacctgctcacccaggcgggcgtcgacgtcatagtcttggactcgtcccaagggaattcggtgtatcagatcgccatggtgcattacatcaaacagaagtacccccacctccaggtgattggggggaacgtggtgacagcagcccaggccaagaacctgattgatgctggtgtggacgggctgcgcgtgggcatgggctgcggctccatctgcatcacccaggaagtgatggcctgtggtcggccccagggcactgctgtgtacaaggtggctgagtatgcccggcgctttggtgtgcccatcatagccgatggcggcatccagaccgtgggacacgtggtcaaggccctggcccttggagcctccacagtgatgatgggctccctgctggccgccactacggaggcccctggcgagtacttcttctcagacggggtgcggctcaagaagtaccggggcatgggctcactggatgccatggagaagagcagcagcagccagaaacgatacttcagcgagggggataaagtgaagatcgcgcagggtgtctcgggctccatccaggacaaaggatccattcagaagttcgtgccctacctcatagcaggcatccaacacggctgccaggatatcggggcccgcagcctgtctgtccttcggtccatgatgtactcaggagagctcaagtttgagaagcggaccatgtcggcccagattgagggtggtgtccatggcctgcactcttacgaaaagcggctgtactgaggacagcggtggaggccgaggtggtggaggggatgcaccccagtgtccacttttgggcacagcctccctccataactgagtggtccacagatttgcactacgggttctccagctcctttccaggcagagaggaggggaggtcctgaggggactgctgcccctcactcggcatcccctgcagagtcaggactgctcccggggccaggctgccctgggagcccccctccgagcccagccagccaggctctcaggccctgcgcctgcctcaggtctttcttgctgcagcctgctccagcctggcccccaccccaggggcaggcggcccctcctggcttctcctgtagggcacctccctgcccctagcctcccaggaaatggtgctctcctggccctgcctctggcccttcccgggccgctgcccctcagccatgtggcacttctgagctcctgacctaggccaaggggaggtctctgcccccttccccggccctgggctacccttgggtcctgctcctcaggccgctcccctgtccctggccatgggtaggagactgccctggtcatggccgcctgcctgtcattcctgactcaccaccgtccccaggtgaaccattcctcccttctcctcagctgcagtcgaaggctttaactttgcacacttgggatcacagttgcgtcattgtgtattaaatacttggaataaatc

SEQ ID NO: 257949 - DNA, 1692 bp, Artificial Sequence
  derived and/or modified sequence
atggagggccccctgaccccaccacccctgcagggcggcggcgctgctgctgtgcctgagcccggggcccggcagcaccctggccatgaaacagctgcccagcgctacagcgcccggctgctgcaggccggctatgagcctgagagcatggctgactacctgatcagcggcggcaccggctacgtgcctgaagatggcctgacagcccagcagctgtttgccagcgcagatggcctgacctacaatgacttcctgatcctgcccggcttcatcgacttcatcgcagatgaggtggacctgaccagcgccctgaccaggaagatcaccctgaagacccccctcatcagcagccccatggacacagtgacagaagctgacatggccatcgccatggccctgatgggcggcatcggcttcatccaccacaactgcaccccagagttccaggccaatgaggtgaggaaggtgaagaagtttgagcagggcttcatcacagatcctgtggtgctgagccccagccacacagtgggagatgtgctggaggccaagatgagacatggcttcagcggcatccccatcacagagaccggcaccatgggcagcaagctggtgggcatcgtgaccagccgggacatcgacttcctggccgagaaggaccacaccaccctgctgtctgaggtgatgaccccccgcatcgagctggtggtggccccagctggggtgaccctgaaggaggccaatgagatcctgcagaggagcaagaagggcaagctgcccatcgtgaatgactgtgatgagctggtggccatcatcgccaggacagacctgaagaagaacagagactaccccctggccagcaaggacagccagaagcagctgctgtgtggggctgctgtgggcaccagagaagatgacaagtaccgcctggacctgctgacccaggccggcgtggatgtgattgtgctggacagcagccagggcaacagcgtgtaccagatcgccatggtgcactacatcaagcagaagtacccccacctgcaggtgattggaggaaatgtggtgacagctgcccaggccaagaacctgattgatgctggggtggatggcctgcgggtgggcatgggctgcggcagcatctgcatcacccaggaggtgatggcctgtggccggccccagggcacagctgtgtacaaggtggccgagtatgcccggcgcttcggcgtgcccatcatcgcagatggcggcatccagacagtgggccacgtggtgaaggccctggccctgggcgccagcacagtgatgatgggcagcctgctggccgccaccacagaggcccctggagagtacttcttcagtgatggagtgcggctgaagaagtaccggggcatgggcagcctggatgccatggagaagagcagcagcagccagaagcgctacttcagcgagggggacaaggtgaagatcgcccagggcgtgtctggcagcatccaggacaagggcagcatccagaagtttgtgccctacctgattgctggcatccagcacggctgccaggacatcggggcccggagcctgtctgtgctgcgctccatgatgtacagcggggagctgaagtttgagaagaggaccatgtctgcccagatcgagggcggcgtgcacggcctgcacagctatgagaagaggctgtactag

SEQ ID NO: 257950 - DNA, 1692 bp, Artificial Sequence
  derived and/or modified sequence
atggagggccccctgacccccccccccctgcagggcggcggcgccgcagctgtgccagagcctggagctcgacaacaccctggccatgagaccgcagcccaaagatacagcgccagattgctgcaggcaggctatgaacccgaatcaatggccgactatctgatttccggaggaacaggttacgttccggaagacgggcttaccgcccagcagctgttcgcaagtgcagacggtctgacatataacgattttctcattctccctggctttatcgatttcattgccgatgaggtagacctcactagtgcattaacacgcaagatcacactcaaaacccccttgatctcatccccaatggacacagtcacagaggccgacatggccattgctatggctcttatgggaggaatcggtttcatccatcacaactgcaccccagagtttcaggcaaatgaggtccgtaaagtgaaaaaattcgagcagggcttcatcaccgatcctgtggtgctgagcccgtcccacacagtgggagatgtgctggaggccaaaatgagacatggcttctcagggatccctataacggagacaggcaccatgggttctaaactggttggaatagtgacttctagggacatcgatttccttgcagaaaaggatcatacgacacttttgtcggaagtgatgacgccccggatagagctagtcgttgctccagccggagtcactcttaaggaggcaaacgagatactgcagcgaagtaagaagggtaaactccctattgttaatgattgcgacgaattagtggcgattatcgcccgcaccgatttgaagaaaaacagagattaccccctggcgtctaaggattcccagaaacagcttctgtgtggggctgccgtgggaacaagagaagacgataaatatcggttggacttgctgactcaagccggagtcgatgtcatcgtgttggactctagtcaggggaattcagtataccagattgcaatggtccactatattaaacagaagtaccctcatcttcaggtgatcgggggcaacgtcgtgaccgcagcacaggctaaaaacttaatcgacgctggagtcgatggtctgagggtcggcatgggatgcggctctatctgcattacccaggaggtgatggcgtgcgggagaccccagggcactgcagtgtacaaagtcgccgagtatgcaagaaggttcggggttcctataatagctgatggaggcatccagaccgtgggccacgtggtcaaagcgttggcgctgggggcttctacagttatgatgggctcactcctggccgccaccacagaggcacctggcgaatacttcttctccgatggtgtgcgacttaagaagtatcgcggcatgggcagcctggatgcaatggaaaaaagcagctcaagccagaaacgctacttctcggagggcgacaaggtgaagatcgcacaaggagtcagtggctcgattcaggataaagggtccattcagaaattcgtgccttatctgatcgctggcatccagcacggctgtcaggatatcggggcccggagcctgagtgttctgagaagcatgatgtacagcggagaattgaaatttgagaaacgtacaatgagcgctcagattgaaggcggcgtgcacggactgcacagctatgagaagaggctctattag

SEQ ID NO: 257951 - DNA, 1692 bp, Artificial Sequence
  derived and/or modified sequence
atggaggggcctctgacaccacccccattgcaaggtggtggggcagccgctgtgccagaaccgggtgctcgccagcacccgggacatgaaactgcagcacagagatacagtgctcggctgctccaggccggatacgagccagaaagcatggccgattacctgatcagcggtggcaccggctatgtgcctgaagatggccttaccgcgcaacagctgtttgcaagtgcagacgggctaacatataacgactttcttatcctcccaggattcatagacttcattgctgacgaagtggatctgacctccgccctcacgcgcaaaattacacttaaaacacccctgattagctcaccaatggacactgttacagaggccgatatggctatagccatggccctcatggggggtataggatttatacatcacaactgcactccagaattccaggccaatgaggttcgcaaggtcaaaaagttcgagcagggtttcattactgatccggtggtgctgtctccttctcatacagtcggggatgttctggaggctaagatgaggcatgggttttcaggcatcccaataaccgaaacaggcactatgggctcaaaactcgtaggaattgtgacatctcgggatatagatttcctggccgaaaaggatcacaccacactgttgtctgaagtgatgacaccacgaattgaacttgtggtagcgcctgccggagttacactaaaggaggccaatgagatactgcaacggtcaaagaaaggcaaacttccaattgtgaatgactgtgatgagctggttgcgattatcgctcggacagatctgaagaagaatagagattaccccctggccagcaaggactcccagaagcagctcctgtgcggcgcagctgtgggaacacgggaggatgacaaatatcgcctggacttactaacccaggcgggagtggacgtgatcgtgctggactcatctcagggaaattccgtgtatcagattgccatggttcattatattaagcagaaatacccacacttacaggtcattggtggtaacgtagtcactgcagcccaggcgaaaaatctcatcgatgcgggagtcgacgggctaagagtgggaatggggtgtggaagcatatgcatcacccaggaagtgatggcatgcgggcgacctcagggaacagcagtttataaggtggcagagtatgctagacggttcggcgtgcccattatcgcagacggcggaattcagaccgtcggccacgtagtcaaggccctggccctcggcgcatctacagtgatgatgggcagcctgctggcagcaactacagaggcaccaggtgaatacttctttagcgatggcgtgcgactcaagaagtatcgcggtatgggaagcttagatgccatggagaagagcagcagctcacagaaacggtatttctcggaaggagataaggtaaaaatcgcacagggcgtaagtggctcaattcaagataagggctcaattcagaaatttgtgccatatctgattgctggcatccaacacggctgccaggacatcggggctcggtcgctatccgtgctgagaagtatgatgtactctggcgagctgaagtttgagaaacggaccatgtcagctcagattgaggggggtgtgcacggtctgcactcttatgagaagaggttgtactag

SEQ ID NO: 257952 - DNA, 1692 bp, Artificial Sequence
  derived and/or modified sequence
atggagggccccctgacccccccccccctgcagggcggcggcgccgccgccgtgcccgagcccggcgccagacagcaccccggccacgagaccgccgcccagagatacagcgccagactgctgcaggccggctacgagcccgagagcatggccgactacctgatcagcggcggcaccggctacgtgcccgaggacggcctgaccgcccagcagctgttcgccagcgccgacggcctgacctacaacgacttcctgatcctgcccggcttcatcgacttcatcgccgacgaggtggacctgaccagcgccctgaccagaaagatcaccctgaagacccccctgatcagcagccccatggacaccgtgaccgaggccgacatggccatcgccatggccctgatgggcggcatcggcttcatccaccacaactgcacccccgagttccaggccaacgaggtgagaaaggtgaagaagttcgagcagggcttcatcaccgaccccgtggtgctgagccccagccacaccgtgggcgacgtgctggaggccaagatgagacacggcttcagcggcatccccatcaccgagaccggcaccatgggcagcaagctggtgggcatcgtgaccagcagagacatcgacttcctggccgagaaggaccacaccaccctgctgagcgaggtgatgacccccagaatcgagctggtggtggcccccgccggcgtgaccctgaaggaggccaacgagatcctgcagagaagcaagaagggcaagctgcccatcgtgaacgactgcgacgagctggtggccatcatcgccagaaccgacctgaagaagaacagagactaccccctggccagcaaggacagccagaagcagctgctgtgcggcgccgccgtgggcaccagagaggacgacaagtacagactggacctgctgacccaggccggcgtggacgtgatcgtgctggacagcagccagggcaacagcgtgtaccagatcgccatggtgcactacatcaagcagaagtacccccacctgcaggtgatcggcggcaacgtggtgaccgccgcccaggccaagaacctgatcgacgccggcgtggacggcctgagagtgggcatgggctgcggcagcatctgcatcacccaggaggtgatggcctgcggcagaccccagggcaccgccgtgtacaaggtggccgagtacgccagaagattcggcgtgcccatcatcgccgacggcggcatccagaccgtgggccacgtggtgaaggccctggccctgggcgccagcaccgtgatgatgggcagcctgctggccgccaccaccgaggcccccggcgagtacttcttcagcgacggcgtgagactgaagaagtacagaggcatgggcagcctggacgccatggagaagagcagcagcagccagaagagatacttcagcgagggcgacaaggtgaagatcgcccagggcgtgagcggcagcatccaggacaagggcagcatccagaagttcgtgccctacctgatcgccggcatccagcacggctgccaggacatcggcgccagaagcctgagcgtgctgagaagcatgatgtacagcggcgagctgaagttcgagaagagaaccatgagcgcccagatcgagggcggcgtgcacggcctgcacagctacgagaagagactgtactag

SEQ ID NO: 257953 - DNA, 1347 bp, Artificial Sequence
  derived and/or modified sequence
atggatcaaaccccaccagccaggcccgagtatctggtcagcggcattcgcacacccccagttcggcggaactccaagctggcaacccttgggcggatttttaaaccatggaaatggaggaagaaaaagaatgagaagctcaaacagaccactagcgcgttagagaaaaaaatggctggccgccaagggcgcgaagaactcatcaagaaggggctattagaaatgatggaacaggacgccgagtccaaaacctgtaatccagacggagggcccagaagcgtgcagtccgagcctccaacgcctaaatcagaaacactgacatctgaggatgcacagcccggtagtccccttgcgaccggtacggaccaggtgtcacttgataagccactttcaagcgctgcacacctggacgatgccggccaagccaccctattccaggcgtccagtatgaaaagtgcagatccatcgttacgggggcagctttcaacccctaccgggtctccacacttgacaaccgtgcatcggcctctccccccatctcgtgtgatcgaagagctgcatcgggcccttgccactaaacaccgtcaggactccttccagggaagggagtctaagggaagtccaaagaaaaggctggatgtcagactgtcaagaacaagctccgtcgaaagaggaaaggagcgggaagaggcttggtctttcgacggcgcacttgagaacaagcgtaccgcggctaaggagtctgaagagaataaggaaaatctgattatcaacagcgagcttaaggacgacctgctcctgtaccaggatgaggaagctttgaacgactccatcatcagtgggaccctgccaaggaaatgtaaaaaggaactgctcgcggttaaactcaggaaccgtcccagtaagcaggagctcgaggataggaatatcttccccaggcgtactgacgaagaaagacaggagattagacagcaaattgagatgaaactgtctaaacggctatctcagagacctgccgtagaagagctggagaggaggaatattctcaagcagcgcaatgatcagaccgaacaagaggagcggagggaaataaagcagcggctaacaaggaagttgaatcagcgtccgacagtcgatgaactaagagacaggaagatcctgattcgtttctctgactacgtcgaggttgccaaagctcaggactacgacaggagggctgacaagccctggacccggctgtctgccgctgacaaagcagcgatacgcaaggagctgaatgagtacaagagcaacgaaatggaggtccacgcctcgtcaaagcacttgaccagatttcatcgcccttag

SEQ ID NO: 257954 - DNA, 1347 bp, Artificial Sequence
  derived and/or modified sequence
atggaccagacaccacccgcccgacctgaatatctcgtgtctgggattcgaacaccaccggtgcgccggaatagcaaacttgcaacactgggccgaattttcaagccctggaaatggcgaaaaaaaaaaaacgagaaactgaagcagactacaagcgccctggaaaagaaaatggcgggaaggcagggtcgcgaggagttgattaagaaaggtcttctggaaatgatggaacaggatgcggaatccaaaacctgcaacccggatgggggtcctcgcagcgtacagtctgagcctccaactcctaagagcgaaacccttaccagcgaagacgcgcaacctggatcccccctagccaccggcacagaccaggtgtctctggataaacccttatcctccgctgcgcatctggatgacgcaggccaggccactctgttccaggcctcctctatgaagtccgcagacccgagtctgcggggccagctcagcacacctaccggcagcccccacctgaccactgtccaccgcccccttccaccttctagagtgattgaggagctgcacagggccctggcaacaaagcaccgacaggatagcttccaggggagggagtcgaaagggagtccgaagaaaagactcgacgtaagactgagcagaaccagctcagttgaacgcggtaaagagcgagaagaagcgtggagcttcgatggcgctctggagaacaaacggactgccgctaaggaatccgaagaaaataaagagaatttaataatcaattctgagctcaaggacgatctgcttctgtaccaggacgaagaagcattaaatgactcaatcatcagtgggactttgcctcgtaagtgcaaaaaagagctgctggctgttaaactgcgtaatcgcccctcaaaacaggagttggaggatagaaatatcttcccccgtaggacagatgaggagaggcaagagatccgccagcaaattgaaatgaagctgtcaaagagactgtctcagcgccctgccgtggaagagctcgagcgccgcaacattttaaaacagagaaacgaccagaccgagcaggaggagcgccgggagattaagcaacggctgacccgcaagctcaatcagcgccccaccgttgacgaactgcgggataggaagattctcataaggttctccgactacgtggaagtcgcaaaagcgcaggattacgatagaagagcggacaagccttggacaaggctttccgctgcggataaagcagctataagaaaagagctgaatgagtataaatccaacgaaatggaggtacatgctagttccaaacatctgacacggtttcatcgcccttag

SEQ ID NO: 257955 - DNA, 1347 bp, Artificial Sequence
  derived and/or modified sequence
atggaccagaccccaccagcccggcctgagtacctggtgtctggcatccgcaccccacctgtgagaagaaacagcaagctggccaccctgggccgcatcttcaagccctggaagtggaggaagaagaagaatgagaagctgaagcagaccaccagcgccctggagaagaagatggccggccggcagggccgggaggagctgatcaagaagggcctgctggagatgatggagcaggatgctgagagcaagacctgcaacccagatggcggccccaggtctgtgcagagcgagccccccacccccaagtctgagaccctgaccagtgaagatgcccagcccggcagccccctggccactggaacagaccaggtgtccctggacaagcccctgagcagcgctgcccacctggatgatgctggccaggccaccctcttccaggccagctccatgaagtctgctgaccccagcctgcggggccagctgagcacccccaccggcagcccccacctgaccaccgtgcaccggcccctgccccccagccgggtgattgaggagctgcaccgggccctggccaccaagcaccggcaggacagcttccagggccgggagagcaagggcagccccaagaagaggctggatgtgcggctgagcaggaccagctctgtggagcggggcaaggagcgggaggaggcctggagctttgatggagccctggagaacaagaggacagctgccaaggagagcgaggagaacaaggaaaatctcatcatcaacagcgagctgaaggatgacctgctgctgtaccaggatgaggaggccctgaatgacagcatcatcagcggcaccctgcccaggaagtgcaagaaggagctgctggccgtgaagctgaggaaccggcccagcaagcaggagctggaggacaggaacatcttccccaggagaacagatgaggagcggcaggagatccggcagcagatcgagatgaagctgagcaagaggctgagccagaggcctgctgtggaggagctggagaggaggaacatcctgaagcagagaaatgaccagacagagcaggaggagcggcgggagatcaagcagaggctgaccaggaagctgaaccagaggcccaccgtggatgagctgcgggacaggaagatcctgatccgcttcagtgactatgtggaggtggccaaggcccaggactatgaccggcgggctgacaagccctggacccggctgtctgctgctgacaaggccgccatcaggaaggagctgaatgagtacaagagcaatgagatggaggtgcacgccagcagcaagcacctgacccgcttccaccggccctag

SEQ ID NO: 257956 - DNA, 1347 bp, Artificial Sequence
  derived and/or modified sequence
atggaccagaccccccccgcccggcccgagtacctggtgagcggcattagaacaccaccagtgagaaggaatagcaagctggctacactcggccgcatcttcaagccgtggaagtggcgtaagaaaaaaaatgagaaactgaaacagacaaccagtgccctggagaaaaagatggctgggcggcagggaagagaagagctcatcaaaaaaggactgcttgaaatgatggagcaggacgcagaaagcaaaacctgcaaccccgatggcggccctcggtctgtgcagagcgagccacctaccccaaaatcggagacgcttacaagcgaagacgcccagccaggctcacctctggccactgggactgaccaggtgagcctagataaaccgctcagctcggccgcccatttggatgatgccggccaggctacattgttccaggccagttcaatgaaaagcgccgatcccagcctcaggggccaattgagcacaccgactggcagtccacatctcaccaccgtccatagaccactgcccccaagccgcgtgattgaagaactccacagggcccttgccacaaaacaccgtcaggactctttccaagggagagaatctaaggggtcacccaaaaagagactggatgtcagattgtcccgcacgtcctctgtggaacgcggaaaggagagggaggaagcctggagctttgatggtgctttggaaaataagcgcacggccgctaaggaatccgaagaaaacaaagagaacctcattataaacagcgaactgaaagacgatctgctgctgtaccaggatgaggaagctttaaacgatagcatcatcagcggtactctgcctcggaagtgcaaaaaggagctgcttgcagtgaagttgcgcaaccggccatcaaagcaggagctggaggatcgcaacatcttccctcggagaacagatgaagagaggcaggagatccggcagcagattgagatgaaactatctaagcgactatctcagcgcccagccgtggaagaactcgagagacgcaatatccttaagcagaggaatgaccagacagagcaggaggagcgcagggagataaaacagcggctcacccgcaaactgaaccaaagacctacagtggacgaactgcgggataggaagattctgatccgctttagtgactatgttgaggtggcgaaggctcaagactatgatcgacgggcggacaaaccttggacaagactgagcgccgcagacaaggctgcaattcggaaagaactgaacgagtacaagtcgaatgaaatggaggtacacgccagcagtaaacatctgacaaggttccatcgaccttag

SEQ ID NO: 257957 - DNA, 1347 bp, Artificial Sequence
  derived and/or modified sequence
atggaccagaccccccccgcccggcccgagtacctggtgagcggcatacgaaccccccccgttaggcgaaatagtaaactggctacactggggcggatatttaagccatggaaatggcgcaaaaaaaagaacgaaaaactcaagcaaactacatcagctttggaaaagaaaatggccgggcgtcaaggcagggaagagctcattaagaaagggctcctggagatgatggagcaggatgcagagagcaagacttgcaatccagacgggggtccaagaagcgtccaatctgagccgcctacgcctaagagcgaaactcttacctcagaggacgctcagccgggctcgcctcttgcaaccggcaccgaccaggtgtccctggataaaccgttgtcttcggctgcccacctcgacgacgctggacaagctaccctcttccaggcgtcatccatgaagtctgctgatccaagcctgcgcgggcagctgtctacaccaacgggcagtccccacttgacaaccgtgcaccgcccactcccacccagcagagtgatcgaggagctgcatcgggccctggcaactaaacaccggcaggacagtttccaggggcgggagagcaaaggatctcctaaaaaaaggctcgacgtcagactgagccggacaagcagtgtggagagaggcaaagagagagaggaagcctggtcttttgatggggccctggaaaacaaacgcacagcagcaaaagaatcggaggagaacaaggaaaacctgatcataaattccgagctgaaggacgatttgctgctgtatcaggacgaggaggccctaaacgatagcatcatctcaggtaccctcccgcggaaatgcaaaaaagaacttctcgcagttaagcttcggaatcgccctagcaagcaagagctcgaggatcgcaatatcttcccaaggcgcactgacgaggagcgccaggaaattcggcaacagatcgagatgaagctatctaaacgcctcagccagaggccagcagtggaggaattggagagaagaaatatccttaagcagaggaatgatcagacagagcaagaggaacgccgcgaaatcaaacaaaggctgacacgtaagctgaatcagaggccgacggtcgacgaacttcgagatcgcaagatcctgattaggttcagcgattacgtggaggtagcaaaagcgcaggactatgaccggcgtgccgacaaaccttggactagactctccgccgcggataaggctgctatcagaaaagagctgaatgagtacaagagcaatgaaatggaagtgcacgcgagctcaaagcacctcacgcgcttccaccgcccttag

SEQ ID NO: 257958 - DNA, 1347 bp, Artificial Sequence
  derived and/or modified sequence
atggaccaaacgcctcccgctcgacctgaatacttggtcagcgggataagaacgcccccagtgcgacggaatagcaagctcgccactctcggacgtatctttaagccatggaagtggagaaaaaagaagaacgagaagttaaagcagaccaccagcgccctggaaaagaagatggcgggtaggcaggggagggaggagctgatcaagaaagggttattggagatgatggagcaagacgccgagtctaagacttgcaaccctgatggcggtcctaggtcggtacaaagtgaacctcctacacccaaaagcgaaaccttgacatcagaggacgcacaacccggatcccccctagctaccggcacagatcaggtgagtctcgacaaacctttgtcatctgccgctcatctggatgatgcaggccaggcaacactgttccaagcttcttctatgaagtcggcagacccttcattgaggggacagctcagtacccctactgggtctccgcaccttacgactgtgcaccgccctctgccaccttccagagtgatcgaggaattgcacagagcgttagccactaaacaccggcaggactcatttcaggggagagaatcaaaggggagcccgaagaagagactggatgtgcgtctcagccggacaagttctgtggaacggggaaaggaaagagaggaggcatggtcatttgatggagcgcttgagaataagcgtaccgctgccaaagagagcgaggaaaacaaagaaaatctcatcataaattctgaactaaaggacgacctcctcctataccaagacgaggaggccttaaacgatagtattatctccggcacactgccacgaaaatgcaagaaagaactgctggctgttaaactgagaaacagaccctccaagcaggagctggaggacaggaatatttttcctaggcgtactgatgaggagcggcaagaaattaggcagcaaattgagatgaagctgtccaaaagactgtctcagaggccagcagtggaagagttagagaggcgcaatattctcaaacaaaggaatgatcaaactgaacaagaagagcggagagaaataaagcaacgtttgacccgcaagctgaaccagaggccgacagttgacgaattaagagacaggaagatcctaatccgcttttctgattacgtcgaagtggcgaaagcacaggactacgaccgaagagcggacaaaccttggacacggctaagcgcagccgataaagccgctatacggaaggaattgaatgaatataaaagtaacgagatggaggtccacgcttcatctaagcaccttacaaggtttcataggccctag

SEQ ID NO: 257959 - DNA, 1347 bp, Artificial Sequence
  derived and/or modified sequence
atggatcagacgccacccgcacgacccgagtacctggtcagtggaataaggacacctcctgtgaggcgcaactctaagctggctaccttaggaagaatcttcaaaccatggaaatggaggaaaaaaaaaaacgagaagctaaagcagacaacttccgcactcgaaaagaagatggctggcaggcaaggccgtgaagaactgataaaaaagggattgttagaaatgatggagcaagacgccgagtctaaaacatgcaaccccgacggcggaccacgaagcgtgcagagtgaaccaccgactccaaagagcgagacactgacatccgaggacgctcagcctggttcaccattggctaccggaactgaccaggtgagcttagataagccactcagcagtgctgcgcatctggacgacgccggtcaggctactctgttccaggcttccagcatgaaaagcgccgacccctcccttaggggacagctcagtaccccaactggttccccacatctcactaccgtgcacagaccgctgccccctagtcgcgtgatcgaggagctccatagggccctggccacaaagcacaggcaagattcttttcaaggacgcgaaagcaagggctcccctaagaagcgtctggatgtgagactttcacggacatcatccgtagagcggggtaaagagcgcgaagaggcatggtcattcgatggcgcattggaaaacaaacgaaccgctgccaaggaatccgaggagaacaaggagaacctgatcattaacagcgagctgaaggacgatctcttattgtatcaggatgaggaagcgttgaacgactctattatcagcggcaccttgccgcgaaagtgcaagaaagaacttcttgccgtgaagttacgaaaccgtccatccaagcaggaattggaggaccgaaatatcttccctcggagaacagatgaggaacggcaggaaattagacagcaaatcgaaatgaaactgtccaagagactgtcccagcggcctgcggtggaggaacttgagcggcgaaatatactgaagcaacgcaacgatcagacggagcaggaagagcgccgtgagatcaagcagcggttgactcggaagttaaaccagcgccctaccgtggacgagctgcgcgataggaaaatcctcatccggttctctgattatgtcgaggtagccaaagcgcaagattatgacaggcgggctgataagccctggactcgccttagcgcagcagacaaggccgcaataaggaaagagctcaatgaatacaagtctaacgaaatggaagtgcacgcctcttcaaaacatctgacaaggttccataggccttag

SEQ ID NO: 257960 - DNA, 1347 bp, Artificial Sequence
  derived and/or modified sequence
atggaccagaccccccccgccagacccgagtacctggtgagcggcatcagaaccccccccgtgagaagaaacagcaagctggccaccctgggcagaatcttcaagccctggaagtggagaaagaagaagaacgagaagctgaagcagaccaccagcgccctggagaagaagatggccggcagacagggcagagaggagctgatcaagaagggcctgctggagatgatggagcaggacgccgagagcaagacctgcaaccccgacggcggccccagaagcgtgcagagcgagccccccacccccaagagcgagaccctgaccagcgaggacgcccagcccggcagccccctggccaccggcaccgaccaggtgagcctggacaagcccctgagcagcgccgcccacctggacgacgccggccaggccaccctgttccaggccagcagcatgaagagcgccgaccccagcctgagaggccagctgagcacccccaccggcagcccccacctgaccaccgtgcacagacccctgccccccagcagagtgatcgaggagctgcacagagccctggccaccaagcacagacaggacagcttccagggcagagagagcaagggcagccccaagaagagactggacgtgagactgagcagaaccagcagcgtggagagaggcaaggagagagaggaggcctggagcttcgacggcgccctggagaacaagagaaccgccgccaaggagagcgaggagaacaaggagaacctgatcatcaacagcgagctgaaggacgacctgctgctgtaccaggacgaggaggccctgaacgacagcatcatcagcggcaccctgcccagaaagtgcaagaaggagctgctggccgtgaagctgagaaacagacccagcaagcaggagctggaggacagaaacatcttccccagaagaaccgacgaggagagacaggagatcagacagcagatcgagatgaagctgagcaagagactgagccagagacccgccgtggaggagctggagagaagaaacatcctgaagcagagaaacgaccagaccgagcaggaggagagaagagagatcaagcagagactgaccagaaagctgaaccagagacccaccgtggacgagctgagagacagaaagatcctgatcagattcagcgactacgtggaggtggccaaggcccaggactacgacagaagagccgacaagccctggaccagactgagcgccgccgacaaggccgccatcagaaaggagctgaacgagtacaagagcaacgagatggaggtgcacgccagcagcaagcacctgaccagattccacagaccctag

SEQ ID NO: 257961 - DNA, 1104 bp, Artificial Sequence
  derived and/or modified sequence
atggcaaagccacaggtcgtcgtagcgcctgtactgatgtcaaagctgagtgtcaatgccccagagttctatccaagtggatactcgagctcatacacagagtcctacgaggatggctgtgaagattatcctactctgagtgagtatgtgcaagactttcttaatcatctgaccgaacagccagggtcttttgagaccgagatcgagcagttcgcagaaacgttgaacggctgcgtcaccaccgacgacgcactgcaggagctggtggagctaatttaccagcaggccaccagcatccctaacttcagctacatgggtgcccggttgtgtaactacttaagccatcatttaacaatctcaccccaatctggcaactttcgccagctgttgctgcaaaggtgccgcaccgaatacgaagtcaaggaccaggccgctaaaggggatgaagtcacgaggaagcgcttccacgctttcgtgctcttcctgggtgaactctacctgaatctagagattaagggaactaatgggcaggtgacgcgcgccgacatactccaagtgggcctgcgggagctcctgaacgctcttttcagcaatcccatggacgacaatctgatttgcgcagtgaagctgcttaagctgaccgggtccgtgttggaagatgcctggaaagaaaaaggcaagatggacatggaggagatcattcaacgtattgagaacgtggttctcgatgccaattgcagtagggacgtgaagcagatgttgctcaagctggtggagctgagatcttcaaactggggccgggtgcatgccacatccacctaccgggaggccacaccagaaaacgaccctaattatttcatgaacgaacccactttctatacgtccgatggggtcccttttaccgctgcagaccctgactaccaggaaaaatatcaggagctcctggaaagagaagatttcttccccgattatgaggaaaatgggaccgatcttagtggcgccggtgatccctacctggatgacatcgatgacgagatggaccccgaaatagaggaagcatatgagaaattttgtttagagagcgagcggaagcggaagcaatag

SEQ ID NO: 257962 - DNA, 507 bp, Artificial Sequence
  derived and/or modified sequence
atggccaaaccgcaagtggtggtagcccctgttctgatgagcaaattgagcgttaatgcgcctgagttctatccatcaggatacagctcatcctacacagaaagctatgaagacgggtgcgaggattatccaaccttatccgaatacgtccaagatttcttaaatcaccttacagaacagcccgggtctttcgaaactgagatcgaacagtttgctgagactctgaatggctgcgtcactactgatgacgcgctccaagagctcgtggagctcatatatcagcaggctacgtccattccaaatttcagctacatgggggccagactctgcaattacttgagtcaccacctgactatttctccccagtcagggaacttccgtcagctgctcctccagcggtgtagaaccgaatatgaggtgaaggaccaagccgccaagggggatgaggtcacaagaaagcggttccacgcattcgtgttgtttttgggcgaactgtacttgaactag

SEQ ID NO: 257963 - DNA, 603 bp, Artificial Sequence
  derived and/or modified sequence
atggcaaaacctcaggtggtggtggcgcccgtgttgatgtcaaaactgtccgtgaatgccccagaattttacccttctggctatagcagcagctataccgagagctacgaggatggatgcgaagattacccgaccctctcggagtacgtgcaggattttctgaatcacctgaccgagcaaccgggctcttttgaaacagagatcgagcagtttgcagaaacattaaacgggtgcgtgaccacggatgacgcccttcaggaacttgtggaacttatttaccagcaggcaaccagcatccctaacttctcttatatgggtgcacggctttgtaactatctttcccaccatctgactatctcccctcagtccggcaatttccggcaactacttttgcagcggtgccggacggagtacgaagtgaaagatcaggctgccaagggtgacgaagtaacccgtaagagattccacgcctttgtgctcttcctgggcgagctttacctcaacctggagatcaaaggtacaaatggacaggtgacacgggctgatatcctccaggttgggctccgagaactcttgaatgctcttttctcaaatcctatgtag

SEQ ID NO: 257964 - DNA, 288 bp, Artificial Sequence
  derived and/or modified sequence
atggcgaagccacaggtggtcgtcgcaccagtgttgatgtctaaactgagcgtgaatgcacccgagttttacccctctggctatagctcctcatacaccgagtcttatgaggatggatgcgaggactacccaaccctgagcgaatatgtgcaggattttttaaatcatcttacggagcagcctggcagtttcgagacggagatcgagcagttcgccgagacccttaatggatgcgtgaccaccgacgatgcactccaggagctggtggagctgatctatcagcaatag

SEQ ID NO: 257965 - DNA, 1104 bp, Artificial Sequence
  derived and/or modified sequence
atggccaagccccaggtggtggtggcccctgtgctgatgagcaagctgtctgtgaatgcccctgagttctaccccagcggctacagcagcagctacacagagagctatgaagatggctgtgaggactaccccaccctgtctgaatatgtgcaggacttcctgaaccacctgacagagcagcccggcagctttgaaacagaaattgagcagtttgctgagaccctgaatggctgtgtgaccacagatgatgccctgcaggagctggtggagctgatctaccagcaggccaccagcatccccaacttctcctacatgggcgcccggctgtgcaactacctgagccaccacctgaccatcagcccccagagcggcaacttccggcagctgctgctgcagcgctgcaggacagaatatgaggtgaaggaccaggccgccaagggagatgaggtgaccaggaagcgcttccacgcctttgtgctcttcctgggggagctgtacctgaacctggagatcaagggcaccaacggccaggtgaccagggctgacatcctgcaggtgggcctgcgggagctgctgaatgccctcttcagcaaccccatggatgacaacctgatctgtgctgtgaagctgctgaagctgaccggctctgtgctggaggatgcctggaaggagaagggcaagatggacatggaggagatcatccagagaattgaaaatgtggtgctggatgccaactgcagcagagatgtgaagcagatgctgctgaagctggtggagctgcggagcagcaactggggccgggtgcacgccaccagcacctaccgggaggccaccccagaaaatgaccccaactacttcatgaatgagcccaccttctacaccagtgatggagtgcccttcaccgctgctgaccctgactaccaggagaagtaccaggagctgctggagcgggaggacttcttcccagactatgaggagaatggaacagacctgagcggggccggggacccctacctggatgacattgatgatgagatggaccctgagattgaggaggcctatgagaagttctgcctggagagcgagaggaagaggaagcagtag

SEQ ID NO: 257966 - DNA, 507 bp, Artificial Sequence
  derived and/or modified sequence
atggccaagccccaggtggtggtggcccctgtgctgatgagcaagctgtctgtgaatgcccctgagttctaccccagcggctacagcagcagctacacagagagctatgaagatggctgtgaggactaccccaccctgtctgaatatgtgcaggacttcctgaaccacctgacagagcagcccggcagctttgaaacagaaattgagcagtttgctgagaccctgaatggctgtgtgaccacagatgatgccctgcaggagctggtggagctgatctaccagcaggccaccagcatccccaacttctcctacatgggcgcccggctgtgcaactacctgagccaccacctgaccatcagcccccagagcggcaacttccggcagctgctgctgcagcgctgcaggacagaatatgaggtgaaggaccaggccgccaagggagatgaggtgaccaggaagcgcttccacgcctttgtgctcttcctgggggagctgtacctgaactag

SEQ ID NO: 257967 - DNA, 603 bp, Artificial Sequence
  derived and/or modified sequence
atggccaagccccaggtggtggtggcccctgtgctgatgagcaagctgtctgtgaatgcccctgagttctaccccagcggctacagcagcagctacacagagagctatgaagatggctgtgaggactaccccaccctgtctgaatatgtgcaggacttcctgaaccacctgacagagcagcccggcagctttgaaacagaaattgagcagtttgctgagaccctgaatggctgtgtgaccacagatgatgccctgcaggagctggtggagctgatctaccagcaggccaccagcatccccaacttctcctacatgggcgcccggctgtgcaactacctgagccaccacctgaccatcagcccccagagcggcaacttccggcagctgctgctgcagcgctgcaggacagaatatgaggtgaaggaccaggccgccaagggagatgaggtgaccaggaagcgcttccacgcctttgtgctcttcctgggggagctgtacctgaacctggagatcaagggcaccaacggccaggtgaccagggctgacatcctgcaggtgggcctgcgggagctgctgaatgccctcttcagcaaccccatgtag

SEQ ID NO: 257968 - DNA, 288 bp, Artificial Sequence
  derived and/or modified sequence
atggccaagccccaggtggtggtggcccctgtgctgatgagcaagctgtctgtgaatgcccctgagttctaccccagcggctacagcagcagctacacagagagctatgaagatggctgtgaggactaccccaccctgtctgaatatgtgcaggacttcctgaaccacctgacagagcagcccggcagctttgaaacagaaattgagcagtttgctgagaccctgaatggctgtgtgaccacagatgatgccctgcaggagctggtggagctgatctaccagcagtag

SEQ ID NO: 257969 - DNA, 1104 bp, Artificial Sequence
  derived and/or modified sequence
atggccaagccccaggtggtggtggcccccgtgctgatgagcaagctcagcgtcaatgcccccgagttctatccgagcggatactcgtctagctacaccgaatcttatgaggatggttgcgaggactatcctacactgtctgagtatgttcaggatttcttaaaccatttgactgagcagccaggatcctttgaaactgaaatcgagcaatttgcggaaactttgaatggctgcgtgacaacagatgacgccctacaggaattagtggaacttatataccagcaggccacctcaatacccaatttttcctacatgggtgccagattgtgcaattatttgagccaccatttgactatctccccccagagtgggaactttcgccagttgctcctacagcggtgccgtactgaatacgaagtgaaagatcaggcagccaagggggacgaggtgacgcgcaagcgcttccacgcctttgtactgttcctaggagaactgtacctgaacctggagattaaaggcaccaatggccaagtgaccagagccgatattctgcaagtgggactacgggaactcctgaatgccctgttctcgaatcccatggatgacaatctcatctgtgctgtgaagctacttaagctaaccggaagtgtgctagaagatgcgtggaaagaaaaaggcaaaatggacatggaggagattatacagcggatcgaaaatgtagttcttgatgctaactgctcacgggacgtgaaacaaatgctgctcaagctagtggagctgcgctcctccaattgggggagggtccacgccacctcaacctaccgcgaggccactcctgaaaatgaccctaattactttatgaatgagcctaccttctacacttccgatggtgtgccgttcacagccgcagaccctgactaccaggagaaataccaagaactcttggagcgggaagattttttccccgattacgaagaaaatggtaccgacctctccggagccggggacccttacctggacgacattgatgacgagatggatccggaaattgaggaagcatacgaaaagttctgtctagagtcagaaagaaagcggaaacagtag

SEQ ID NO: 257970 - DNA, 507 bp, Artificial Sequence
  derived and/or modified sequence
atggccaagccccaggtggtggtggcccccgtgctgatgagcaagctttccgtgaacgccccagagttctatccctcaggctatagctcttcttacaccgaatcatatgaggacggctgtgaggattatcccacgttgtcggagtatgtgcaggattttcttaaccacctgaccgagcagccagggagtttcgagactgaaatcgaacagttcgccgaaacactgaacgggtgtgtcacgacagatgacgccttacaggagctcgtggagttaatttatcagcaggcgaccagcatccccaacttcagttacatgggcgccaggctgtgcaactatctctcccaccacctgactatatcaccacagagcggcaacttccgccaactcctgctgcagcggtgcagaactgaatatgaagtcaaagatcaggcagccaagggcgacgaagtcactaggaaaagatttcatgccttcgtgctctttcttggggaactgtatcttaactag

SEQ ID NO: 257971 - DNA, 603 bp, Artificial Sequence
  derived and/or modified sequence
atggccaagccccaggtggtggtggcccccgtgctgatgagcaagctctccgtgaatgcccctgaattttatccaagcggctatagtagcagttacaccgagtcctacgaggacggctgcgaggactaccctaccctgtccgagtacgttcaggactttcttaatcatctgaccgaacagccggggagttttgaaactgagattgagcaattcgccgagactttgaacggctgcgtgactacggatgatgccctacaagagctcgtggagctcatttatcaacaggcaacaagcatacccaatttttcctacatgggtgctaggttgtgtaactacctgtcgcaccatcttaccatctctccccagagtggcaactttcgtcagctcctcctgcagcgatgtcgcactgagtatgaagtgaaggatcaggcagctaaaggcgacgaggtcacccgtaaaagatttcacgccttcgtgctgttcttaggggaactttatctcaatcttgaaatcaagggtacaaatggccaggtcaccagggccgacattttacaggttggcctgcgagaactgctgaacgccctgttcagtaacccgatgtag

SEQ ID NO: 257972 - DNA, 288 bp, Artificial Sequence
  derived and/or modified sequence
atggccaagccccaggtggtggtggcccccgtgctgatgagcaagctatccgtgaacgcccccgagttttacccctccggctactccagtagctacaccgagagctatgaggatggttgtgaagactaccccacactctcagagtacgtccaggattttctgaatcatctcaccgagcagccgggtagtttcgagacagagatcgaacagtttgccgagacactgaatggctgcgtaacaaccgatgacgccctccaagagttagtagaactgatatatcagcagtag

SEQ ID NO: 257973 - DNA, 1104 bp, Artificial Sequence
  derived and/or modified sequence
atggcgaaacctcaggtagttgtcgctccagttctaatgtccaagttaagcgtgaatgcgccagaattctaccctagcggatactcctcatcctataccgagtcctatgaagacggttgtgaggactaccccaccttgtccgaatacgtgcaggattttttgaaccatttgactgagcagcccggttcctttgagaccgagatcgagcagttcgccgagacgctcaatgggtgtgtgaccaccgacgatgctctgcaggaacttgtggaactaatttaccagcaggccacttctatcccgaatttcagttatatgggtgctcggctgtgtaattacctctctcatcacctaactatctccccacagtcaggtaacttcagacagctgctgctacagagatgccgaaccgagtacgaagttaaggaccaggccgcaaagggagatgaagtgactagaaagcgttttcatgcatttgtgcttttcttaggcgagctgtatcttaatctagagattaaaggcacaaacggccaggtgacacgggctgatattctgcaagtgggccttcgagagctccttaacgcactattttcaaatccaatggatgacaatctcatttgcgcggtcaaattgttaaagcttaccggctctgtgctggaggatgcttggaaagagaaggggaagatggacatggaggagatcattcagaggattgagaatgtggttctggacgctaactgctccagagacgtaaagcagatgctccttaagctcgttgagcttcgttcctcgaattggggtcgcgtgcacgctacaagcacctatcgggaggctacccctgagaatgaccctaattactttatgaatgagcctacattctacacttccgacggagttccgtttactgccgctgaccctgactaccaggagaagtaccaggagcttctggagcgagaggacttcttccctgattacgaggaaaatggtacagacctcagtggcgcaggggacccttacctcgacgacatcgatgacgagatggatcctgaaatcgaggaagcatatgagaaattctgcctcgagtccgaaaggaaacggaagcagtag

SEQ ID NO: 257974 - DNA, 507 bp, Artificial Sequence
  derived and/or modified sequence
atggccaaaccccaagttgtggtagctccggtgctgatgtcgaaattgtccgtgaatgccccagagttctacccttccggctatagctcctcttatacagagagttacgaggatggctgtgaggactaccctaccctcagcgaatatgttcaggacttccttaatcacctcacggaacagccgggaagcttcgagacggagatcgaacaatttgcagagacactcaatggatgcgtaactacagacgatgcactgcaggaactggtggagctcatttaccaacaggccacgtccatcccgaattttagttatatgggagcgaggttatgtaactatctgtcacaccacttgaccatctctcctcagtcaggcaatttcaggcaattactgctccagagatgtagaaccgaatacgaggtcaaagaccaggccgctaaaggtgatgaggtgaccaggaagcggttccacgcattcgtgctgtttcttggagagttatatctcaattag

SEQ ID NO: 257975 - DNA, 603 bp, Artificial Sequence
  derived and/or modified sequence
atggccaagccgcaggtggtggtggcccctgtgctcatgagcaagcttagtgtgaacgcaccggagttctacccatctggctattcttcctcttacacagaaagctatgaggacgggtgcgaagattaccctactctctcagagtatgtacaggattttctgaaccacctgacggagcagccaggctcgtttgaaaccgaaatagagcagttcgccgaaacgcttaacggatgcgttactacggatgatgccctgcaggagctcgtggagcttatttatcagcaggccaccagtatccccaacttcagctatatgggcgcaaggctttgcaattacctgagtcaccatctgactatatccccccagagtggaaacttcaggcagctgcttcttcagcgatgtcgcactgagtacgaggtgaaagaccaggccgctaaaggagacgaggtcacaaggaaaaggtttcacgccttcgtcctttttcttggggagctgtacctcaatctagagatcaaagggacaaacgggcaggtgactcgagctgatatccttcaggtggggctcagagagctcctcaatgccttgttttccaaccccatgtag

SEQ ID NO: 257976 - DNA, 288 bp, Artificial Sequence
  derived and/or modified sequence
atggcgaagccccaggtcgtggtggctccagtcttaatgagcaagctgtccgttaatgctccagagttttacccgtctggctatagcagcagttacaccgaatcctacgaggacggctgtgaggattatcccactttatcggaatacgtacaagacttcttgaaccaccttactgaacaacccggatcattcgagacagagatcgagcagttcgcggagaccttgaacgggtgtgtgacaacagacgacgcactgcaggagctggtggagctgatataccagcagtag

SEQ ID NO: 257977 - DNA, 1104 bp, Artificial Sequence
  derived and/or modified sequence
atggccaagccccaggtggtggtggcccccgtgctgatgagcaagctgagcgtgaacgcccccgagttctaccccagcggctacagcagcagctacaccgagagctacgaggacggctgcgaggactaccccaccctgagcgagtacgtgcaggacttcctgaaccacctgaccgagcagcccggcagcttcgagaccgagatcgagcagttcgccgagaccctgaacggctgcgtgaccaccgacgacgccctgcaggagctggtggagctgatctaccagcaggccaccagcatccccaacttcagctacatgggcgccagactgtgcaactacctgagccaccacctgaccatcagcccccagagcggcaacttcagacagctgctgctgcagagatgcagaaccgagtacgaggtgaaggaccaggccgccaagggcgacgaggtgaccagaaagagattccacgccttcgtgctgttcctgggcgagctgtacctgaacctggagatcaagggcaccaacggccaggtgaccagagccgacatcctgcaggtgggcctgagagagctgctgaacgccctgttcagcaaccccatggacgacaacctgatctgcgccgtgaagctgctgaagctgaccggcagcgtgctggaggacgcctggaaggagaagggcaagatggacatggaggagatcatccagagaatcgagaacgtggtgctggacgccaactgcagcagagacgtgaagcagatgctgctgaagctggtggagctgagaagcagcaactggggcagagtgcacgccaccagcacctacagagaggccacccccgagaacgaccccaactacttcatgaacgagcccaccttctacaccagcgacggcgtgcccttcaccgccgccgaccccgactaccaggagaagtaccaggagctgctggagagagaggacttcttccccgactacgaggagaacggcaccgacctgagcggcgccggcgacccctacctggacgacatcgacgacgagatggaccccgagatcgaggaggcctacgagaagttctgcctggagagcgagagaaagagaaagcagtag

SEQ ID NO: 257978 - DNA, 507 bp, Artificial Sequence
  derived and/or modified sequence
atggccaagccccaggtggtggtggcccccgtgctgatgagcaagctgagcgtgaacgcccccgagttctaccccagcggctacagcagcagctacaccgagagctacgaggacggctgcgaggactaccccaccctgagcgagtacgtgcaggacttcctgaaccacctgaccgagcagcccggcagcttcgagaccgagatcgagcagttcgccgagaccctgaacggctgcgtgaccaccgacgacgccctgcaggagctggtggagctgatctaccagcaggccaccagcatccccaacttcagctacatgggcgccagactgtgcaactacctgagccaccacctgaccatcagcccccagagcggcaacttcagacagctgctgctgcagagatgcagaaccgagtacgaggtgaaggaccaggccgccaagggcgacgaggtgaccagaaagagattccacgccttcgtgctgttcctgggcgagctgtacctgaactag

SEQ ID NO: 257979 - DNA, 603 bp, Artificial Sequence
  derived and/or modified sequence
atggccaagccccaggtggtggtggcccccgtgctgatgagcaagctgagcgtgaacgcccccgagttctaccccagcggctacagcagcagctacaccgagagctacgaggacggctgcgaggactaccccaccctgagcgagtacgtgcaggacttcctgaaccacctgaccgagcagcccggcagcttcgagaccgagatcgagcagttcgccgagaccctgaacggctgcgtgaccaccgacgacgccctgcaggagctggtggagctgatctaccagcaggccaccagcatccccaacttcagctacatgggcgccagactgtgcaactacctgagccaccacctgaccatcagcccccagagcggcaacttcagacagctgctgctgcagagatgcagaaccgagtacgaggtgaaggaccaggccgccaagggcgacgaggtgaccagaaagagattccacgccttcgtgctgttcctgggcgagctgtacctgaacctggagatcaagggcaccaacggccaggtgaccagagccgacatcctgcaggtgggcctgagagagctgctgaacgccctgttcagcaaccccatgtag

SEQ ID NO: 257980 - DNA, 288 bp, Artificial Sequence
  derived and/or modified sequence
atggccaagccccaggtggtggtggcccccgtgctgatgagcaagctgagcgtgaacgcccccgagttctaccccagcggctacagcagcagctacaccgagagctacgaggacggctgcgaggactaccccaccctgagcgagtacgtgcaggacttcctgaaccacctgaccgagcagcccggcagcttcgagaccgagatcgagcagttcgccgagaccctgaacggctgcgtgaccaccgacgacgccctgcaggagctggtggagctgatctaccagcagtag

SEQ ID NO: 257981 - protein, 467 aa, Artificial Sequence
  derived and/or modified sequence
MAAGPAPPPGRPRAQMPHLRKMERVVVSMQDPDQGVKMRSQRLLVTVIPHAVTGSDVVQWLAQKFCVSEEEALHLGAVLVQHGYIYPLRDPRSLMLRPDETPYRFQTPYFWTSTLRPAAELDYAIYLAKKNIRKRGTLVDYEKDCYDRLHKKINHAWDLVLMQAREQLRAAKQRSKGDRLVIACQEQTYWLVNRPPPGAPDVLEQGPGRGSCAASRVLMTKSADFHKREIEYFRKALGRTRVKSSVCLEAYLSFCGQRGPHDPLVSGCLPSNPWISDNDAYWVMNAPTVAAPTKLRVERWGFSFRELLEDPVGRAHFMDFLGKEFSGENLSFWEACEELRYGAQAQVPTLVDAVYEQFLAPGAAHWVNIDSRTMEQTLEGLRQPHRYVLDDAQLHIYMLMKKDSYPRFLKSDMYKALLAEAGIPLEMKRRVFPFTWRPRHSSPSPALLPTPVEPTAACGPGGGDGVA

SEQ ID NO: 257982 - DNA, 1341 bp, Artificial Sequence
  derived and/or modified sequence
atggagagagtggtggtgagcatgcaggaccccgaccagggcgtgaagatgagaagccagagactgctggtgaccgtgatcccccacgccgtgaccggcagcgacgtggtgcagtggctggcccagaagttctgcgtgagcgaggaggaggccctgcacctgggcgccgtgctggtgcagcacggctacatctaccccctgagagaccccagaagcctgatgctgagacccgacgagaccccctacagattccagaccccctacttctggaccagcaccctgagacccgccgccgagctggactacgccatctacctggccaagaagaacatcagaaagagaggcaccctggtggactacgagaaggactgctacgacagactgcacaagaagatcaaccacgcctgggacctggtgctgatgcaggccagagagcagctgagagccgccaagcagagaagcaagggcgacagactggtgatcgcctgccaggagcagacctactggctggtgaacagacccccccccggcgcccccgacgtgctggagcagggccccggcagaggcagctgcgccgccagcagagtgctgatgaccaagagcgccgacttccacaagagagagatcgagtacttcagaaaggccctgggcagaaccagagtgaagagcagcgtgtgcctggaggcctacctgagcttctgcggccagagaggcccccacgaccccctggtgagcggctgcctgcccagcaacccctggatcagcgacaacgacgcctactgggtgatgaacgcccccaccgtggccgcccccaccaagctgagagtggagagatggggcttcagcttcagagagctgctggaggaccccgtgggcagagcccacttcatggacttcctgggcaaggagttcagcggcgagaacctgagcttctgggaggcctgcgaggagctgagatacggcgcccaggcccaggtgcccaccctggtggacgccgtgtacgagcagttcctggcccccggcgccgcccactgggtgaacatcgacagcagaaccatggagcagaccctggagggcctgagacagccccacagatacgtgctggacgacgcccagctgcacatctacatgctgatgaagaaggacagctaccccagattcctgaagagcgacatgtacaaggccctgctggccgaggccggcatccccctggagatgaagagaagagtgttccccttcacctggagacccagacacagcagccccagccccgccctgctgcccacccccgtggagcccaccgccgcctgcggccccggcggcggcgacggcgtggcctag

SEQ ID NO: 257983 - DNA, 1404 bp, Artificial Sequence
  derived and/or modified sequence
atggccgccggccccgcccccccccccggcagacccagagcccagatgccccacctgagaaagatggagagagtggtggtgagcatgcaggaccccgaccagggcgtgaagatgagaagccagagactgctggtgaccgtgatcccccacgccgtgaccggcagcgacgtggtgcagtggctggcccagaagttctgcgtgagcgaggaggaggccctgcacctgggcgccgtgctggtgcagcacggctacatctaccccctgagagaccccagaagcctgatgctgagacccgacgagaccccctacagattccagaccccctacttctggaccagcaccctgagacccgccgccgagctggactacgccatctacctggccaagaagaacatcagaaagagaggcaccctggtggactacgagaaggactgctacgacagactgcacaagaagatcaaccacgcctgggacctggtgctgatgcaggccagagagcagctgagagccgccaagcagagaagcaagggcgacagactggtgatcgcctgccaggagcagacctactggctggtgaacagacccccccccggcgcccccgacgtgctggagcagggccccggcagaggcagctgcgccgccagcagagtgctgatgaccaagagcgccgacttccacaagagagagatcgagtacttcagaaaggccctgggcagaaccagagtgaagagcagcgtgtgcctggaggcctacctgagcttctgcggccagagaggcccccacgaccccctggtgagcggctgcctgcccagcaacccctggatcagcgacaacgacgcctactgggtgatgaacgcccccaccgtggccgcccccaccaagctgagagtggagagatggggcttcagcttcagagagctgctggaggaccccgtgggcagagcccacttcatggacttcctgggcaaggagttcagcggcgagaacctgagcttctgggaggcctgcgaggagctgagatacggcgcccaggcccaggtgcccaccctggtggacgccgtgtacgagcagttcctggcccccggcgccgcccactgggtgaacatcgacagcagaaccatggagcagaccctggagggcctgagacagccccacagatacgtgctggacgacgcccagctgcacatctacatgctgatgaagaaggacagctaccccagattcctgaagagcgacatgtacaaggccctgctggccgaggccggcatccccctggagatgaagagaagagtgttccccttcacctggagacccagacacagcagccccagccccgccctgctgcccacccccgtggagcccaccgccgcctgcggccccggcggcggcgacggcgtggcctag

SEQ ID NO: 257984 - DNA, 1341 bp, Artificial Sequence
  derived and/or modified sequence
atggagagagtcgtagtctctatgcaggaccccgaccaaggggtaaagatgcgctctcaaagactgttggttaccgtaatcccccacgcagtcacaggatcagacgtggttcagtggcttgcgcagaagttctgtgtaagcgaggaggaggcgcttcatctgggtgcagtgctcgtccaacatggatacatttaccccctgagagatcctagatcattaatgctgagacctgatgagaccccatatcgcttccagaccccatacttttggacttcaacccttaggcccgcggccgaactcgactacgctatttatctcgccaagaagaacatcaggaagagaggaactctcgtggattatgagaaggactgttacgaccgcttgcacaagaaaataaaccatgcttgggacctggttttgatgcaggctcgcgagcagttgcgagcggcgaaacaacgtagcaagggtgatcggctggtgatagcgtgtcaagaacaaacctattggctcgttaatcgcccaccacctggcgcgccagatgtccttgagcagggcccagggagggggagttgcgccgcatctagagtgcttatgaccaaatccgccgatttccataagcgcgagattgaatacttccggaaggctctgggccgaacccgtgtcaagagttctgtgtgtttggaggcatacctgtctttctgcgggcagagagggccgcatgaccccctggtttctggttgtctcccatcaaacccatggatcagtgacaacgacgcgtattgggtcatgaacgctccgaccgtggcggcacccacaaaactccgcgtggaaagatggggtttttcgttccgcgaactgctcgaagaccctgttgggcgcgcccatttcatggatttcttagggaaagagttctcgggagaaaacctatccttctgggaggcatgcgaagaactgagatacggcgcccaagctcaagtcccaacactggtggatgctgtttatgagcagtttctagcccctggcgctgcgcactgggtgaacatcgactcccgcaccatggagcaaaccctggaaggtctaaggcagccacacagatatgttttggacgatgcccaattgcacatctatatgctgatgaagaaagactcgtatccccgcttcctgaaatcagatatgtacaaggctctactcgcggaagcaggcattcccctggaaatgaaaaggagggtcttcccatttacatggcgaccaagacactcatcccccagccctgccctgttaccaacccctgtggaaccaacggctgcgtgtggccccgggggcggcgatggcgtggcgtag

SEQ ID NO: 257985 - DNA, 1404 bp, Artificial Sequence
  derived and/or modified sequence
atggccgcgggacctgctccaccccccggacggcctcgggcacagatgccacatttgaggaagatggagcgggtggtggtgtctatgcaggacccagatcagggtgtgaagatgcgctctcagagactcctcgtgaccgtgatcccacatgcagtaacaggtagcgatgtggtacagtggctggcgcaaaagttttgcgtgagtgaggaggaggccctgcatctcggagcggtgctggtgcagcacggctacatctaccccctccgggatcccaggtccttgatgcttaggccagacgaaacaccatacaggttccagactccatatttctggacgtcgacactgcggcctgcagcagaacttgattatgcaatctacctggccaagaaaaatatacggaaacgcgggactttggtagactacgagaaggactgttacgacaggttgcataagaagatcaatcacgcttgggatcttgtactgatgcaagccagggagcagctgagggcggcaaagcagaggtctaaaggtgatcggttggtgatagcctgccaggaacagacctattggctggtcaaccggccccccccaggagcgcccgatgtgcttgagcagggccccggtcgcggttcttgcgcagccagcagagttctgatgacgaagtccgcagatttccacaaaagagaaatagaatatttccggaaggcactcggtcgcacacgggtgaagtctagcgtgtgcctggaggcatacttaagcttctgcggccaacggggaccacacgaccctctggtttccgggtgtctgccaagtaacccctggatcagtgacaacgatgcatattgggtgatgaacgcgcccaccgtcgctgcccccacaaagctgcgggtcgaacgatggggatttagcttccgcgagctactcgaggaccccgtcggcagggcccacttcatggattttctcggaaaagaattcagcggtgagaatctgtcattttgggaagcctgtgaagaattgcgatatggagctcaagcacaggttcctaccctggtggatgccgtctacgaacagttccttgccccgggcgcagcacactgggtcaatattgacagtaggacaatggagcagactttagagggactgaggcagccacataggtacgtgctggacgacgcccagttacatatctatatgttgatgaaaaaggactcttatccccgatttctgaagtctgatatgtataaggctctgttggccgaggccggcatccctctggaaatgaaacgtcgagtcttcccattcacatggcggccccgccacagcagccctagtcctgcactgctccctactcctgtcgagcccactgccgcctgcgggcctggcggaggggacggggtagcctag

SEQ ID NO: 257986 - DNA, 1341 bp, Artificial Sequence
  derived and/or modified sequence
atggagcgggtggtggtgtccatgcaggaccctgaccagggcgtgaagatgaggagccagaggctgctggtgaccgtcatcccccatgctgtgacaggcagtgatgtggtgcagtggctggcccagaagttctgtgtgtctgaggaggaggccctgcacctgggcgctgtgctggtgcagcacggctacatctaccccctgcgggaccccaggagcctgatgctgcggccagatgagaccccctaccgcttccagaccccctacttctggaccagcaccctgcggcctgctgctgagctggactatgccatctacctggccaagaagaacatcaggaagaggggcaccctggtggactatgagaaggactgctatgaccggctgcacaagaagatcaaccacgcctgggacctggtgctgatgcaggcccgggagcagctgcgggccgccaagcagaggagcaaaggagaccggctggtgattgcctgccaggagcagacctactggctggtgaaccggcccccacctggggccccagatgtgctggagcagggccctggccggggcagctgtgccgccagccgggtgctgatgaccaagtctgctgacttccacaagcgggagattgagtacttcaggaaggccctgggccgcaccagggtgaagagctctgtgtgcctggaggcctacctgtccttctgtggccagaggggcccccatgaccccctggtgtctggctgcctgcccagcaacccctggatcagtgacaatgatgcctactgggtgatgaatgcccccaccgtggccgcccccaccaagctgcgggtggagcgctggggcttctccttccgggagctgctggaggaccctgtgggccgggcccacttcatggacttcctgggcaaggagttctctggagagaacctgtccttctgggaggcctgtgaggagctgcgctacggggcccaggcccaggtgcccaccctggtggatgctgtgtatgagcagttcctggcccctggggccgcccactgggtgaacatcgacagcaggaccatggagcagaccctggagggcctgcggcagccccaccgctacgtgctggatgatgcccagctgcacatctacatgctgatgaagaaggacagctacccccgcttcctgaagagtgacatgtacaaggccctgctggccgaggccggcatccccctggagatgaagagaagagtcttccccttcacctggaggcccaggcacagcagccccagccctgccctgctgcccacccctgtggagcccacagctgcctgtggccctggaggaggagatggagtggcctag

SEQ ID NO: 257987 - DNA, 1404 bp, Artificial Sequence
  derived and/or modified sequence
atggctgctggccctgcccctcctcctggccggccccgggcccagatgccccacctgaggaagatggagcgggtggtggtgtccatgcaggaccctgaccagggcgtgaagatgaggagccagaggctgctggtgaccgtcatcccccatgctgtgactggaagtgatgtggtgcagtggctggcccagaagttctgtgtgtctgaggaggaggccctgcacctgggcgctgtgctggtgcagcacggctacatctaccccctgcgggaccccaggagcctgatgctgcggccagatgagaccccctaccgcttccagaccccctacttctggaccagcaccctgcggcctgctgctgagctggactatgccatctacctggccaagaagaacatcaggaagaggggcaccctggtggactatgagaaggactgctatgaccggctgcacaagaagatcaaccacgcctgggacctggtgctgatgcaggcccgggagcagctgcgggccgccaagcagaggagcaagggggaccggctggtgattgcctgccaggagcagacctactggctggtgaacagacctcctcctggggccccagatgtgctggagcagggccctggccggggcagctgtgccgccagccgggtgctgatgaccaagtctgctgacttccacaagcgggagattgagtacttcaggaaggccctgggccgcaccagggtgaagagctctgtgtgcctggaggcctacctgtccttctgtggccagaggggcccccatgaccccctggtgtctggctgcctgcccagcaacccctggatcagtgacaatgatgcctactgggtgatgaatgcccccaccgtggccgcccccaccaagctgcgggtggagcgctggggcttctccttccgggagctgctggaggaccctgtgggccgggcccacttcatggacttcctgggcaaggagttcagcggggagaacctgtccttctgggaggcctgtgaggagctgcgctatggagcccaggcccaggtgcccaccctggtggatgctgtgtatgagcagttcctggcccctggagctgcccactgggtgaacatcgacagcaggaccatggagcagaccctggagggcctgcggcagccccacagatatgtgctggatgatgcccagctgcacatctacatgctgatgaagaaggacagctacccccgcttcctgaagagtgacatgtacaaggccctgctggccgaggccggcatccccctggagatgaagagaagagtcttccccttcacctggaggcccaggcacagcagccccagccctgccctgctgcccacccctgtggagcccacagctgcctgtggccctggaggaggagatggagtggcctag

SEQ ID NO: 257988 - DNA, 1341 bp, Artificial Sequence
  derived and/or modified sequence
atggagcgggtggtggtgagcatgcaggaccccgaccagggcgtgaaaatgaggtcccaaagactgttggtgactgtgattccgcatgccgttacaggatctgatgtggtccagtggcttgcgcagaagttctgtgtttccgaggaggaggccctacacttaggtgcggtgctcgtccagcacgggtacatctatcccctgcgggacccccgcagcctgatgctgcgccccgatgaaactccgtaccgctttcagactccctacttttggacatccacactcaggcccgccgcagagcttgattacgctatctacttggccaagaaaaacatccggaaacgcgggaccctggttgactatgagaaggactgctacgacaggttgcataagaagataaaccatgcttgggacctggtcctcatgcaggcccgggaacagctgcgtgccgccaaacagcgaagtaagggggatagattggtaatcgcctgccaggaacaaacttattggctcgtgaacaggccacccccaggtgcccccgacgtgttggaacaaggaccaggcagaggctcctgtgcggcgagtcgtgttctcatgactaaatcagcagactttcataaacgcgagattgagtacttccgaaaggcccttggtagaacacgagtgaaaagctccgtctgcttagaggcttaccttagtttttgcggccagaggggcccgcatgaccccctggttagcggctgccttccctctaacccgtggattagcgacaacgacgcttactgggtgatgaacgctccgactgtggctgccccgacaaaactgcgggtggaaaggtggggcttttccttcagggaattattagaagatccagtgggccgtgcgcactttatggactttctcggcaaagaattttctggggaaaatctgagtttctgggaggcctgcgaggaactgcggtatggagctcaggctcaagtgccaacacttgtcgatgccgtctatgagcaatttttggctcccggagccgctcactgggtcaacatcgacagccgcaccatggagcagacccttgagggcctcagacaaccccacaggtatgttttggatgatgcgcagctccatatttacatgcttatgaagaaagattcttatccgcgatttctgaagtccgacatgtataaggccctattagccgaggccggcattcctctagagatgaaaaggcgggtgttcccttttacctggcgcccaagacattctagtccctctcccgctctcctgcctacccccgtggaaccaacagctgcctgcggcccaggcggaggcgacggagtggcctag

SEQ ID NO: 257989 - DNA, 1404 bp, Artificial Sequence
  derived and/or modified sequence
atggccgccggccccgcccccccccccggccggccccgggcccagatgccccatctgcggaagatggagcgagtcgtcgtgagcatgcaagacccggaccagggagtgaagatgcggtcccagcggcttctggtcaccgtgataccccatgccgtgacgggcagtgatgtggtccagtggctggcacagaagttctgcgtgagtgaagaagaagcgctacatctgggggcagttctagttcagcacgggtacatataccctctccgcgatcctcgatccctgatgttacgccccgatgaaacaccctaccgctttcagaccccttatttctggactagcacgctgcgccctgccgcggagttggactacgctatatacctcgctaaaaaaaatatccgcaaaagggggacactcgtcgactacgagaaggactgctacgatcggctccacaagaagatcaaccatgcctgggatctcgttctgatgcaagcccgagagcaacttcgcgcagcgaagcagcggagcaaaggcgatagactggtgattgcatgccaagagcaaacctactggctggtaaatcgccctccgccaggggcacctgacgtcctggaacaaggccccggaagagggtcatgtgccgcctctcgagtgctaatgacgaagagtgccgatttccacaaaagggagattgagtactttaggaaggctttaggccgcacgagagttaagtcttccgtgtgtctggaggcctacctctccttctgcgggcaacgaggaccccacgacccgctcgtgtctggatgtctgccatctaacccatggatctccgataacgacgcttactgggtgatgaacgccccgactgttgcagctcccaccaaactgcgcgttgagagatggggctttagctttcgtgagctgctagaggacccggtgggtcgagctcactttatggacttcttgggcaaagaattctccggagaaaacttgtccttctgggaagcatgtgaggagctgaggtacggggctcaggcgcaggtgccaactctggtggatgccgtttacgagcagtttctcgcccctggggcggctcattgggtcaatattgatagtcgtacaatggagcaaaccttggaagggctccgccagccacatagatacgtgctggatgatgcacaactccacatttatatgctgatgaagaaggactcttatccaagattcctgaaatcagacatgtataaggctttgcttgccgaggcagggattccacttgagatgaagcgccgagttttccctttcacatggaggcccagacatagcagccccagccccgcactgttgccgacacccgttgagcctacggcggcctgcggccctggcgggggagacggggttgcttag

SEQ ID NO: 257990 - DNA, 1341 bp, Artificial Sequence
  derived and/or modified sequence
atggagagggtcgtagtctcaatgcaggatccagaccaaggagtgaagatgcgcagccagcgcctgctggtaacagttattcctcacgcggttaccggcagtgatgtggtgcagtggctcgcccagaaattctgcgtatccgaggaggaagctctgcaccttggagcggtgctggtgcagcacggatacatctatcccctgcgcgatccaaggtccttaatgctgcggcctgacgaaacaccgtatcggtttcagactccctatttttggacatcgaccctcaggcctgcggcagaactagattacgccatctacctggccaagaagaacattcgcaaacggggaactctggtggactacgaaaaggactgctacgatcgtctgcacaaaaaaataaatcacgcttgggatctggtgcttatgcaggcgagagagcaactgcgggcagccaagcaaaggtcaaagggagacaggctggtcattgcctgtcaggagcaaacttactggctggtcaatagaccacctcccggagctcccgatgtcctcgaacagggacctggcaggggatcttgtgctgcgtcaagggtgctgatgactaagagcgctgattttcataagagagaaatcgagtacttccgaaaagccctcggacggacccgggtgaagtcctcagtgtgcctcgaggcatatttgagcttctgtggccaacgcggaccccacgacccactggttagtggctgtttgccgtctaacccctggattagcgacaacgatgcttattgggtaatgaatgcacccacagttgccgcacccaccaagctcagagttgaaagatgggggttctcctttagggagctgctggaagaccccgtgggtagggctcattttatggacttcctgggaaaggaattcagcggagagaatctgtcattctgggaagcctgcgaggaacttcgctacggggctcaggcacaggtccccacgctggtagacgccgtttacgagcagtttctggccccaggcgcagctcattgggtgaacattgattcccgcaccatggaacagacgctggagggactgaggcagccacatagatacgtgctggatgacgcccagcttcacatctacatgctaatgaagaaggattcgtatcccaggtttctgaagtctgacatgtacaaagccctgttagctgaggccggaattccactcgagatgaaacgcagggtttttcctttcacctggagacctaggcatagtagtcccagcccagcgcttctccccacacctgtggagcccaccgcagcttgcggccctggtgggggagacggtgtcgcttag

SEQ ID NO: 257991 - DNA, 1404 bp, Artificial Sequence
  derived and/or modified sequence
atggcagcaggacctgctccccctcccggtaggcctagggcacagatgccccatctacggaagatggaacgggtggtcgtctctatgcaagatccagatcagggggttaaaatgcgatcccagagactgctggtcacagtaattcctcacgccgtgacaggaagtgatgtcgttcagtggttagcccagaagttttgtgtgagtgaggaggaggctctgcacttgggagcagttctcgtgcaacacgggtatatatacccgctgcgagatcccagaagtctgatgcttcggcctgatgagacaccctatcggttccaaaccccatatttttggacatcaacacttcggccagccgcagaacttgactacgccatctacctggctaagaaaaacatccgcaagagaggaactctggtcgattacgagaaagactgctacgatagactccataaaaaaataaatcatgcctgggatcttgtgctgatgcaggctagagagcagctgagagccgcaaaacagcggtccaagggagatcgcctggtaatcgcctgccaggagcaaacttattggctcgtgaaccgaccaccacccggtgcccctgatgtcctcgagcaaggaccaggacgcggatcctgcgcggctagccgggtgctgatgacaaaatcggcagattttcacaaacgcgaaatcgaatatttccggaaagcgctggggaggacacgcgttaagtcaagcgtgtgcctcgaggcttaccttagtttttgcggtcagaggggacctcatgacccactggtgagcggatgcttgccctcaaatccctggattagcgacaacgatgcatactgggtcatgaacgcaccgacggtggccgctcctactaaactccgggtggaaaggtggggtttctcattccgggagctcctcgaggacccagtcggtcgggctcatttcatggatttcttgggaaaggaattttccggggagaatctgagcttctgggaggcatgtgaagagctgagatacggagctcaggcccaggtgccaacactggtcgatgctgtctacgaacagtttctggctcccggagccgctcactgggtaaatatcgactccaggacaatggaacagacacttgagggccttagacagccacatcgttacgttctcgacgacgcccagctgcacatatacatgttgatgaagaaagactcgtaccctcgctttctgaagagtgatatgtataaggctctgctggccgaggccggaattcccctagagatgaagcggcgtgtatttccttttacctggagacctagacactcgtctccctcccctgccttgctacctacccccgtggagccaactgcggcatgcggaccaggcggtggagacggagtagcatag

SEQ ID NO: 257992 - DNA, 2376 bp, Artificial Sequence
  derived and/or modified sequence
gccatggccgccggccccgcgccgccccccggccgcccccgggcgcagatgccgcatctgaggaaggtgcgaggcggatggagcgggtggtcgtgagcatgcaggaccccgaccagggcgtgaagatgcggagccagcgcctgctggtcaccgtcattccccacgcggtgacaggcagcgacgtcgtgcagtggttggcccagaagttctgcgtctcggaggaggaggccctgcacctgggcgccgtcctggtgcagcatggctacatctacccgctgcgcgacccccgtagcctcatgctccggccagacgagacgccctacaggttccagaccccgtacttctggacaagtaccctgaggccggctgcagagctggactatgccatctacctggccaagaagaacatccgaaaacgggggaccctggtggattatgagaaggactgctatgaccggctacacaagaagatcaaccacgcatgggacctggtgctgatgcaggcgagggagcagctgagggcagccaagcagcgcagcaagggggacaggctggtcattgcgtgccaggagcagacctactggctggtgaacaggcccccgcccggggcccccgatgtgctggagcagggtccagggcggggatcctgcgctgccagccgtgtgctcatgaccaagagtgcagatttccataagcgggagatcgagtacttcaggaaagcgctgggcaggacccgagtgaagtcctccgtctgccttgaggcgtacctgagtttctgcggccagcgtggaccccacgatcccctcgtgtcggggtgcctgcccagcaatccctggatctcagacaatgacgcctactgggtcatgaatgcccccacggtggctgcccccacgaagctccgtgtggagagatggggcttcagcttccgggagctcctggaggaccccgtggggcgggcccacttcatggactttctgggaaaggagttcagtggagaaaacctcagcttctgggaggcatgtgaggagcttcgatatggagcgcaggcccaggtccccaccctggtggatgccgtgtacgagcagttcctggcccccggagctgcccactgggtcaacatcgacagccggaccatggagcagaccctggaggggctgcgccagccccaccgctatgtcctggatgacgcccagctgcacatatacatgctcatgaagaaggactcctacccaaggttcctgaagtctgacatgtacaaggccctcctggcagaggctgggatcccgctggagatgaagagacgcgtgttcccgtttacgtggaggccacggcactcgagccccagccctgcactccttcccacccctgtggagcccacagcggcttgtggccctgggggtggagatggggtggcctagtggacctggcccatctgccactctagtccctgcagctcaacgtcctgcgtgaatgcagcagccacccccgtcttggcccaggtcctgggggctgctgaacccagcaccagtgtccccttgtgcccagggggcccagtcttctgtggggtgcacagcctccctccctccagcaagccctccctgcccagaaggaatgggtccaggtgtggattcccagggagggggttcattggctcagcttgggtcagggcagagcctgttacctgaagagaggtgagaccaaggccacagggagctccaccttctctggtcttcagtccagcactgggtgcccatccccatctctaaaaccagtaaatcagccagcgaatacccggaagcaagatgcacaggcgggcggcttcccacacacccgtcacaagacgcggacatgcaggtctcggcgcgagctctgccccgtccaagagcctctccgctgtcgcccagtgtgagcctggaagaggacccaagagagtgccgtgctgaggctgcctcgaggtcactgccttccggagctgcgcctattcctccctcgccaaacgcgttccagaatttgtccacaggtgcgccggcacctgctttcccacctcgaggccgcggcctcccccccgatttatagacaactctgacattgtcaccccactgacgaggcccgattccatagggtggatccttgccaggcgtccctgatcctccctgcccaagtcttccttcgtgagctggccttgctccccatcccccaagtgcctcaccagtcccccagactgggtgaaggtacagctggctcctttcgggggtgcagcttcaactctctcggcggtagggcggtgccatccccacccatagggctggctcacatccagtcactcccaacagcgtccagcacacaaataaaagacccttgggccctggctctgag

SEQ ID NO: 257993 - DNA, 2390 bp, Artificial Sequence
  derived and/or modified sequence
cggcctcgccccgcagccatggccgccggccccgcgccgccccccggccgcccccgggcgcagatgccgcatctgaggaagatggagcgggtggtcgtgagcatgcaggaccccgaccagggcgtgaagatgcggagccagcgcctgctggtcaccgtcattccccacgcggtgacaggcagcgacgtcgtgcagtggttggcccagaagttctgcgtctcggaggaggaggccctgcacctgggcgccgtcctggtgcagcatggctacatctacccgctgcgcgacccccgtagcctcatgctccggccagacgagacgccctacaggttccagaccccgtacttctggacaagtaccctgaggccggctgcagagctggactatgccatctacctggccaagaagaacatccgaaaacgggggaccctggtggattatgagaaggactgctatgaccggctacacaagaagatcaaccacgcatgggacctggtgctgatgcaggcgagggagcagctgagggcagccaagcagcgcagcaagggggacaggctggtcattgcgtgccaggagcagacctactggctggtgaacaggcccccgcccggggcccccgatgtgctggagcagggtccagggcggggatcctgcgctgccagccgtgtgctcatgaccaagagtgcagatttccataagcgggagatcgagtacttcaggaaagcgctgggcaggacccgagtgaagtcctccgtctgccttgaggcgtacctgagtttctgcggccagcgtggaccccacgatcccctcgtgtcggggtgcctgcccagcaatccctggatctcagacaatgacgcctactgggtcatgaatgcccccacggtggctgcccccacgaagctccgtgtggagagatggggcttcagcttccgggagctcctggaggaccccgtggggcgggcccacttcatggactttctgggaaaggagttcagtggagaaaacctcagcttctgggaggcatgtgaggagcttcgatatggagcgcaggcccaggtccccaccctggtggatgccgtgtacgagcagttcctggcccccggagctgcccactgggtcaacatcgacagccggaccatggagcagaccctggaggggctgcgccagccccaccgctatgtcctggatgacgcccagctgcacatatacatgctcatgaagaaggactcctacccaaggttcctgaagtctgacatgtacaaggccctcctggcagaggctgggatcccgctggagatgaagagacgcgtgttcccgtttacgtggaggccacggcactcgagccccagccctgcactccttcccacccctgtggagcccacagcggcttgtggccctgggggtggagatggggtggcctagtggacctggcccatctgccactctagtccctgcagctcaacgtcctgcgtgaatgcagcagccacccccgtcttggcccaggtcctgggggctgctgaacccagcaccagtgtccccttgtgcccagggggcccagtcttctgtggggtgcacagcctccctccctccagcaagccctccctgcccagaaggaatgggtccaggtgtggattcccagggagggggttcattggctcagcttgggtcagggcagagcctgttacctgaagagaggtgagaccaaggccacagggagctccaccttctctggtcttcagtccagcactgggtgcccatccccatctctaaaaccagtaaatcagccagcgaatacccggaagcaagatgcacaggcgggcggcttcccacacacccgtcacaagacgcggacatgcaggtctcggcgcgagctctgccccgtccaagagcctctccgctgtcgcccagtgtgagcctggaagaggacccaagagagtgccgtgctgaggctgcctcgaggtcactgccttccggagctgcgcctattcctccctcgccaaacgcgttccagaatttgtccacaggtgcgccggcacctgctttcccacctcgaggccgcggcctcccccccgatttatagacaactctgacattgtcaccccactgacgaggcccgattccatagggtggatccttgccaggcgtccctgatcctccctgcccaagtcttccttcgtgagctggccttgctccccatcccccaagtgcctcaccagtcccccagactgggtgaaggtacagctggctcctttcgggggtgcagcttcaactctctcggcggtagggcggtgccatccccacccatagggctggctcacatccagtcactcccaacagcgtccagcacacaaataaaagacccttgggccctggctctgagcccatcctgc

SEQ ID NO: 257994 - DNA, 969 bp, Artificial Sequence
  derived and/or modified sequence
atggtgagcgtgatcaacaccgtggacaccagccacgaggacatgatccacgacgcccagatggactactacggcaccagactggccacctgcagcagcgacagaagcgtgaagatcttcgacgtgagaaacggcggccagatcctgatcgccgacctgagaggccacgagggccccgtgtggcaggtggcctgggcccaccccatgtacggcaacatcctggccagctgcagctacgacagaaaggtgatcatctggagagaggagaacggcacctgggagaagagccacgagcacgccggccacgacagcagcgtgaacagcgtgtgctgggccccccacgactacggcctgatcctggcctgcggcagcagcgacggcgccatcagcctgctgacctacaccggcgagggccagtgggaggtgaagaagatcaacaacgcccacaccatcggctgcaacgccgtgagctgggcccccgccgtggtgcccggcagcctgatcgaccaccccagcggccagaagcccaactacatcaagagattcgccagcggcggctgcgacaacctgatcaagctgtggaaggaggaggaggacggccagtggaaggaggagcagaagctggaggcccacagcgactgggtgagagacgtggcctgggcccccagcatcggcctgcccaccagcaccatcgccagctgcagccaggacggcagagtgttcatctggacctgcgacgacgccagcagcaacacctggagccccaagctgctgcacaagttcaacgacgtggtgtggcacgtgagctggagcatcaccgccaacatcctggccgtgagcggcggcgacaacaaggtgaccctgtggaaggagagcgtggacggccagtgggtgtgcatcagcgacgtgaacaagggccagggcagcgtgagcgccagcgtgaccgagggccagcagaacgagcagtag

SEQ ID NO: 257995 - DNA, 1425 bp, Artificial Sequence
  derived and/or modified sequence
ccgagcgcgttgctgcccggaggctcctacgccacggcccgtcgggcccggcgccggaagtgagctgttccgaggcgccgccgggagctgccacgtccgagacctggagcagccaccgccgcaatcatggtgtcagtaattaacactgtggatacctcccatgaggacatgattcacgacgcccagatggactactatggcacccgcctggcaacctgctcatcagacaggtccgtcaaaatctttgatgtgcgcaatggagggcagatccttatcgccgacctcaggggtcatgagggtcctgtgtggcaagtggcctgggctcaccccatgtacggcaacatcctggcatcgtgctcctatgaccggaaagtcattatctggagagaggaaaacggcacctgggagaagagccacgagcatgcgggacacgactcctcagtgaactcggtgtgctgggccccccatgactacggcctgatcctggcctgtgggagctcggatggggccatctccctgctgacttacaccggggaaggccaatgggaagtaaagaagatcaacaacgctcacaccattggctgcaatgccgtcagctgggcccctgctgttgtacctggaagcctcatagaccacccatcggggcagaaacccaattacatcaagaggtttgcatcaggtggctgtgacaacctcatcaagctgtggaaggaggaggaggacggccagtggaaggaggagcagaagctagaagcgcacagtgactgggttcgagatgtggcctgggccccctccatcggcctgcccaccagcaccatcgccagctgctcccaggatggtcgtgtgttcatttggacctgtgatgatgcctcaagcaatacgtggtcccctaaattgttgcacaagttcaacgatgtggtgtggcatgtgagctggtccatcacagccaacatcctggctgtctctggtggagacaataaggtgaccctgtggaaggagtcagttgatgggcagtgggtgtgcatcagtgatgtcaacaagggccagggctccgtatcagcatcagtgacagagggccagcagaacgagcagtgacaagacaggtggggcctggctccccacccgccagctccaggactgccccttcctgggccaactaaccagacaactgggaagagcccccaactccaacaggattattttcccaggaggagttacagatgcagccacagattgatcatctgccttaacgtgatcggagatgctttgtaatctactgtccagctgaaagcactcatgttacgaggaagaaactacaagtgatgttcaaatctattttgggtcatttttatgtacctttgggttcaggcattatttggggggttttgtttccaaaggaactaaataaagtcatattgcttataa

SEQ ID NO: 257996 - DNA, 969 bp, Artificial Sequence
  derived and/or modified sequence
atggtgtcagtgattaatactgtggacaccagccacgaggacatgatacacgatgcccagatggattactacggaacacggctggcaacatgctccagcgacaggtctgttaaaatctttgacgtgcggaatggcgggcagatcctgatcgctgacttgcggggtcacgagggacctgtctggcaggtggcgtgggcccacccaatgtatggaaatatactggctagctgctcttacgatagaaaggtcataatttggcgggaggagaacgggacttgggagaagagtcacgagcatgccggtcacgattcttcagtgaactccgtctgttgggcaccacacgattacggactgattctggcctgtgggagcagtgacggggcaatcagcttgctgacatacaccggcgaagggcagtgggaggttaagaaaattaataatgctcataccataggttgtaatgccgtgtcttgggctcctgcggtcgtgccaggatcactgattgaccacccttccgggcagaaacctaattacattaagagattcgcctctggagggtgcgacaacttgatcaaactttggaaagaagaggaggatggacaatggaaagaggaacagaagctggaggctcacagcgactgggtgcgcgatgtggcatgggctccttccatcggccttcctaccagtacgatcgcttcatgttctcaggatggtcgcgtgtttatctggacctgcgacgacgcctcctctaacacatggtctccaaaacttctgcataagtttaacgacgtcgtctggcatgtgagctggagcataaccgctaacatccttgccgtatccggcggagacaacaaggtcaccctgtggaaggagagcgtcgatggccagtgggtttgtatttctgacgtcaataagggccagggttccgtctccgctagtgtgactgaggggcagcaaaacgaacagtag

SEQ ID NO: 257997 - DNA, 969 bp, Artificial Sequence
  derived and/or modified sequence
atggtgtctgtcatcaacacagtggacaccagccatgaggacatgattcatgatgcccagatggactactacggcacccggctggccacctgcagcagtgacagatctgtgaagatctttgatgtgagaaatggaggccagatcctgattgctgacctgcggggccacgagggccctgtgtggcaggtggcctgggcccaccccatgtatggcaacatcctggccagctgcagctatgacaggaaggtgatcatctggagagaagaaaatggcacctgggagaagagccatgaacatgctggccatgacagctctgtgaacagcgtgtgctgggcccctcatgactatggcctcatcctggcctgtggcagcagtgatggagccatcagcctgctgacctacacaggagagggccagtgggaggtgaagaagatcaacaatgcccacaccatcggctgcaatgctgtgtcctgggccccagctgtggtgcccggcagcctgattgaccaccccagcggccagaagcccaactacatcaagagatttgccagcggcggctgtgacaacctgatcaagctgtggaaggaggaggaggatggccagtggaaggaggagcagaagctggaggcccacagcgactgggtgagagatgtggcctgggcccccagcatcggcctgcccaccagcaccatcgccagctgcagccaggacggccgggtcttcatctggacctgtgatgatgccagcagcaacacctggagccccaagctgctgcacaagttcaatgatgtggtgtggcacgtgtcctggagcatcacagccaacatcctggccgtgtctggaggagacaacaaggtgaccctgtggaaggagagcgtggatggccagtgggtgtgcatcagtgatgtgaacaagggccagggctctgtgtctgcctctgtgacagagggccagcagaatgagcagtag

SEQ ID NO: 257998 - DNA, 969 bp, Artificial Sequence
  derived and/or modified sequence
atggtgagcgtgatcaacaccgtggacaccagccacgaggacatgattcatgacgcacagatggattattacggcaccagactcgctacctgttcaagcgacaggtctgtaaagatttttgatgttcgtaatggtgggcagattttgatcgccgacctgcgcgggcatgaagggcccgtgtggcaggtggcgtgggcccatccaatgtacggcaacatcctggccagttgctcttatgaccgcaaagtcattatatggcgcgaagaaaacggtacctgggagaagtcccatgagcatgctgggcacgactcgtccgtgaactctgtctgttgggctccacatgactatggtttaatcctagcatgcggatcctcggacggcgccatttctctcctcacctacactggggaagggcagtgggaagttaaaaaaattaataacgcacacacaatcggctgtaatgctgttagttgggcaccagcagtcgttccgggatcccttattgaccacccctccggacagaaacccaattacataaagaggttcgcgagtgggggctgtgacaacctgataaagctttggaaggaagaggaagacggacagtggaaagaggagcagaaactggaagcccactcagattgggtgcgcgatgtggcctgggcgcctagcattggcttgccaacctccaccattgcctcctgttctcaggatgggcgagtattcatctggacatgcgacgatgcttcctcaaatacatggtcgcccaaactgcttcataagtttaacgacgtggtgtggcacgttagttggagcatcactgcaaacattctggccgttagcgggggcgacaacaaggtgactctatggaaggagtcagtggatgggcagtgggtatgcatctctgacgtgaacaagggccaggggagtgtgtcggcgagtgtcacagaaggccaacagaacgagcaatag

SEQ ID NO: 257999 - DNA, 969 bp, Artificial Sequence
  derived and/or modified sequence
atggtcagcgtaataaacacagtggacacgagccacgaggacatgatacacgatgctcagatggactactacggtacccggcttgcaacatgcagctctgacaggagcgttaagatttttgatgttcgcaacgggggacagatcctgatcgccgacctgagggggcatgaaggccctgtgtggcaggttgcctgggctcaccctatgtacggaaatatacttgcttcttgtagctacgatagaaaagtgataatctggcgggaagaaaatggcacttgggagaaatcacacgaacacgccggacacgatagcagtgtgaattctgtctgctgggctccacacgactacggactcatccttgcttgtggtagctctgacggcgctatttcactgctgacatacacaggcgagggccagtgggaggtgaagaagattaacaacgctcataccatcgggtgtaacgcggtgtcatgggcccctgccgtggtgcccggttccctaattgaccatccaagtggccagaagcctaattatataaagcgttttgcctccggaggctgcgacaatttgattaaactgtggaaggaggaggaagatggacaatggaaagaagagcagaagctagaagcacacagtgactgggtgagagatgtcgcatgggccccttctatcggccttcccacctccaccatcgcctcatgtagtcaggacggtcgggtgttcatttggacatgtgatgacgcaagttctaacacttggtctcctaaacttttacataagttcaatgatgttgtttggcacgttagctggagtattaccgctaatattcttgccgtttccggaggggacaacaaggtcacgctgtggaaggaaagtgttgatggccagtgggtttgcatttccgatgtgaataaagggcagggatccgtgtccgccagtgttaccgagggtcagcaaaatgagcaatag

SEQ ID NO: 258000 - protein, 624 aa, Artificial Sequence
  derived and/or modified sequence
MENSDSNDKGSGDQSAAQRRSQMDRLDREEAFYQFVNNLSEEDYRLMRDNNLLGTPGESTEEELLRRLQQIKEGPPPQNSDENRGGDSSDDVSNGDSIIDWLNSVRQTGNTTRSGQRGNQSWRAVSRTNPNSGDFRFSLEINVNRNNGSQNSENENEPSARRSSGENVENNSQRQVENPRSESTSARPSRSERNSTEALTEVPPTRGQRRARSRSPDHRRTRARAERSRSPLHPMSEIPRRSHHSISSQTFEHPLVNETEGSSRTRHHVTLRQQISGPELLSRGLFAASGTRNASQGAGSSDTAASGESTGSGQRPPTIVLDLQVRRVRPGEYRQRDSIASRTRSRSQTPNNTVTYESERGGFRRTFSRSERAGVRTYVSTIRIPIRRILNTGLSETTSVAIQTMLRQIMTGFGELSYFMYSDSDSEPTGSVSNRNMERAESRSGRGGSGGGSSSGSSSSSSSSSSSSSSSSSSSSPSSSSGGESSETSSDLFEGSNEGSSSSGSSGARREGRHRAPVTFDESGSLPFLSLAQFFLLNEDDDDQPRGLTKEQIDNLAMRSFGENDALKTCSVCITEYTEGNKLRKLPCSHEYHVHCIDRWLSENSTCPICRRAVLASGNRESVV

SEQ ID NO: 258001 - DNA, 10590 bp, Artificial Sequence
  derived and/or modified sequence
gggcagtcgtttcctgtcgctgcttggtaacaatggggaagataatggctgcctgagcaacgtctccgagcaggcgctgggctagaggcgggtctcaaccagctactcattggaggcgggcttgagagcggcggccagggaggtgcggagcagcctcggcggcggcggccgaaccaaccgagtcggatcctgaccctaaaacctagtattttccacttgttcatcaatatggaaaactcagattccaatgacaaaggaagtggtgatcagtctgcagcacagcgcagaagtcagatggaccgattggatcgagaagaagctttctatcaatttgtaaataacctgagtgaagaagattataggcttatgagagataacaatttgctaggcaccccaggtgaaagtactgaggaagagttgctgagacgactacagcaaattaaagaaggcccaccaccgcaaaactcagatgaaaatagaggaggagactcttcagatgatgtgtctaatggtgactctataatagactggcttaactctgtcagacaaactggaaatacaacaagaagtgggcaaagaggaaaccaatcttggagagcagtgagtcggactaatccaaacagtggtgatttcagattcagtttagagataaatgttaaccgtaataatgggagccaaaattcagagaatgaaaatgagccatctgcaagacgttctagtggagaaaatgtggaaaacaacagccaaaggcaagtggaaaacccacgatctgaatcaacatctgcaaggccatctagatcagaacgaaattcaactgaagcgttaacagaggtcccacctaccagaggtcagaggagggcaagaagcaggagcccagaccatcggagaaccagagcaagagctgaaagaagtaggtcacctctgcatccaatgagtgaaattccacgaagatctcatcatagtatctcatctcagacttttgaacatcctttggtaaatgagacggagggaagttctagaacccggcaccatgtgacattgaggcagcaaatatctgggcctgagttgctaagtagaggtctttttgcagcttctggaacaagaaatgcttctcaaggagcaggttcttcagacacagctgccagtggtgaatctacaggatcaggacagagacctccaaccatagtccttgatcttcaagtaagaagagttcgtcctggagaatatcggcagagagatagcatagccagcagaactcggtctaggtctcagacaccaaacaacactgtcacctatgaaagtgaacgaggaggttttaggcgtacattttcacgttctgagcgggcaggtgtgagaacctatgtcagtaccatcagaattcccattcgtagaatcttaaatactggtttaagtgagactacatctgttgcaattcagaccatgttaaggcagataatgacaggttttggtgagttaagctattttatgtacagtgatagcgactcagagcctactggctcagtctcaaatcgaaatatggaaagggcagagtcacggagtggaagaggaggttctggtggtggtagtagttctggttccagttcgagttccagttccagttcgagttccagttccagttcaagttccagttccagtcctagttccagttccggtggtgaaagttcagaaactagctcagatttatttgaaggcagtaatgaaggaagctcatcatcaggctcatcaggtgccaggcgagagggtcgacatagggccccagtcacatttgatgaaagtggctctttgcccttccttagcctggctcagtttttcctcttaaatgaggatgatgatgaccaacctagaggactcaccaaagaacagattgacaacttggcaatgagaagttttggtgaaaatgatgcattaaaaacctgtagtgtttgcattacagaatatacagaaggcaacaaacttcgtaaactaccttgttcccatgagtaccatgtccactgcatcgatcgctggttatctgagaattctacctgtcctatttgtcgcagagcagtcttagcttctggtaacagagaaagtgttgtgtaattaagatctgaactctcagctatgtagctgatatagtgatgggcaaacaggaatcacttgcttttatgtccactttttgagtggtacttaaatgtaaagtaacaacctgaattgagtcattgctttctgaaggaatcattgtcctttctccagtttttgttccagaataaaaggaaatattttaaaagccacgttataggacctaaaaatctgatttccgtaccagttaaattggtagcatcactgttactgataatttatcatatacacttgtcaatttttcctttgttatcttaaaagatctgccttagcaatggctcctttttcatgttgatctttaaattttcccacaccataagagaggagcaaaggaaattaccagtttagactaagttacagtatgtgtttcataagtgattaaagctatatcattcccagttattagttaacacaaattcagccacattctgagtattgtttgttcacctttcagacttggtgatactggacatgtcagtgtaaataacactaaggttaggatcttctaagtgtataactgtctcctaagcccatcactgtggcacactgtagagtgagcttatagtttaattgagatatttatcttgtggaaatattaaaaagcctatgcttgtgtaagtgaaaaaaaatcacattcatttgtttaaaaatgtaaagctattttgtagaggctcagtacttttccaatgcactgttgtatgaatgcattaaaaattgtaaagtaccatgcttagaactgagaaaactgctttttgtgagccaacatagtaacaaacacaccaaacaaagtacaaagctgcttttgtaagtgtgtagatgtcaagagcagaacatatctataatatttaatgtgtgaacagctactgtgacatgcaaaggaaaggacagtgcagaattaaaccgtgttgaagaccagtggaaattgtataatttaacttggatttaggcaggaagtgaaatatgggaggagtaaagaaaactgaagaatttaaagttttcctgaagacagtaataatgcagacacaaactggtttcatatggtgagagcagccacagcagcagcttgacctggtattctacctgagtagatgaagcagaagatcagcaagtttggcagagttttggtttaagaaaaacaaaccactactacctagcacaagttaaatttacaagtctgctcctcaaaaatgaaaaaatggaggaaagagactataaaaccacttttagcatatgaattgcagttggtacacatgtgtgtgttaataggaaagtctcgaatttgtgttgtttttgagatttgtcatttaaggtaccagtgcacacttgatcatatttcattactatctctaacacagtcctaacatctcaaatttaaagaccagttgaagattaagggatttttatcctttgttgaaagtcatgttgggttatttgaaattcaaattttaattgtgctgcccatatatgaaaatgagactgctgactcgctatctatggacatgcactttatgttggtttcttagtagtaagagtaacttcatgataaccccagtcttcttgcctaatttcttttttgagactagctggggttaggattagaatgactatggagcagatatttgttcttctgggaaaagctttaacaggccaaaatagggattgaacttgtccttggcctttatcaaagcaagctagctacccagacgtagtcaaatactctacaaaataaacaagtctgctttaggaattgtctgggtaccttcactgttaccaacttagctgtaaagattatttcaaagctcactcttccatgatttcttctggctttcaatcctatctaagtatcaaggaaattaacttgtaaatatggtagttgtttactaaggatatgtactgctcttgcaaggaaataatgtccaaacaaagcttcacttattttttttaatataagcagatttcactgtttatggcgcttatgtaatacattttatctttttaaaaatttgtccgtgtaaaagtcaggattcctttatatttgtgagcctccttttctcctttcctaaggatgtaatctacagttttcagatctgcagggtagtcttgattggctaaaaacaaatcaattttcttcttggcataaagtgtttcattattataggggtgttcattttaaatagtttaaaaacaattgcagcacattctaagcataagagaaagttattgacaacaggtaccttcctaatctcccaagacgtacttactcatttgtgaagtattaaagtaagaggtaactcaagcagaatgctggctatgaatgtagatattgaagctattcataaacactggaaatagaattttaagcttttagccttcagtggaatgcacatattggacatgtgcatgtgaacacctttttcagtagcactcacggatttccattcgattgtatagaatgaatacaagtgttttagtggaatttgctacttaatttttaatcttgcgatgtccgtgattattacatgcttactagtgttgtggacattgaagacaaggtcattcgtaggtgtcagattacaatggagaacaaaaatcgttttccccccacccacatccaaacaccattctcgagggagcatttcttgcaaaacaccttacatttcattttctatctttgcactttttcttaagtacagaaaagttgtctttaagacctagtttgaacttcatgcagtaagaggaacaaggataaacaatgttgggagttcacattgttcagagcataaggaaaagtaccaaaacccaaattttcttgaatatttcagatgtttttaaaaactcacttctagtctgaaacatttgaattgttttaactctgagcagctgacaaagttgaggtttttttgttttgttttgttttgttttgtttttttgagacagagtcttacttggttgcccaggatgaagtgcaatggagcgatctcggctcactgcaacctctgcctcctgggttcaagcaattctcctgtctcagcctctcgagtagctgggattacaggcgcatgccaccacacctggctagtttttatatttttagtagagatggggacttcaccgtgttggccaggctggtcttgaactcctgacctcaagtgatgtgcctgcctcggcctccgaaaatgctgggattacaggcgtgagccaccatgtccagccaaagttgaggtttattagtactattagaaacaaaattgagcaagttaagttaaaagtttgctgactttgtatcaacactatagaagatgagccaccttgttaatttggaatatttgctctgaaaagaacatgttagttacaccttaatggtgttaatggaggtggggattgagaaaagtgttcacattagtgttggaatgtaggtaattgtacagtttataagacctttagcaccaggaaataaaatatgtgtgtgtacacacacagtttttaaaaacgattggaattcatccaaaccttaagattaggaaactgattggctgtaagtgttgcctcaagtaatgtgtcccccgccccataacatgtcttttctgtgccaagtatcctctcctagtgtcagtgtctcaaattatatttatgaagggttatcacataatatgctttgtatttaactacctgcttcccaggcgtccatgacatgaaatgggtgaagcatcagccatgactttcggtcagttcccaaaatacccaaatgatagggaggtaaagattgcaaaattcctcttaaaaggccatttttacagcttgctaaaatacagtggcaccttatggttgttaatattttttcttttaaagatggagaatgtttttattcttccccttttctcctttgttcttttgcgaacaaaaaaaattataatctgccttatttgattttttttttaagttttaccttacaggcttccctgtcacatgttttaccatattaagtacatagaagccatgtttgcagggcacttttattctcctagtcttataagactatgctaattgttactttctgaagtattctgtaccttagtatgcaagattgttaaggcacatgttaaagtgtcaggtgtgtttttttccctttaattcttcagtatgtttatattcaataacagtattgtaattcattgagttaactagtaaattgtgtgcttttgaaaaaacatgaaaaatgtaaattgacagcatacttcatttggaaaaaagtaaaagatccgaggaactagtatgtcacttatttatttttattttattttattttttactttttgagacagggtcttgctctgtcacccaggctggagtgcagtggcatggtcacagctcactgcagccttgacttcctgggctcaggtgattctcccacctcagccttccaagtagctgggactacaggcatgcaccacattgcctggctaattttttgtggagatggggtttcgccatgttgtccaggctgttcttgaactcctgggctcaggcaatttgcctgcctcattctcccaaagtgctgggattataggcgtgagccactgcgcccagccttacttatttttaaatcagattttttaatcaactaaaacagctatgagttaagtacctgccctgcaaaaatttttagaaaaagttttaggattatgaaattaagaattattttccttaactggaacagttctaaaatttatctgatacttctctaacaagtgagtgatctcatgtaaccccagtttgtatcttaaaggctgcagcatagaattgagctgtataacagtgttagaactgtcaagtgataatcacagaacagtttgtatcggttttataattctcatgtcttgatcagatctgaaggaaataggcataccctccaacattctaaaaattatttatttttattaggatttgtttattaaagttccacgagctgctttatggtcagttgggctgagtagtagatatcttaaagacatgcagtgaaagtgaaccctgtcatatcatggtgcctctttcaaggttcctctgtaagttcctcatcttgcagaattatttcaataccaaggtatggttgaaccagctgtccagccttaactctatttagtgccccattactaatgttcttttaactggtttgtatgtgttttaactgtccagtgtttggattttacctcttgatagctccatttgtccctggtgctgcttttaaggatgtagggccatgtgatcaggtatcaagttgagtaggtacgcagttggcctggtgatgtatctgtgcctgttttatcttctcccaggaagagctgctttggtatagttgtttacttggattcatacaaagaacagggcagcaatcttggaaagctttctgaagcttataagaacctgaaggggtttggagggggaacagtaacaaaggctgcctttatgtctttggtcacaaagcacatagatgtatgttctgtaaagactaaagtgattgttataccagggcttcctgaccttcgggagagactcaaaaaagcagagaggagcacaaagtgaagttaatttggttggcttgctttatctggtttctcattttctttcaatttaaacctgaacataacacccttctccgatacctatccagcagactcctggttgggaagccctgtattaaattttgagaatgtacacagttttcttttgtacagtgctttacaactgctaaaagttaacttgtttaaagcaaaacaagaccttgaaaggtcaatcatattaaagctggtttgattattaatagttatcttttaggaagaagcttttttccctatgtaagatgtcatactgcagatttaaaatatagactatcaataaaatgcatgaagtgatcatttgtgcttgatcatctctccttgggtttttctttaaaaaggggaatctgctataaaggttctgttgcttcaaaccaatgtcaaatagacttgatttttagagtcatggaattacagtgcaaccttgatttttattcccctcactgctatgagtgtgggcaggtactggtttatatgttataacttccgttttatctgtgttgtgtagttgaatggcttaatcgttgagtggtaaaataaaagattatattccaatacaagaatcctggaaagatttatgtgaatgacattttaagtaggcgcatctttgctgtttcttgtattctcgccattgctctgaccactcccttgcttgccctgtatatatacaaaaacttgtaggtgtgcacgtgtgcttgtacttctgtcttccatttctatcttaatctcttaaacatattgcttaagccactaagatgtccttgtttcaagtaaatcgtcacattgtgacacctggtgtattgtattatagtttcatttcctctggtgcctgcagagctatctgtcattggcatcataactcggtttctcaggatagttttgatgtagtcagctcttcaactcatgaccttcccaaggttttaagtttagtgtcattcatgattttattatttgaaactcaataccaccatcaaaaagttagtgctctagacaatgaagccaaagcacaggcatcttaggtcagtgaaaaggatccagacataaattagccaggtgtggtggtacacagctgtggtcccagctacttgggaggctgaggtggtagaatcacttgagcccgggaggtcaaggctgcagtgagccatgatcatgctgatgcactccagcctgggttacagagcaaaaccttgtctcaaaaaaacccccagatacctagaagaaaggattcgataaatctgggtggattataaactgaactcttaatggtcattttaaaaaataagaaagcaagggtccagtttctttgaggtctttgaatttagacaagatttaactataaggccttgcatggattactaactataattaaattagctaaacttttctggttgctgtcaggcattgtattaagtattctatataaattatttaatcatcacagtgactgtgaggtgaaagtataccacccattttataggtaatgcagctgagatacagatgtttggtaatttgcccaggtcacatagtaagtagcagattatttgcaatcatctttgatgcagtcatcttccttgtgctcttaatcccactactatatgacttctaatttgtttcttagtatttatcccaagccctagactagattgcttatgaggtgtgatttcttaggaaaaacatcagttttggctggtttgccaagaaaaaaaaaggccaaattggtttttgtttatttttttgtttgtttgagatggattctcgccctgtcgcccaggctggagtgcaatggtgcgatcttggctcactgcaacctctgcctctgggttcaaacgattctcctgcctcagcctcccgagtagctgggattacaggcgcccgccaccacgcccagctaatttttctatttttagtagagacagggtttcaccatgttggccaggctggtcttgaacccctgatcccatgatctgcccgtctcggcctcccacagtggtggtattacaggcgtgagccaccacgcccggccgcaaattgttttttgtttttttgttttttggaggattaatggtaatatactgtaaattcagtaaagcactgggcattaccagatacaccttagcactatgaataacatgaactatcattttagcagtttaagtgtaccttgtaatcagccctagggcaaacggtatcaaggtgttttatttccagaagtctcaaaatagactggaataaaaatttggtgaattcatcaacacagacaatgggtccacgtcttgcagctacagctgctgcagctactcctgctgtccgcaccgttccacagtataaatatgctgcgggagtttgcaatcctcagcaacatcttaatgcacagccacaagttacagtgcaacagcctgctattcatgtacaaggtcaggaacctttgactgtttccatgttggcatctgcccctcaagagcaaaagcaaatgttgggtgaatggctgtttcctcttattcaagccatgcaccctactcttgccggtaaaatcactggcgtgttgttggagattgataattcagaacttcttcatatgctcaagtctccagagtcactccattctaaggttgatgaagctgtagctgtactacaagcccaccaagctaaagagactgcccagaaagcagttaacagtgccaccggtgttccaactgtttaaaattgatcagggaccacgaaaagaaacttgtgcttcaccaaagaaaaatatctaaacatcgaaaaacttaaatatggaaaaaaatatcaaaatataaaagaaggaaactgaaaaaaaaaaaaaaaaaaaaaaaaa

SEQ ID NO: 258002 - DNA, 1875 bp, Artificial Sequence
  derived and/or modified sequence
atggagaattcagactctaatgataagggttctggagatcagtccgcagcccagcgacgtagtcagatggatcgtctcgatcgagaagaggccttctatcagtttgtgaataatctttccgaggaagactatcggctgatgcgcgacaacaatctccttggcacgcccggggagtctacggaagaagaactgctccggcgcttacaacagatcaaagagggcccccctccccaaaactctgacgaaaaccgaggaggcgacagctctgacgacgtatccaacggcgattccataatagactggcttaatagtgttcgccagaccggaaataccacacgatctggccagcgcggaaaccagtcctggcgtgccgtgtcaagaacgaacccaaatagcggagacttccggttctccttggaaattaatgttaataggaataacgggagtcagaatagtgaaaatgagaatgagccaagtgcccgccgctcttctggggaaaacgtcgaaaacaatagccaacggcaggtcgagaacccccgctctgagagcacatctgcaaggccaagccgcagcgagcgcaattctacagaagcccttaccgaagtccctcctacccgtggccagaggcgggcaagatcacgatcccccgaccatcgccgtactagagccagagccgaaaggtccaggtcccccctgcatcccatgtccgaaatcccacgtcgcagtcatcatagcatttcttctcagaccttcgagcatcccctggtcaacgagaccgagggtagctccaggacgagacaccacgttacactccgacaacagatcagtgggcctgagctcctcagccgaggcctctttgccgcctccggtacacggaacgcttcccaaggggctggctcctctgatactgccgccagcggcgagtcaaccggcagtggacagcggcccccaacaatcgtcttggatttgcaggtgaggcgagtgcggcctggggagtaccggcagagagactctattgcatctaggacgcggagcagaagccagacacctaataataccgtcacttacgaatctgagagaggcggatttagaaggacattctcccgctccgaacgagcaggtgttcgtacctatgtgtctaccatcagaatccccatccgacggattctgaacacaggcctcagcgaaaccaccagcgtggccatccagactatgcttcgacagattatgaccggctttggtgaactgtcttactttatgtactctgactctgattccgaacccacaggtagcgtgagcaaccggaacatggagcgcgctgaaagcaggtcaggacggggcgggagcggtggagggtctagctctggcagtagcagtagctcttcatctagtagcagctcatcgagttcttccagttcttcaagttccccttcctcaagctcagggggcgagtcctctgaaactagcagtgacctgtttgaaggatctaatgaaggttctagctcctctggaagctcaggagctaggcgtgagggcagacaccgagcacccgtgacctttgacgagtccgggtcactacccttcttgagcctcgcccagttcttcttacttaatgaggacgacgatgaccagcctcgtggattgacaaaggaacagatagacaacttggcaatgcgtagcttcggggaaaatgacgctctgaagacctgttctgtctgtattaccgaatacacagaagggaataagctccgaaagctcccttgtagtcatgagtaccacgtccattgtattgatcgatggctgtctgagaattctacgtgccccatatgcagacgggccgtgctggcgagtggtaatcgggaaagcgttgtctag

SEQ ID NO: 258003 - DNA, 1875 bp, Artificial Sequence
  derived and/or modified sequence
atggaaaatagtgattccaacgataagggttccggagaccaatcagctgctcagcgccgtagccagatggatcgccttgatcgggaggaagcgttctaccaattcgtcaacaatttgtcggaagaggattatcgcctgatgagggacaataaccttttagggaccccaggcgagagtacagaggaggagctcttgagaagactgcagcagatcaaagagggcccccccccacagaattcagatgagaacaggggaggcgatagctccgacgatgtgagtaacggagatagtataattgattggttaaacagtgtgagacagactggaaatacaacaaggtccggacagagagggaaccagagctggagggctgtgagccgaaccaatccgaatagcggggactttcggtttagtctcgaaatcaacgtcaaccggaataacggctcacagaactcggagaacgagaacgagccaagcgccagaagatcaagcggtgagaatgtcgaaaataactctcaacgtcaggttgagaatcctagatctgagagtacatctgcacgcccctctaggtcggagagaaacagcacggaggctcttactgaagtgcctcctacccgtggccaacgcagggctagatcccgctctcccgaccaccggagaacaagagcccgtgcagaaagaagcagatcacccttacatccaatgtccgagatccccaggagatcccatcacagtattagttcccaaacattcgaacaccccttagtcaacgaaactgagggcagcagcaggaccaggcatcatgtgacgcttcgacagcaaatttcgggccctgagctgctcagtcgcggattgtttgctgcatcagggactaggaatgcgtcccagggggccggctcatccgacaccgccgccagcggggaaagtactggaagcggccagaggcccccaactattgtgctcgacctgcaggtgaggcgagttaggcctggggaatataggcaaagggattctatcgccagccggactagaagccgcagccagactcccaacaataccgtcacctatgagtcagaaagaggcggttttcgaaggacgttcagtcggtctgagagggccggtgtgaggacatatgtctcaacaataagaatcccaataaggcggattctgaataccgggctgagcgaaactacatcagtggcaatccaaacaatgcttcgccagattatgactggctttggagaattgtcatattttatgtatagcgattctgattccgagcctaccgggagtgtgagtaatcgaaacatggaacgtgccgaaagtcgatcagggaggggcggctcaggggggggcagttcttccggaagtagttcatctagttcctcctcctcaagcagttctagcagcagcagttcttcctctagccccagttcctccagcgggggagagagtagtgagacaagctccgacctgtttgaggggtccaatgagggctcctctagctctggctccagtggcgcaaggcgcgagggaaggcaccgagccccggttacctttgatgagagcggctctctccccttcctgtctctggcccagttcttcttgctgaacgaggatgatgacgatcagcctcggggactcacaaaagagcagattgataatctcgctatgaggagcttcggcgagaatgacgctctgaaaacttgtagcgtatgcatcaccgagtacacggaagggaataaactccgcaaactcccctgcagtcacgaatatcatgtccactgcattgataggtggctgagcgagaattcaacctgccctatttgccgccgggccgtcttagcttctggcaatcgggaaagcgtggtgtag

SEQ ID NO: 258004 - DNA, 1875 bp, Artificial Sequence
  derived and/or modified sequence
atggagaacagcgacagcaatgacaagggcagcggggaccagagcgctgcccagaggaggagccagatggaccggctggaccgggaggaggccttctaccagtttgtgaacaacctgtctgaggaggactaccgcctgatgagggacaacaacctgctgggcaccccaggagagagcacagaggaggagctgctgcggcggctgcagcagatcaaggagggccccccaccccagaacagtgatgagaacagaggaggagacagcagtgatgatgtgtccaatggagacagcatcatcgactggctgaacagcgtgcggcagacaggcaacaccaccaggagcggccagaggggcaaccagagctggagggctgtgtccaggaccaaccccaacagcggggacttccgcttcagcctggagatcaacgtgaacagaaataatggcagccagaacagtgaaaatgaaaatgagcccagcgcccggcgcagcagcggggagaatgtggagaacaacagccagaggcaggtggagaaccccaggtctgagagcaccagcgcccggcccagccgctcagaaagaaacagcacagaggccctgacagaggtgccccccacccggggccagaggcgggcccggagccgcagcccagaccacaggaggacccgggcccgggcagagaggagccgcagccccctgcaccccatgtctgagatcccccggcgcagccaccacagcatcagcagccagacctttgagcaccccctggtgaatgaaacagagggcagcagcaggaccaggcaccacgtgaccctgcggcagcagatcagcggccctgagctgctgagccggggcctgtttgctgccagcggcaccagaaatgccagccagggcgccggcagcagtgacacagctgccagcggggagagcacaggcagcggccagaggcctcccaccatcgtgctggacctgcaggtgcggcgggtgcggcctggagagtaccggcagagggacagcatcgccagcaggaccaggagccgcagccagacccccaacaacacagtgacctatgagagcgagcggggcggcttccggaggaccttcagccgctcagaaagagctggggtgaggacctacgtgtccaccatccgcatccccatccgccgcatcctgaacacaggcctgtctgagaccacctctgtggccatccagaccatgctgcggcagatcatgactggatttggagagctgagctacttcatgtacagcgacagcgacagcgagcccactggatctgtgagcaacagaaacatggagcgggcagagagccgcagcggccggggcggcagcggcggcggcagcagcagcggcagcagcagcagcagcagcagcagcagcagcagcagcagcagcagcagcagcagcagcagccccagcagcagcagtggaggagagagcagcgagaccagcagtgacctgtttgagggcagcaatgaaggcagcagcagcagcggcagcagcggggcccggcgggagggccgccaccgggcccctgtgacctttgatgaaagtggcagcctgcccttcctgagcctggcccagttcttcctgctgaatgaagatgatgatgaccagccccggggcctgaccaaggagcagattgacaacctggccatgaggagctttggagaaaatgatgccctgaagacctgcagcgtgtgcatcacagagtacacagagggcaacaagctgaggaagctgccctgcagccatgagtaccacgtgcactgcatcgaccgctggctgtctgagaacagcacctgccccatctgcagaagagctgtgctggccagcggcaaccgggagagcgtggtgtag

SEQ ID NO: 258005 - DNA, 1875 bp, Artificial Sequence
  derived and/or modified sequence
atggagaacagcgacagcaacgacaagggcagcggcgaccagagcgccgcccaaagacgttcccagatggaccgcctcgaccgggaggaagcgttctaccagttcgtgaataacctcagcgaagaagattaccggctcatgagggacaacaatctgctggggacgccgggagaatctaccgaggaggagctcctcaggcgtctgcagcagattaaggaaggcccaccaccacaaaacagtgacgagaataggggaggcgacagttcggatgatgtgtctaacggcgacagtataattgattggctaaattctgtgaggcagaccggaaacactacccggtctggacagagggggaaccagtcgtggcgtgccgtctcaagaaccaatccaaacagcggagactttaggtttagcctggagataaatgtgaacaggaataatggctcccaaaacagcgagaacgaaaacgagccctcagcccgcaggtccagcggcgagaacgtcgaaaacaatagccagcgccaggtggaaaaccctcgctctgagtctacctctgcccgtccctctcgctctgaaaggaactctactgaggccctaacagaggtgcccccaacgcgaggtcagcgacgagctcgcagccggtcccccgatcacaggagaactagggcccgcgccgagagatccagaagtcctttgcatccaatgtccgagatccccagaagaagccatcacagcatcagttcccagaccttcgagcatccccttgttaatgaaactgagggttctagtcgaactcggcaccacgtgaccctacgccagcaaattagcgggccggagttgctcagtcggggactatttgccgcaagtggcacaaggaatgcatcccagggagctggtagctccgacacagccgctagcggggagtctacaggaagtgggcagcggccaccaaccattgtccttgacttgcaggtgcgacgagttcggcccggcgagtatcggcaacgggatagcatagcgagcaggaccaggtcaaggtcacagacgccaaataatactgtgacttacgagagcgagcggggtggattcaggcgcaccttttccagaagtgaaagggctggtgtgcgaacctatgtgagtactatcaggatccctatccgtcggatcctgaatacagggcttagcgagactacatccgtagctatccagaccatgcttcgccaaatcatgaccggatttggtgagttgagctattttatgtatagtgatagcgattctgagccaactggaagtgtatcaaatcggaacatggagcgcgctgagagtcgctccggcaggggcggcagcggagggggaagctcctctgggtccagttcctcatccagttccagttcttcatccagtagttcttcaagctcatcctcatctccgagctcctcatccggtggggaatcctccgagactagctctgatttattcgagggcagcaatgaaggatcaagttcttctggcagttccggggccagaagggaagggcgtcacagggcgccagtgacttttgacgagagcggtagcctccccttcctgtctctggcccagttcttcttactgaatgaggacgatgatgatcagcctagaggcctcacaaaggagcaaattgataacttggcgatgagatcctttggcgagaatgatgccttgaagacctgctccgtttgcattactgagtatacagaaggcaataaacttcggaaactaccatgctctcatgaataccatgtccactgtattgacaggtggctgtctgaaaattctacctgtcccatctgccgcagagccgtgctagcaagtggtaacagggagagcgtcgtatag

SEQ ID NO: 258006 - DNA, 1875 bp, Artificial Sequence
  derived and/or modified sequence
atggagaacagcgacagcaacgacaagggcagcggcgaccagagcgctgctcaaagaaggagtcagatggaccggctggaccgcgaggaagctttttaccagttcgtcaacaacctgtcagaagaggattaccggctaatgcgagacaataatctccttgggacgccaggcgagagtactgaggaagagctgctgaggcggctgcaacaaattaaagagggaccacctccccagaattctgatgagaacagggggggtgattcatcggacgatgtttctaatggagattcaatcatcgactggcttaacagcgtccggcagacaggaaacaccacccgcagcggacagagaggtaatcagtcttggcgcgccgtgagtagaacaaaccctaatagcggagacttccgcttttctctcgaaatcaacgtgaaccgcaacaacggatctcaaaattcagaaaatgaaaatgaacccagtgcccgtagatcaagcggggagaatgtggagaataatagtcaaaggcaggtggagaacccccgtagcgagagcacttccgcccgcccatctcgatccgagcgaaattcaactgaagccctgacagaggtgccgcccactcggggccaaaggcgcgctcggagtcgttcccccgaccaccggcgaacgcgcgcccgcgctgaacgatctagaagccctctgcatcctatgtctgagatcccgcggcgtagtcatcactccataagtagccaaacttttgagcaccccctcgtgaacgagacagagggcagcagtcgaacccgtcaccacgttaccctccgtcaacagatctctgggcccgaactgttgagcaggggactcttcgctgcatctgggacccgaaacgctagccagggggccggttccagcgataccgctgcatccggcgagtccaccggcagtggccagcgaccccccacaatcgtgctcgatctccaggtaagacgggtaagacccggtgagtatcgtcaaagagattctatcgcttctcggacccgaagtcgaagccagactcctaacaacacagtgacatacgagtccgaacgcggaggatttcggcgaaccttctcaaggagtgaacgggccggcgtcagaacatatgtcagtacaatcagaatccccatccggagaattctgaacaccggactgagtgagacaacatcagtggccattcagacgatgcttcgacagattatgactggatttggtgagctgagctattttatgtactccgattccgatagtgaacctacggggagtgtttctaatagaaacatggagcgagccgaaagccgaagcgggagagggggatccggcggaggatctagtagtggcagttcctcttcgtccagctcttccagctcaagctcatcttcatcaagttcttcatcctccccaagttccagtagtggaggagagagtagcgaaacatcatccgacctatttgagggcagtaacgagggatcttccagttctggttcaagcggggcgagaagggaggggcgtcatagagcaccagtcacattcgacgagtctggctccctgccattcctctcactggcccagtttttcctgttgaacgaggacgacgacgaccagccccggggcctcactaaagagcaaattgataacctcgctatgcgatcatttggggagaatgatgctttgaagacttgttctgtgtgtatcacagagtatacagagggcaataaactcagaaagctcccatgcagtcatgagtatcacgtgcattgtattgacagatggctctctgagaacagcacttgccccatatgccgcagggctgttttagcctctgggaaccgtgagtcagtggtgtag

SEQ ID NO: 258007 - DNA, 1875 bp, Artificial Sequence
  derived and/or modified sequence
atggaaaactcagattcgaatgacaaaggttctggcgaccaaagtgctgctcagaggaggagccaaatggacagacttgaccgtgaggaggccttttaccagttcgttaataacctgtctgaggaagactatcgattaatgcgagacaataatttgctcggaaccccaggcgagagcaccgaagaagagctgctgaggcggttacagcagattaaggaaggacctcctcctcagaactctgacgaaaaccgtggaggtgatagttccgatgatgtatccaacggagactctatcatcgattggttgaattctgtacgccagactggaaatactacccggtcaggtcagcgaggaaatcagtcttggagggccgttagccggacgaatccgaactccggcgactttagattttcccttgaaattaacgtcaatcgcaataacggcagtcaaaactctgagaatgagaacgaaccaagtgctcggaggtcttctggcgaaaatgtggagaataactcccagagacaggtggagaaccccagatcagagagcacaagcgctcgtccctcccgcagtgaacgcaacagtacagaggccctgaccgaggtccccccaacccggggacagcgacgagccagatccaggtccccggaccaccggcgaacgcgggcaagggcagagaggtcacgctcccctttgcatccgatgtcggaaatccctaggaggtcccaccactctatttcatcccagactttcgagcatcccctggtcaacgaaactgagggctctagtaggacccgtcaccacgtgacactcaggcaacagatctcggggcctgagctgttgtccagagggctcttcgctgcgagcgggacaagaaatgccagccaaggagcaggaagtagcgacacggccgcttcaggagaatctacagggtccggccaaaggcctccgactatcgtcctggatctccaggtcaggcgggtgagacccggtgagtataggcagcgcgactcgatagcgtcccggacacgctctcgcagccagacacccaataacacagtgacatacgaatctgaacgcggaggtttccggcgaacgttcagtcgttccgaacgagcaggtgtgcgtacctatgttagcactattaggataccgattcggcgaatactaaatacagggctgtccgagaccacgtctgttgccattcagacaatgctcagacagattatgacaggattcggcgaactgtcctacttcatgtattctgactccgactcagagcccaccggaagcgtcagcaacaggaacatggagcgggctgagagcagatccggaaggggcggaagcggcggaggctcaagtagtgggtcctcttctagttccagcagcagctcgtcttcttcttcctccagctcttcctccagttcaccatcctcttcctcaggaggcgagtcctcggaaaccagctcagacctgtttgagggtagcaacgagggtagctccagttccgggtcatccggcgcacggagggaagggcgacatagagctccagtgacgttcgatgagtccggatccctgccgttcttgtcactggctcagttctttctcctgaacgaggacgatgacgaccagcccaggggtttaaccaaggagcagattgacaacctcgcgatgcggagctttggcgagaacgacgcacttaaaacctgctctgtgtgtattacagagtatacagaaggaaacaagctcaggaaactcccctgtagccacgagtatcatgttcactgcatagatcggtggttgagcgagaatagcacctgtcccatatgtcggcgagccgtcctggcatcaggcaaccgggagtccgtggtgtag

SEQ ID NO: 258008 - DNA, 1875 bp, Artificial Sequence
  derived and/or modified sequence
atggaaaacagcgatagtaatgacaagggcagcggcgatcagagtgctgctcagagaaggtcccagatggacagattggacagagaagaggctttttatcagtttgtgaataacctttcagaagaagattataggcttatgcgggataacaacttgttaggaacacctggtgaaagtaccgaggaggaacttcttcgcaggctccagcagattaaagaaggaccaccaccccagaattctgacgagaacagaggtggcgacagttcagacgatgtgagtaatggggactccattattgattggctcaatagtgttaggcagacagggaacactacaaggagcgggcagcggggaaaccagagttggagggcagtctcacggacgaaccccaactcgggggatttcagattcagcctcgagattaatgtgaacagaaataatggctcacagaatagtgagaatgagaacgaaccctccgccaggcggagttccggagagaacgtcgagaataactctcagcggcaggttgagaacccacggtcggagtctaccagcgctcggccatcgcgaagcgaacgcaattccaccgaagccttaacggaggtgccacccactaggggccagaggagggctcgcagccggtctcctgaccaccggagaactcgagcgagagctgaacgcagtaggagtcccctgcacccaatgtccgaaattcccaggagatcccaccattctatctcaagccagaccttcgagcaccccttggtgaacgaaacggaagggtccagccgtacccgtcaccacgttaccttgcgccagcaaatttctggcccagaactgctcagccggggactctttgctgcatctggaactcggaacgcatcacaaggcgctggatcatctgatacagcagcctcaggcgagagcactgggagcggtcagcggcctccaacaatagtacttgatctccaggtgagaagagtgcgccctggggagtaccgccaacgtgactcaatcgcgtcaagaaccaggagcaggtcccagactcctaacaacactgttacttacgagagcgagcgcggtgggttcaggcgaaccttttcccgcagcgagagggctggagtgagaacttatgtcagcaccatccgaattccaattcgcagaatcctgaacacgggcctttctgaaactacttctgtggccattcagacaatgctccgacaaataatgaccggctttggagagctcagctattttatgtacagcgattcagacagcgaacctaccggcagcgtaagcaaccgaaatatggaacgggcagaaagtagaagtgggcgagggggatctggtgggggtagttctagtggctcctcttcctcttccagctcctcctcaagctcttcttcttcgtcctcttcttcctcaagcccgtcgagctcatcaggaggggagtcttcagaaacatcatctgacctgttcgagggctctaatgaaggcagcagcagcagcggctcatccggggctaggagggaaggtcgacatcgagcccctgtaacatttgatgagagtgggagcctaccttttctgagcctggcacaattttttttgctgaacgaggacgacgacgatcaacctcgcggattgaccaaagaacagatagacaatctggctatgcgcagcttcggggagaatgacgcactgaaaacgtgctccgtgtgcattaccgagtacaccgagggcaataaactccggaagttgccctgcagccacgagtaccacgtgcactgcatcgatcgctggctaagtgagaacagcacttgccccatttgcaggcgggcagtgttagcaagcggtaatagggagtcagtggtttag

SEQ ID NO: 258009 - DNA, 8317 bp, Artificial Sequence
  derived and/or modified sequence
tttcctgtcgctgcttggtaacaatggggaagataatggctgcctgagcaacgtctccgagcaggcgctgggctagaggcgggtctcaaccagctactcattggaggcgggcttgagagcggcggccagggaggtgcggagcagcctcggcggcggcggccgaaccaaccgagtcggatcctgaccctaaaacctagtattttccacttgttcatcaatatggaaaactcagattccaatgacaaaggaagtggtgatcagtctgcagcacagcgcagaagtcagatggaccgattggatcgagaagaagctttctatcaatttgtaaataacctgagtgaagaagattataggcttatgagagataacaatttgctaggcaccccaggtgaaagtactgaggaagagttgctgagacgactacagcaaattaaagaaggcccaccaccgcaaaactcagatgaaaatagaggaggagactcttcagatgatgtgtctaatggtgactctataatagactggcttaactctgtcagacaaactggaaatacaacaagaagtgggcaaagaggaaaccaatcttggagagcagtgagtcggactaatccaaacagtggtgatttcagattcagtttagagataaatgttaaccgtaataatgggagccaaaattcagagaatgaaaatgagccatctgcaagacgttctagtggagaaaatgtggaaaacaacagccaaaggcaagtggaaaacccacgatctgaatcaacatctgcaaggccatctagatcagaacgaaattcaactgaagcgttaacagaggtcccacctaccagaggtcagaggagggcaagaagcaggagcccagaccatcggagaaccagagcaagagctgaaagaagtaggtcacctctgcatccaatgagtgaaattccacgaagatctcatcatagtatctcatctcagacttttgaacatcctttggtaaatgagacggagggaagttctagaacccggcaccatgtgacattgaggcagcaaatatctgggcctgagttgctaagtagaggtctttttgcagcttctggaacaagaaatgcttctcaaggagcaggttcttcagacacagctgccagtggtgaatctacaggatcaggacagagacctccaaccatagtccttgatcttcaagtaagaagagttcgtcctggagaatatcggcagagagatagcatagccagcagaactcggtctaggtctcagacaccaaacaacactgtcacctatgaaagtgaacgaggaggttttaggcgtacattttcacgttctgagcgggcaggtgtgagaacctatgtcagtaccatcagaattcccattcgtagaatcttaaatactggtttaagtgagactacatctgttgcaattcagaccatgttaaggcagataatgacaggttttggtgagttaagctattttatgtacagtgatagcgactcagagcctactggctcagtctcaaatcgaaatatggaaagggcagagtcacggagtggaagaggaggttctggtggtggtagtagttctggttccagttcgagttccagttccagttcgagttccagttccagttcaagttccagttccagtcctagttccagttccggtggtgaaagttcagaaactagctcagatttatttgaaggcagtaatgaaggaagctcatcatcaggctcatcaggtgccaggcgagagggtcgacatagggccccagtcacatttgatgaaagtggctctttgcccttccttagcctggctcagtttttcctcttaaatgaggatgatgatgaccaacctagaggactcaccaaagaacagattgacaacttggcaatgagaagttttggtgaaaatgatgcattaaaaacctgtagtgtttgcattacagaatatacagaaggcaacaaacttcgtaaactaccttgttcccatgagtaccatgtccactgcatcgatcgctggttatctgagaattctacctgtcctatttgtcgcagagcagtcttagcttctggtaacagagaaagtgttgtgtaattaagatctgaactctcagctatgtagctgatatagtgatgggcaaacaggaatcacttgcttttatgtccactttttgagtggtacttaaatgtaaagtaacaacctgaattgagtcattgctttctgaaggaatcattgtcctttctccagtttttgttccagaataaaaggaaatattttaaaagccacgttataggacctaaaaatctgatttccgtaccagttaaattggtagcatcactgttactgataatttatcatatacacttgtcaatttttcctttgttatcttaaaagatctgccttagcaatggctcctttttcatgttgatctttaaattttcccacaccataagagaggagcaaaggaaattaccagtttagactaagttacagtatgtgtttcataagtgattaaagctatatcattcccagttattagttaacacaaattcagccacattctgagtattgtttgttcacctttcagacttggtgatactggacatgtcagtgtaaataacactaaggttaggatcttctaagtgtataactgtctcctaagcccatcactgtggcacactgtagagtgagcttatagtttaattgagatatttatcttgtggaaatattaaaaagcctatgcttgtgtaagtgaaaaaaaatcacattcatttgtttaaaaatgtaaagctattttgtagaggctcagtacttttccaatgcactgttgtatgaatgcattaaaaattgtaaagtaccatgcttagaactgagaaaactgctttttgtgagccaacatagtaacaaacacaccaaacaaagtacaaagctgcttttgtaagtgtgtagatgtcaagagcagaacatatctataatatttaatgtgtgaacagctactgtgacatgcaaaggaaaggacagtgcagaattaaaccgtgttgaagaccagtggaaattgtataatttaacttggatttaggcaggaagtgaaatatgggaggagtaaagaaaactgaagaatttaaagttttcctgaagacagtaataatgcagacacaaactggtttcatatggtgagagcagccacagcagcagcttgacctggtattctacctgagtagatgaagcagaagatcagcaagtttggcagagttttggtttaagaaaaacaaaccactactacctagcacaagttaaatttacaagtctgctcctcaaaaatgaaaaaatggaggaaagagactataaaaccacttttagcatatgaattgcagttggtacacatgtgtgtgttaataggaaagtctcgaatttgtgttgtttttgagatttgtcatttaaggtaccagtgcacacttgatcatatttcattactatctctaacacagtcctaacatctcaaatttaaagaccagttgaagattaagggatttttatcctttgttgaaagtcatgttgggttatttgaaattcaaattttaattgtgctgcccatatatgaaaatgagactgctgactcgctatctatggacatgcactttatgttggtttcttagtagtaagagtaacttcatgataaccccagtcttcttgcctaatttcttttttgagactagctggggttaggattagaatgactatggagcagatatttgttcttctgggaaaagctttaacaggccaaaatagggattgaacttgtccttggcctttatcaaagcaagctagctacccagacgtagtcaaatactctacaaaataaacaagtctgctttaggaattgtctgggtaccttcactgttaccaacttagctgtaaagattatttcaaagctcactcttccatgatttcttctggctttcaatcctatctaagtatcaaggaaattaacttgtaaatatggtagttgtttactaaggatatgtactgctcttgcaaggaaataatgtccaaacaaagcttcacttattttttttaatataagcagatttcactgtttatggcgcttatgtaatacattttatctttttaaaaatttgtccgtgtaaaagtcaggattcctttatatttgtgagcctccttttctcctttcctaaggatgtaatctacagttttcagatctgcagggtagtcttgattggctaaaaacaaatcaattttcttcttggcataaagtgtttcattattataggggtgttcattttaaatagtttaaaaacaattgcagcacattctaagcataagagaaagttattgacaacaggtaccttcctaatctcccaagacgtacttactcatttgtgaagtattaaagtaagaggtaactcaagcagaatgctggctatgaatgtagatattgaagctattcataaacactggaaatagaattttaagcttttagccttcagtggaatgcacatattggacatgtgcatgtgaacacctttttcagtagcactcacggatttccattcgattgtatagaatgaatacaagtgttttagtggaatttgctacttaatttttaatcttgcgatgtccgtgattattacatgcttactagtgttgtggacattgaagacaaggtcattcgtaggtgtcagattacaatggagaacaaaaatcgttttccccccacccacatccaaacaccattctcgagggagcatttcttgcaaaacaccttacatttcattttctatctttgcactttttcttaagtacagaaaagttgtctttaagacctagtttgaacttcatgcagtaagaggaacaaggataaacaatgttgggagttcacattgttcagagcataaggaaaagtaccaaaacccaaattttcttgaatatttcagatgtttttaaaaactcacttctagtctgaaacatttgaattgttttaactctgagcagctgacaaagttgaggtttttttgttttgttttgttttgttttgtttttttgagacagagtcttacttggttgcccaggatgaagtgcaatggagcgatctcggctcactgcaacctctgcctcctgggttcaagcaattctcctgtctcagcctctcgagtagctgggattacaggcgcatgccaccacacctggctagtttttatatttttagtagagatggggacttcaccgtgttggccaggctggtcttgaactcctgacctcaagtgatgtgcctgcctcggcctccgaaaatgctgggattacaggcgtgagccaccatgtccagccaaagttgaggtttattagtactattagaaacaaaattgagcaagttaagttaaaagtttgctgactttgtatcaacactatagaagatgagccaccttgttaatttggaatatttgctctgaaaagaacatgttagttacaccttaatggtgttaatggaggtggggattgagaaaagtgttcacattagtgttggaatgtaggtaattgtacagtttataagacctttagcaccaggaaataaaatatgtgtgtgtacacacacagtttttaaaaacgattggaattcatccaaaccttaagattaggaaactgattggctgtaagtgttgcctcaagtaatgtgtcccccgccccataacatgtcttttctgtgccaagtatcctctcctagtgtcagtgtctcaaattatatttatgaagggttatcacataatatgctttgtatttaactacctgcttcccaggcgtccatgacatgaaatgggtgaagcatcagccatgactttcggtcagttcccaaaatacccaaatgatagggaggtaaagattgcaaaattcctcttaaaaggccatttttacagcttgctaaaatacagtggcaccttatggttgttaatattttttcttttaaagatggagaatgtttttattcttccccttttctcctttgttcttttgcgaacaaaaaaaattataatctgccttatttgattttttttttaagttttaccttacaggcttccctgtcacatgttttaccatattaagtacatagaagccatgtttgcagggcacttttattctcctagtcttataagactatgctaattgttactttctgaagtattctgtaccttagtatgcaagattgttaaggcacatgttaaagtgtcaggtgtgtttttttccctttaattcttcagtatgtttatattcaataacagtattgtaattcattgagttaactagtaaattgtgtgcttttgaaaaaacatgaaaaatgtaaattgacagcatacttcatttggaaaaaagtaaaagatccgaggaactagtatgtcacttatttatttttattttattttattttttactttttgagacagggtcttgctctgtcacccaggctggagtgcagtggcatggtcacagctcactgcagccttgacttcctgggctcaggtgattctcccacctcagccttccaagtagctgggactacaggcatgcaccacattgcctggctaattttttgtggagatggggtttcgccatgttgtccaggctgttcttgaactcctgggctcaggcaatttgcctgcctcattctcccaaagtgctgggattataggcgtgagccactgcgcccagccttacttatttttaaatcagattttttaatcaactaaaacagctatgagttaagtacctgccctgcaaaaatttttagaaaaagttttaggattatgaaattaagaattattttccttaactggaacagttctaaaatttatctgatacttctctaacaagtgagtgatctcatgtaaccccagtttgtatcttaaaggctgcagcatagaattgagctgtataacagtgttagaactgtcaagtgataatcacagaacagtttgtatcggttttataattctcatgtcttgatcagatctgaaggaaataggcataccctccaacattctaaaaattatttatttttattaggatttgtttattaaagttccacgagctgctttatggtcagttgggctgagtagtagatatcttaaagacatgcagtgaaagtgaaccctgtcatatcatggtgcctctttcaaggttcctctgtaagttcctcatcttgcagaattatttcaataccaaggtatggttgaaccagctgtccagccttaactctatttagtgccccattactaatgttcttttaactggtttgtatgtgttttaactgtccagtgtttggattttacctcttgatagctccatttgtccctggtgctgcttttaaggatgtagggccatgtgatcaggtatcaagttgagtaggtacgcagttggcctggtgatgtatctgtgcctgttttatcttctcccaggaagagctgctttggtatagttgtttacttggattcatacaaagaacagggcagcaatcttggaaagctttctgaagcttataagaacctgaaggggtttggagggggaacagtaacaaaggctgcctttatgtctttggtcacaaagcacatagatgtatgttctgtaaagactaaagtgattgttataccagggcttcctgaccttcgggagagactcaaaaaagcagagaggagcacaaagtgaagttaatttggttggcttgctttatctggtttctcattttctttcaatttaaacctgaacataacacccttctccgatacctatccagcagactcctggttgggaagccctgtattaaattttgagaatgtacacagttttcttttgtacagtgctttacaactgctaaaagttaacttgtttaaagcaaaacaagaccttgaaaggtcaatcatattaaagctggtttgattattaatagttatcttttaggaagaagcttttttccctatgtaagatgtcatactgcagatttaaaatatagactatcaataaaatgcatgaagtgatcatttgtgcttgatcatctctccttgggtttttctttaaaaaggggaatctgctataaaggttctgttgcttcaaaccaatgtcaaatagacttgatttttagagtcatggaattacagtgcaaccttgatttttattcccctcactgctatgagtgtgggcaggtactggtttatatgttataacttccgttttatctgtgttgtgtagttgaatggcttaatcgttgagtggtaaaataaaagattatattccaatacaagaatcctggaaa

SEQ ID NO: 258010 - DNA, 3478 bp, Artificial Sequence
  derived and/or modified sequence
tttcctgtcgctgcttggtaacaatggggaagataatggctgcctgagcaacgtctccgagcaggcgctgggctagaggcgggtctcaaccagctactcattggaggcgggcttgagagcggcggccagggaggtgcggagcagcctcggcggcggcggccgaaccaaccgagtcggatcctgaccctaaaacctaagcagagtgaagaaaactaaaatccagtttattgtatttcaatactatgtcataacagtcaggtattttccacttgttcatcaatatggaaaactcagattccaatgacaaaggaagtggtgatcagtctgcagcacagcgcagaagtcagatggaccgattggatcgagaagaagctttctatcaatttgtaaataacctgagtgaagaagattataggcttatgagagataacaatttgctaggcaccccaggtgaaagtactgaggaagagttgctgagacgactacagcaaattaaagaaggcccaccaccgcaaaactcagatgaaaatagaggaggagactcttcagatgatgtgtctaatggtgactctataatagactggcttaactctgtcagacaaactggaaatacaacaagaagtgggcaaagaggaaaccaatcttggagagcagtgagtcggactaatccaaacagtggtgatttcagattcagtttagagataaatgttaaccgtaataatgggagccaaaattcagagaatgaaaatgagccatctgcaagacgttctagtggagaaaatgtggaaaacaacagccaaaggcaagtggaaaacccacgatctgaatcaacatctgcaaggccatctagatcagaacgaaattcaactgaagcgttaacagaggtcccacctaccagaggtcagaggagggcaagaagcaggagcccagaccatcggagaaccagagcaagagctgaaagaagtaggtcacctctgcatccaatgagtgaaattccacgaagatctcatcatagtatctcatctcagacttttgaacatcctttggtaaatgagacggagggaagttctagaacccggcaccatgtgacattgaggcagcaaatatctgggcctgagttgctaagtagaggtctttttgcagcttctggaacaagaaatgcttctcaaggagcaggttcttcagacacagctgccagtggtgaatctacaggatcaggacagagacctccaaccatagtccttgatcttcaagtaagaagagttcgtcctggagaatatcggcagagagatagcatagccagcagaactcggtctaggtctcagacaccaaacaacactgtcacctatgaaagtgaacgaggaggttttaggcgtacattttcacgttctgagcgggcaggtgtgagaacctatgtcagtaccatcagaattcccattcgtagaatcttaaatactggtttaagtgagactacatctgttgcaattcagaccatgttaaggcagataatgacaggttttggtgagttaagctattttatgtacagtgatagcgactcagagcctactggctcagtctcaaatcgaaatatggaaagggcagagtcacggagtggaagaggaggttctggtggtggtagtagttctggttccagttcgagttccagttccagttcgagttccagttccagttcaagttccagttccagtcctagttccagttccggtggtgaaagttcagaaactagctcagatttatttgaaggcagtaatgaaggaagctcatcatcaggctcatcaggtgccaggcgagagggtcgacatagggccccagtcacatttgatgaaagtggctctttgcccttccttagcctggctcagtttttcctcttaaatgaggatgatgatgaccaacctagaggactcaccaaagaacagattgacaacttggcaatgagaagttttggtgaaaatgatgcattaaaaacctgtagtgtttgcattacagaatatacagaaggcaacaaacttcgtaaactaccttgttcccatgagtaccatgtccactgcatcgatcgctggttatctgagaattctacctgtcctatttgtcgcagagcagtcttagcttctggtaacagagaaagtgttgtgtaattaagatctgaactctcagctatgtagctgatatagtgatgggcaaacaggaatcacttgcttttatgtccactttttgagtggtacttaaatgtaaagtaacaacctgaattgagtcattgctttctgaaggaatcattgtcctttctccagtttttgttccagaataaaaggaaatattttaaaagccacgttataggacctaaaaatctgatttccgtaccagttaaattggtagcatcactgttactgataatttatcatatacacttgtcaatttttcctttgttatcttaaaagatctgccttagcaatggctcctttttcatgttgatctttaaattttcccacaccataagagaggagcaaaggaaattaccagtttagactaagttacagtatgtgtttcataagtgattaaagctatatcattcccagttattagttaacacaaattcagccacattctgagtattgtttgttcacctttcagacttggtgatactggacatgtcagtgtaaataacactaaggttaggatcttctaagtgtataactgtctcctaagcccatcactgtggcacactgtagagtgagcttatagtttaattgagatatttatcttgtggaaatattaaaaagcctatgcttgtgtaagtgaaaaaaaatcacattcatttgtttaaaaatgtaaagctattttgtagaggctcagtacttttccaatgcactgttgtatgaatgcattaaaaattgtaaagtaccatgcttagaactgagaaaactgctttttgtgagccaacatagtaacaaacacaccaaacaaagtacaaagctgcttttgtaagtgtgtagatgtcaagagcagaacatatctataatatttaatgtgtgaacagctactgtgacatgcaaaggaaaggacagtgcagaattaaaccgtgttgaagaccagtggaaattgtataatttaacttggatttaggcaggaagtgaaatatgggaggagtaaagaaaactgaagaatttaaagttttcctgaagacagtaataatgcagacacaaactggtttcatatggtgagagcagccacagcagcagcttgacctggtattctacctgagtagatgaagcagaagatcagcaagtttggcagagttttggtttaagaaaaacaaaccactactacctagcacaagttaaatttacaagtctgctcctcaaaaatgaaaaaatggaggaaagagactataaaaccacttttagcatatgaattgcagttggtacacatgtgtgtgttaataggaaagtctcgaatttgt

SEQ ID NO: 258011 - DNA, 1875 bp, Artificial Sequence
  derived and/or modified sequence
atggagaacagcgacagcaacgacaagggcagcggcgaccagagcgccgcccagagaagaagccagatggacagactggacagagaggaggccttctaccagttcgtgaacaacctgagcgaggaggactacagactgatgagagacaacaacctgctgggcacccccggcgagagcaccgaggaggagctgctgagaagactgcagcagatcaaggagggcccccccccccagaacagcgacgagaacagaggcggcgacagcagcgacgacgtgagcaacggcgacagcatcatcgactggctgaacagcgtgagacagaccggcaacaccaccagaagcggccagagaggcaaccagagctggagagccgtgagcagaaccaaccccaacagcggcgacttcagattcagcctggagatcaacgtgaacagaaacaacggcagccagaacagcgagaacgagaacgagcccagcgccagaagaagcagcggcgagaacgtggagaacaacagccagagacaggtggagaaccccagaagcgagagcaccagcgccagacccagcagaagcgagagaaacagcaccgaggccctgaccgaggtgccccccaccagaggccagagaagagccagaagcagaagccccgaccacagaagaaccagagccagagccgagagaagcagaagccccctgcaccccatgagcgagatccccagaagaagccaccacagcatcagcagccagaccttcgagcaccccctggtgaacgagaccgagggcagcagcagaaccagacaccacgtgaccctgagacagcagatcagcggccccgagctgctgagcagaggcctgttcgccgccagcggcaccagaaacgccagccagggcgccggcagcagcgacaccgccgccagcggcgagagcaccggcagcggccagagaccccccaccatcgtgctggacctgcaggtgagaagagtgagacccggcgagtacagacagagagacagcatcgccagcagaaccagaagcagaagccagacccccaacaacaccgtgacctacgagagcgagagaggcggcttcagaagaaccttcagcagaagcgagagagccggcgtgagaacctacgtgagcaccatcagaatccccatcagaagaatcctgaacaccggcctgagcgagaccaccagcgtggccatccagaccatgctgagacagatcatgaccggcttcggcgagctgagctacttcatgtacagcgacagcgacagcgagcccaccggcagcgtgagcaacagaaacatggagagagccgagagcagaagcggcagaggcggcagcggcggcggcagcagcagcggcagcagcagcagcagcagcagcagcagcagcagcagcagcagcagcagcagcagcagcagccccagcagcagcagcggcggcgagagcagcgagaccagcagcgacctgttcgagggcagcaacgagggcagcagcagcagcggcagcagcggcgccagaagagagggcagacacagagcccccgtgaccttcgacgagagcggcagcctgcccttcctgagcctggcccagttcttcctgctgaacgaggacgacgacgaccagcccagaggcctgaccaaggagcagatcgacaacctggccatgagaagcttcggcgagaacgacgccctgaagacctgcagcgtgtgcatcaccgagtacaccgagggcaacaagctgagaaagctgccctgcagccacgagtaccacgtgcactgcatcgacagatggctgagcgagaacagcacctgccccatctgcagaagagccgtgctggccagcggcaacagagagagcgtggtgtag

SEQ ID NO: 258012 - protein, 1261 aa, Artificial Sequence
  derived and/or modified sequence
MSGSKSVSPPGYAAQKTAAPAPRGGPEHRSAWGEADSRANGYPHAPGGSARGSTKKPGGAVTPQQQQRLASRWRSDDDDDPPLSGDDPLAGGFGFSFRSKSAWQERGGDDCGRGSRRQRRGAASGGSTRAPPAGGGGGSAAAAASAGGTEVRPRSVEVGLEERRGKGRAADELEAGAVEGGEGSGDGGSSADSGSGAGPGAVLSLGACCLALLQIFRSKKFPSDKLERLYQRYFFRLNQSSLTMLMAVLVLVCLVMLAFHAARPPLQLPYLAVLAAAVGVILIMAVLCNRAAFHQDHMGLACYALIAVVLAVQVVGLLLPQPRSASEGIWWTVFFIYTIYTLLPVRMRAAVLSGVLLSALHLAIALRTNAQDQFLLKQLVSNVLIFSCTNIVGVCTHYPAEVSQRQAFQETRECIQARLHSQRENQQQERLLLSVLPRHVAMEMKADINAKQEDMMFHKIYIQKHDNVSILFADIEGFTSLASQCTAQELVMTLNELFARFDKLAAENHCLRIKILGDCYYCVSGLPEARADHAHCCVEMGMDMIEAISLVREVTGVNVNMRVGIHSGRVHCGVLGLRKWQFDVWSNDVTLANHMEAGGKAGRIHITKATLNYLNGDYEVEPGCGGERNAYLKEHSIETFLILRCTQKRKEEKAMIAKMNRQRTNSIGHNPPHWGAERPFYNHLGGNQVSKEMKRMGFEDPKDKNAQESANPEDEVDEFLGRAIDARSIDRLRSEHVRKFLLTFREPDLEKKYSKQVDDRFGAYVACASLVFLFICFVQITIVPHSIFMLSFYLTCSLLLTLVVFVSVIYSCVKLFPSPLQTLSRKIVRSKMNSTLVGVFTITLVFLAAFVNMFTCNSRDLLGCLAQEHNISASQVNACHVAESAVNYSLGDEQGFCGSPWPNCNFPEYFTYSVLLSLLACSVFLQISCIGKLVLMLAIELIYVLIVEVPGVTLFDNADLLVTANAIDFFNNGTSQCPEHATKVALKVVTPIIISVFVLALYLHAQQVESTARLDFLWKLQATEEKEEMEELQAYNRRLLHNILPKDVAAHFLARERRNDELYYQSCECVAVMFASIANFSEFYVELEANNEGVECLRLLNEIIADFDEIISEDRFRQLEKIKTIGSTYMAASGLNDSTYDKVGKTHIKALADFAMKLMDQMKYINEHSFNNFQMKIGLNIGPVVAGVIGARKPQYDIWGNTVNVASRMDSTGVPDRIQVTTDMYQVLAANTYQLECRGVVKVKGKGEMMTYFLNGGPPLS

SEQ ID NO: 258013 - DNA, 3786 bp, Artificial Sequence
  derived and/or modified sequence
atgagcgggtctaagtcggtgagccccccaggctacgctgcgcaaaagacagccgccccggctccacgcggaggtcccgagcatcggtcagcatggggcgaggccgattcgagagcgaacgggtatccccacgctcccggggggtcagccagggggagtactaaaaaacccggcggcgcagttactcctcagcagcagcaacgactggcctcccggtggaggagtgacgatgacgatgatcctccactctccggggacgaccctctcgcaggcgggtttggcttttccttccgtagcaagtctgcgtggcaggaaagaggaggagatgattgtggtcgtggtagtagacgtcaacgccggggcgctgcctccggaggatctacgcgcgcccccccagctggaggcggcggaggatccgccgcagcggccgcctccgctggtggtacggaagtgagaccccgttccgtagaggtcggactcgaagaacggagaggaaagggacgggctgcagatgagctggaagcaggggccgttgagggcggagagggatcaggcgacggcggctcaagcgctgatagcggaagcggcgccggccctggggcagtgctctccctgggagcctgttgtctggcactgctccaaatattccgtagtaagaaattcccctccgacaaactggagagactttatcagaggtacttcttcagactgaatcagtcttctctgaccatgttgatggctgtgctagtgctggtctgtctggtgatgttggccttccatgctgcaagacccccactacagctcccttatctcgctgttctggcagccgcggtgggcgtgatcctcatcatggctgtgctatgcaaccgggccgcattccatcaagaccacatgggcctggcctgctacgccttaatcgcagtggttttggccgtgcaggtcgtcggcctgctgctcccgcaaccccgatccgcttctgaaggaatctggtggacggtgttctttatctacaccatctacacattgctgccagtgaggatgagagctgcggtcttatctggcgtgttactgtcagctttgcaccttgcaatcgcccttagaactaatgcacaggaccagtttctcctgaaacagctggtcagcaacgtgctcatattcagttgcactaacattgttggagtctgcactcactatccagccgaggttagccagcgccaggcctttcaggaaacccgtgagtgcattcaggcgaggttgcactctcagcgtgaaaaccagcaacaggagcggcttctgctcagcgtgctgccaagacatgtagcaatggaaatgaaggctgatattaatgccaagcaggaggacatgatgtttcacaagatatacatccaaaaacatgacaatgtgagtatcctgttcgccgatattgagggattcaccagtttagcatctcagtgtaccgcccaggagctcgtcatgaccctgaacgagttattcgctagattcgacaaactggcggccgagaaccactgcctcagaataaagatactgggggactgctattactgtgtttcagggctcccggaggcacgtgccgatcacgcccactgttgcgtggagatggggatggacatgatagaggccatctccctggtcagggaggtcaccggagtcaatgttaatatgcgggtcgggatccacagcggtcgggtccactgcggagtgttgggcctacgtaaatggcaattcgatgtgtggagcaacgatgtcaccctcgctaatcatatggaggctggagggaaagcggggcgcatacatatcaccaaagcaaccctcaattatctaaatggagattacgaggtggagcctgggtgcggaggagaacgaaacgcctatttaaaagaacactccatcgaaacattcctgattctccgttgtacccagaagagaaaggaggaaaaagccatgattgctaagatgaaccggcagcgtacaaattccatcggtcataaccctcctcactggggagccgaaaggcctttctataaccatctcgggggcaaccaggtcagcaaagaaatgaagcgcatgggttttgaagatccaaaggacaaaaacgcacaggaaagtgccaatcccgaggacgaagtggacgagtttctggggagggccattgacgctcggtccatcgacaggctgagaagtgagcatgtaagaaagttcctgctgacgttccgagaacctgatcttgagaagaaatatagcaagcaggtggatgatcgattcggcgcatacgtagcttgcgcgtctctggtgttccttttcatttgctttgtccagatcacgatcgtgccacacagcatcttcatgcttagcttctacctcacttgctccctccttttgacactggtggtgtttgtctcagtcatatactcatgcgtgaaactcttcccaagtcccctccaaacactcagcaggaaaatcgtgagatcaaaaatgaattctaccctggtgggggtgttcaccataacccttgtgttcttggctgcctttgtcaacatgttcacttgtaatagccgggacctgttagggtgcttagcgcaggaacacaatattagcgcttctcaggtcaatgcatgtcacgtggcagaatctgccgtaaattatagcttaggagacgagcaaggcttctgcggctctccttggcccaactgcaacttccccgaatactttacttacagcgtcctgttgtccttgctggcatgctctgtgttcctacaaatctcgtgcattggtaagctggtactgatgcttgccattgaacttatctacgtcttaatagtcgaggtgccaggcgtcacgttgttcgataatgctgatctactcgtgacagctaatgcaattgacttcttcaacaacgggacaagccagtgccccgaacatgccaccaaggtcgctttaaaggttgtgactcccattattatttcagtgttcgtgttagcgttatacctgcacgcccagcaagttgagagcacagcgaggttggattttttgtggaagctgcaggccacagaggagaaggaagaaatggaggagctgcaggcgtataacagaaggttgctccacaacatcctgcctaaagacgttgcggcccacttccttgcccgtgagcggagaaacgacgaactttactaccagtcttgtgagtgtgtagccgtgatgtttgcatctatagccaacttctccgaattttatgtggagttggaggctaacaatgaaggggtggaatgtctccggctgctgaatgagataatagctgacttcgatgagattattagcgaagaccgcttcaggcaattggagaaaataaaaaccataggatcaacctatatggcggcatctggtctcaatgacagcacttacgacaaagtggggaaaacccacataaaggccctggccgactttgccatgaagttaatggaccagatgaaatacattaacgagcacagctttaataatttccagatgaagataggcctgaatatcggtcccgtcgtcgcaggcgtgatcggcgcacggaagccgcagtacgatatctggggcaacaccgtgaatgttgcgtcaaggatggatagcacaggcgttccagaccggatccaagtcacgaccgacatgtatcaagtgcttgcagctaacacataccagctggaatgtaggggagtcgtcaaagtgaaaggcaagggcgagatgatgacatacttccttaatggtgggcctccccttagttag

SEQ ID NO: 258014 - DNA, 7311 bp, Artificial Sequence
  derived and/or modified sequence
gggcgagaagggaggagcggcgcgagcggccggagcggcgcagggcccgaagcgtgcatggcgcgccctgagccgggctcccgcgggcccccccggagcgcctctcgggcgccgcggctctcaggcgggcccctctgggccggctgcttctgagccccggcgctggatctctggatgccttactccccgggagaagcctgcctgcgtcggggcagaaccgcggcagcgctgcgccggattccgtcctccgcctagtcgttccgcgccggccgcggtgggcccgcagccggcgacgaggagcttggggcttgcgaagcgggcgcgacagctctccgggccggcaggtcccggccggccccgctccgtttgcgggaaagggagaggcgagaggggaagggccgcaccgcaggagccggtccctgacccggaccccgccccctgcgcggacgcgccgaaggctcggctcggctttcgccggggccacgcatccactctcgccgcgagaggtgggggatgcgggcaacggcccccccgggctccaggaccctcccccccggggctccggagctgttgctccgcccgtcgccccctcccccgtcctctccacctcccatcccacctccccacccctcgtaagaaaataatgctggctggcgcccgcacctcccagtcgctcccagtccgctgcgaggaaagcgcacccgcagtgtctcttcgccgggacccccgccgagccgccctcgccgccgccgagccccgagagcagctgggctccgcttaggcggaatcagcgagcgccgcgcccgggcactgccggcccgaggaggcaccgcccgcaaggacaccactccgtcccgtctcgtccgcaactccggccctcgtcgagctcgacgcgagccaggatcccggacgtctctccgcgtgcggcgcagcagcagccagaccagtccctgcgaccccacctcggaggcaactccatttcggacctgggacttctgacgcggatcctcagctacttctcacctcggggctgtgccctcctcctccgctcaggacgggggtgccaagatgccccgctgcagcgcagggccccgggccgcccccgacgtgtgaccctagcctggtccccctgctcggccgtccgccctccccttggagacccccggcccggcttccgggggaggaggaaggagacgacgaggccgagggggggatgtccggctccaaaagcgtgagccccccgggctacgcggcgcagaagactgcggcgccggcgccccggggaggccccgaacaccgctctgcgtggggcgaggccgattcccgcgcgaatggctacccccatgcccccgggggctctgcccgcggctccaccaagaaacccgggggggcggtgaccccgcagcagcagcagcgcctggccagccgctggcgcagcgacgacgacgacgatcctccgctgagcggtgacgaccccctggccgggggcttcggcttcagcttccgctccaagtccgcctggcaggagcgcggcggcgacgactgcggtcgcggcagccgccggcagcggcggggcgcggccagcgggggcagcacccgggcgccccctgcgggcggcggcggcggctcggcggcggcggctgcctcggcgggcgggacggaggtgcgccctcgctcggtggaggtgggtctggaggagcggcggggcaaggggcgcgcggccgacgagctggaggccggcgccgtcgagggcggcgaggggtccggggatggcggcagctcggcggactcgggctcgggcgcggggcccggcgcggtgctgtccctgggcgcctgctgcctggcgttgctgcagatattccgctccaagaagttcccgtcggacaaactggagcggctgtaccagcgctacttcttccgcctgaaccagagcagcctcaccatgctcatggccgtgctggtgctcgtgtgcctggtcatgttggccttccacgcggcgcggcccccgctccagctgccctacctggccgtgctggcggccgccgtcggcgtgatcctcatcatggctgtgctttgcaaccgcgccgccttccaccaggaccacatgggcctggcctgctatgcgctcatcgccgtggtgctggccgtccaggtggtgggcctgctgctgccgcagccacgcagcgcctctgagggcatctggtggaccgtgttcttcatctacaccatctacacgctgctgcccgtgcgcatgcgggccgcagtgctcagcggggtgctcctgtccgccctccacctggccatcgccctgcgcaccaacgcccaggaccagttcctgctgaagcagcttgtctccaatgttctcattttctcctgcaccaacatcgtgggtgtctgcacccactatccggctgaggtctcccagagacaggctttccaggagacccgagagtgcatccaggcgcggctccactcgcagcgggagaaccagcagcaggaacggctcctgctgtctgtccttccccgtcatgttgccatggagatgaaagcagacatcaacgccaagcaggaggatatgatgttccataagatttacatccagaaacatgacaacgtgagcatcctgtttgctgacatcgagggcttcaccagcctggcgtcccagtgcactgcacaggaactggtcatgaccctcaacgagctcttcgcccgctttgacaagctggccgcagagaatcactgtttacgtattaagatccttggggattgttattactgcgtctcggggctgcctgaagcaagggctgaccacgcccactgctgtgtggagatgggcatggacatgatcgaggccatctcgttggtccgggaggtgacaggggtgaacgtgaacatgcgtgtgggaattcacagcgggcgagtacactgcggtgtccttggtctcaggaagtggcagttcgacgtctggtctaacgatgtcacgctagccaaccacatggaggctggcggcaaggcaggacgcatccacatcaccaaggctacactcaactacctgaatggggactacgaggtggagccaggctgtgggggcgagcgcaacgcctacctcaaggagcacagtatcgagaccttcctcatcctgcgctgcacccagaagcggaaagaagagaaggccatgatcgccaagatgaaccgccagagaaccaactccatcgggcacaacccaccacactggggggctgagcgccccttctacaaccacctgggtggcaaccaggtgtccaaggagatgaagcggatgggctttgaagaccccaaggacaagaacgcccaggagagtgcgaaccctgaggatgaagtggatgagtttctgggccgtgccattgacgccaggagcattgataggcttcggtctgagcacgtccgcaagttcctcctgaccttcagggagcctgacttagagaagaagtactccaagcaggtagacgaccgatttggtgcctatgtggcgtgtgcctcgctcgtcttcctcttcatctgctttgtccagatcaccatcgtgccccactccatattcatgctcagcttctacctgacctgttccctgctgctgaccttggtggtgtttgtgtctgtgatctactcctgcgtaaagctcttcccctccccactgcagaccctctccaggaagatcgtgcggtccaagatgaacagcaccctggttggggtgttcaccatcaccctggtgttcctggcggcttttgtcaacatgttcacgtgcaactccagggacctgctgggctgcttggcacaggagcacaacatcagcgcgagccaggtcaacgcgtgtcacgtggcggagtcggccgtcaactacagcctgggcgatgagcagggcttctgtggcagcccctggcccaactgcaacttccccgagtacttcacctacagcgtgctgctcagcctgctggcctgctccgtgttcctgcagatcagctgcatcgggaagctggtgctcatgctggccatcgagctcatctacgtgctcatcgtggaggtgccaggtgtcacgctcttcgacaacgccgacctgctggtcaccgccaacgccatagacttcttcaacaacgggacctcccagtgccctgagcatgcaaccaaggtggcattgaaggtggtgacgcccatcatcatctcagtctttgtgctggccctgtacctgcacgcccagcaggtggagtccactgcccgcctcgacttcctctggaaactgcaggccacagaggagaaagaggagatggaggagctgcaggcctacaaccggcggctgctgcacaacatcctgcccaaggacgtggccgctcacttcctggcccgcgagcggcgcaatgatgagctctactatcagtcctgtgagtgtgtggcggtcatgttcgcctccatcgccaacttctccgagttctacgttgagctggaggccaacaacgagggtgtcgagtgcctgcggctactcaatgagatcatcgctgactttgatgagatcatcagcgaggatcggttccggcagctggagaagatcaagaccatcggcagcacctacatggctgcctccggcctcaacgactctacctacgacaaggtgggcaagacccacatcaaggcactggccgactttgccatgaagctgatggaccagatgaagtacatcaatgagcactccttcaacaacttccagatgaagatcgggctcaacatcggccccgtggtggccggggtgataggggcacgaaagcctcagtacgacatctggggcaataccgtgaacgtggccagccgcatggacagcaccggtgtacccgaccgcatccaggtcaccacagacatgtaccaggtgctggctgccaacacgtaccagctggagtgccggggcgtggtcaaggtcaagggcaaaggcgagatgatgacctacttcctcaatggagggcccccgctcagttagcagctgttggccaatggtgccaggcagcctggcctccagaggcatggaagcagcttctctgtgtgccgggggtggcggggaagccatgctccagcccgcagggctgcgctgctgagattttccacttggactccagagcagcttctgcctttgctggtgggcagcggcctctgtcccaggccccggggtgccagcgtcctgcgagcacccagctgaccaaagatgtttccctctgtagaagactctgctagactgggtctgaagcttgagttttctaacaggtgctgctgcacaggtggaaaggagccgtgggaatgtgtgtgtggcacggcccagacaagggcagggctgaggggcctccgactcagctgggggtagacgggctcgaatgtggcctgggagagcctagggggccccaggggtctgcttttctatgtgagcctttaaacttcagacaggccaccaccctgcacctgcaggggctttggcacaggagtgctggctttggagggactgtggccttcatcgtggtcctctgcccacacctccacgcacacagacagtgccctaggagggaaacagaactaattacgagggggaggcaagaggacgccaagcaaggagtggtgattctgagaaaaatatttattaaataaaacaaaacaagttctccgtgcccttctttagactatgctagttgtatgcgtgtaagagacacacaagcaaacgaggacgccactcggggggagggcggggatccccacttgtcttttttgtattttttattttgtattattgaaagccttggagatctcacagatagatatgccaaattctatattttgtaaattctctatattagaaaacagctgtgcacagcagggcgggtgtgctcatttgtactgtgtgtatgtcggtgtatgtactggtgtatatgtgtgtgtgttcatgctgtggaactggtctcacacaggatgtgtttccctcatttcagatttggcagttttgggttttccaaggtaccaccagagcagtgggtgtgtgcttttggggtaccatatgctcagattaagtaggaggatgcatggacacactgccccatcttttctgacacacgcacacgtatgtacacacatgcacacaccctccttcccctaagcaaaacgcagatggaataagaaaacaaaaagctgctttcccatcccaggccgagctggaaccaagggaagcaatctcatcctgcgacaggcagtgtggtgccctccacaccctgagatttcagacgtttgcggcttacagaggcagcgcccacagattccagagtgcttacagaaggccaggtgctttgcaggctgggacgaggaagccaagcctccctggcctactcagttggccaaggtgcaggtggctcttcctggagatgttcactcagactgggggatgcaatgtgcagccttcaggtttgcggaaagggagtggccttgacctccaccggcaaaccaggcagaggaatgggtagagcccagctttagagtccacagggaaagctagcaggaattttgttttagtgggagggggcagttaaacataccaagaaaaaaatactatttttataacctatgaggaagacatttggaaaatgatactctagcacagaattcagtggaatccttagggcccatgcccaaatctttccattgcttctcaggttagaatgatcttcacctccaacatgagcttggaggtgatgaggcagtggctctgtgccagctgccacaatgtgactttgatgtccacctgtaccacctctcactgggctctagcaccaccctcccctccccgcacaccaactgaacacagctctgagaagcaaagtgtgtggacccaaaactgccaagcctgagtctgtcccgtgcttctgctgctccatcctttgagttctgcattgccatcctgacgtcggccacaggaggcctgctttcttccagctgttgttctcaagttccctgcccctccacatcgcccgccagtggtgttgggttttcgttctgcttccaacctgagtaaagtgtgtgtgctgagttcatcccatgttctcccatggtcatggcttcccggccccatggggacccctctcccatcccagcagtgactggtgacagtgtgcaggtgcagtgctagctcttcgttccctctaaagggtgtgcactctttttattcctactcttgcaaaaacagatacgattatgatttcccatggaaattgaaaagtctatttaaataatttaactattaaacactttcactggtaa

SEQ ID NO: 258015 - DNA, 3786 bp, Artificial Sequence
  derived and/or modified sequence
atgagcggcagcaagtctgtgtccccacctggctatgctgcccagaagacagctgccccagccccccggggcggccctgagcacaggtctgcctggggcgaggccgacagccgggccaacggctacccccacgcccctgggggcagcgcccggggcagcaccaagaagccaggaggagctgtgaccccccagcagcagcagaggctggccagccgctggaggagtgatgatgatgatgatcctcccctgtctggagatgaccccctggccggcggcttcggcttctccttccgcagcaagagcgcctggcaggagagaggaggagatgactgtggccggggcagccggcggcagaggagaggagctgccagcggcggcagcacccgggcccctcctgctgggggcggcggcggcagcgctgctgctgctgccagcgctgggggcacagaggtgcggcccaggtctgtggaggtgggcctggaggagcggcggggcaagggccgggcagcagatgagctggaggccggggctgtggagggcggggagggcagcggagatggcggcagcagcgctgacagcggcagcggggccggccctggagctgtgctgagcctgggcgcctgctgcctggccctgctgcagatcttccgcagcaagaagttccccagcgacaagctggagcggctgtaccagcgctacttcttccggctgaaccagagcagcctgaccatgctgatggctgtgctggtgctggtgtgcctggtgatgctggccttccacgccgcccggccccccctgcagctgccctacctggccgtgctggccgctgctgtgggcgtcatcctgatcatggctgtgctgtgcaacagagctgccttccaccaggaccacatgggcctggcctgctacgccctgattgctgtggtgctggccgtgcaggtggtgggcctgctgctgccccagcccaggtctgccagcgagggcatctggtggacagtgttcttcatctacaccatctacaccctgctgcctgtgaggatgagagctgctgtgctgtctggagtgctgctgagcgccctgcacctggccatcgccctgcggaccaatgcccaggaccagttcctgctgaagcagctggtgtccaatgtgctgatcttcagctgcaccaacatcgtgggcgtgtgcacccactacccagctgaggtgtcccagaggcaggccttccaggagacccgggagtgcatccaggcccggctgcacagccagcgggagaaccagcagcaggagcggctgctgctgtctgtgctgcccaggcatgtggccatggagatgaaggctgacatcaatgccaagcaggaggacatgatgttccacaagatctacatccagaagcatgacaacgtgtccatcctgtttgctgacatcgagggcttcaccagcctggccagccagtgcacagcccaggagctggtgatgaccctgaatgagctgtttgccaggtttgacaagctggccgctgagaaccactgcctgcgcatcaagatcctgggggactgctactactgtgtgtctggcctgcctgaggcccgggctgaccacgcccactgctgcgtggagatgggcatggacatgattgaggccatcagcctggtgcgggaggtgactggagtgaatgtgaacatgagggtgggcatccacagcggccgggtgcactgcggcgtgctgggcctgaggaagtggcagtttgatgtgtggagcaatgatgtgaccctggccaaccacatggaggccggcggcaaggccggccgcatccacatcaccaaggccaccctgaactacctgaatggagactatgaggtggagcccggctgcggcggggagagaaatgcctacctgaaggagcacagcattgagaccttcctgatcctgcgctgcacccagaagaggaaggaggagaaggccatgattgccaagatgaaccggcagaggaccaacagcatcggccacaaccccccccactggggcgctgagcggcccttctacaaccacctgggcggcaaccaggtgtccaaggagatgaagaggatgggctttgaggaccccaaggacaagaatgcccaggagagcgccaacccagaagatgaggtggatgagttcctgggccgggccattgatgcccggagcattgaccggctgcggtctgagcacgtgaggaagttcctgctgaccttccgggagccagacctggagaagaagtacagcaagcaggtggatgacagatttggagcctacgtggcctgtgccagcctggtgttcctgttcatctgctttgtgcagatcaccatcgtgccccacagcatcttcatgctgtccttctacctgacctgcagcctgctgctgaccctggtggtgtttgtgtctgtcatctacagctgtgtgaagctgttccccagccccctgcagaccctgagcaggaagatcgtgcgcagcaagatgaacagcaccctggtgggcgtcttcaccatcaccctggtgttcctggccgcctttgtgaacatgttcacctgcaacagccgggacctgctgggctgcctggcccaggagcacaacatcagcgccagccaggtgaatgcctgccacgtggccgagagcgctgtgaactacagcctgggagatgagcagggcttctgtggcagcccctggcccaactgcaacttccctgagtacttcacctacagcgtgctgctgagcctgctggcctgcagcgtcttcctgcagatcagctgcatcggcaagctggtgctgatgctggccatcgagctgatctacgtgctgattgtggaggtgcctggggtgaccctgtttgacaatgctgacctgctggtgacagccaatgccatcgacttcttcaacaacggcaccagccagtgcccagagcacgccaccaaggtggccctgaaggtggtgacccccatcatcatctctgtgtttgtgctggccctgtacctgcacgcccagcaggtggagagcacagcccggctggacttcctgtggaagctgcaggccacagaggagaaggaggagatggaggagctgcaggcctacaacagaaggctgctgcacaacatcctgcccaaggatgtggccgcccacttcctggcccgggagaggagaaatgatgagctgtactaccagagctgtgaatgtgtggccgtgatgtttgccagcatcgccaacttcagcgagttctacgtggagctggaggccaacaatgaaggagtggagtgcctgcggctgctgaatgagatcatcgctgactttgatgagatcatcagtgaagatcgcttccggcagctggagaagatcaagaccatcggcagcacctacatggccgccagcggcctgaatgacagcacctatgacaaggtgggcaagacccacatcaaggccctggccgactttgccatgaagctgatggaccagatgaagtacatcaatgagcacagcttcaacaacttccagatgaagattggcctgaacatcggccctgtggtggccggcgtgattggagccaggaagccccagtatgacatctggggcaacacagtgaatgtggccagcaggatggacagcactggagtgcctgaccgcatccaggtgaccacagacatgtaccaggtgctggccgccaacacctaccagctggagtgccggggcgtggtgaaggtgaagggcaagggggagatgatgacctacttcctgaatggaggcccccccctgtcctag

SEQ ID NO: 258016 - DNA, 3786 bp, Artificial Sequence
  derived and/or modified sequence
atgagcggcagcaagagcgtgagcccccccggctacgccgcccagaagaccgccgcacccgcgccgcgggggggccccgaacaccggtctgcatggggtgaagctgattcacgagcaaacgggtacccccacgcaccaggtggctccgcccggggctcgacaaagaagccgggtggagccgtgaccccacagcagcagcagaggctcgcaagtcgatggagatccgatgacgatgacgacccaccactgtctggcgacgacccactcgccgggggctttggattctcttttaggagtaagtctgcttggcaggagagaggcggggatgactgcggaaggggctcccgaaggcagcgtaggggagcagcaagcggcggatccaccagggccccacctgccgggggaggcgggggttctgctgccgcagctgcgtctgctggaggaaccgaggttaggccccgctcagtcgaggtcggcttagaagaaaggcggggcaagggacgcgctgcagatgagctggaggccggagcagtagaaggaggtgagggaagcggcgacgggggcagttccgccgatagcggttccggagcgggccccggtgccgtgttgtcgctgggagcatgctgcctggctttactccagatcttcagatcaaagaaatttcccagtgataagctggagagattgtatcaaaggtattttttccgattgaaccagtctagtttgaccatgctcatggccgtgctagtgctcgtgtgcctagtcatgttggcattccacgccgcaaggccgccattacagttgccctacttagccgtgctcgcggcggccgtcggcgtgattctgataatggcagtgctgtgtaatcgagcagccttccaccaagaccatatgggactggcttgctatgctctgatcgctgtggtactggccgtccaggtcgtgggccttctcctgccacagcctaggagcgcttcagagggcatctggtggacagttttctttatctacactatctacaccctgctgccagttaggatgcgggccgcagtgctgtccggtgtgctgctgtccgcactgcacctcgccattgccctcagaactaatgcccaggatcaatttttgttaaagcagttggtttccaacgtactgattttcagctgcaccaatattgtgggggtgtgtactcattacccagctgaggtatcacaacgtcaggccttccaagagacccgagagtgcatccaggctcgattgcactcccagagagagaaccagcaacaggagcggctgttgctcagcgtgctccctcggcatgtggctatggagatgaaagccgacatcaacgccaagcaagaggacatgatgtttcataagatctatatccaaaagcatgataatgtgtcgatcctgttcgctgacattgaaggcttcacatccctcgctagccaatgcacagcccaggagttggtcatgaccctgaacgaactattcgcacggttcgataaacttgccgccgaaaatcattgtttgaggatcaagatcctgggagattgttactactgcgtatctgggcttcccgaggcgcgggccgaccatgcacattgctgcgttgaaatgggaatggatatgattgaggctataagcctggtgcgagaggtgaccggcgtgaacgtcaacatgcgagtggggatccatagtggtcgggtgcattgcggcgtgctgggtttgagaaaatggcagttcgatgtgtggtcaaacgacgtgaccctagccaatcacatggaggctggcggtaaagctgggaggatccacatcaccaaagcgacacttaattacctgaatggggattacgaggtcgaacctggatgtggcggggaacgcaatgcctacctaaaggagcactcaatcgaaacattcctgatcctccgctgtacccagaaaagaaaggaggagaaagccatgatcgcaaaaatgaacagacagcgtactaacagcatcggtcataaccctccgcactggggggctgagcgcccgttctataaccatctgggcggaaatcaagtgtctaaagaaatgaagcgaatgggctttgaggatcccaaggacaaaaatgcccaggagtcagcaaatcccgaagacgaggttgacgagttcttaggaagagccattgacgctagaagcattgaccgcctgaggtctgagcacgtacgcaagttcctcttgacgttcagggagccagatctagagaagaaatattccaaacaagtcgatgatagattcggcgcgtacgtggcctgcgcgtctctggtgttccttttcatttgctttgttcagattaccatcgtaccacattccattttcatgctgtccttctatctgacatgcagtttgctgctgaccctggtcgtctttgtttccgtcatctactcatgcgttaagctatttcctagccccctgcagaccctgtctcgcaagatcgtgcgatcaaagatgaattccaccctggtgggcgtcttcacaattacactggtgttccttgcggcatttgtcaacatgtttacttgcaatagccgcgatcttctggggtgtctggcccaagaacataatatcagcgcctcacaagtcaatgcctgtcatgttgcagagtccgctgttaactacagcctgggcgacgagcagggcttttgtggctctccctggcccaactgcaatttcccagagtacttcacttacagcgtgctgctgtcactactggcgtgcagcgtgttcctgcagattagctgcattggtaaactagtcctgatgttagcaatcgagctgatctacgtgcttatcgtggaggtcccgggcgtgacattgttcgataatgccgacctgctggtgacggctaacgcgatagatttttttaacaatggaacatcccaatgcccagagcatgcaactaaagtggcactaaaagtggtgacgccaattattataagcgtgttcgtgctggcgttatatctgcatgcccaacaggtggagtctactgcgcgcctggattttctgtggaagttacaggcgacagaagaaaaggaagagatggaagagctgcaggcttataataggaggctgctgcacaacatattgccaaaggacgttgccgcccactttctggcccgcgagcgccggaacgacgagctatattaccagtcctgcgagtgtgtagcagttatgttcgccagtattgccaatttcagtgaattctacgtggagttggaggccaataatgagggtgtggaatgcctgagactcctaaacgagatcatcgcagactttgacgaaattatttcggaggaccggttccggcaacttgaaaagatcaagacgataggatcgacctacatggctgctagcggtctgaacgacagcacatatgataaggtcgggaaaacacacattaaagctctagctgatttcgccatgaagctgatggatcagatgaagtacattaacgaacacagcttcaataactttcagatgaaaattggcctgaatatcggccccgtcgtggccggtgtgattggggctcggaagcctcaatatgacatttggggaaacaccgttaacgtggcttctcgcatggattccactggggtccctgataggattcaggtgacaacagatatgtaccaggtactggccgcaaatacctaccaattagagtgtaggggagtcgtaaaggttaaaggaaagggcgaaatgatgacctattttctgaacggaggtccccccctgtcctag

SEQ ID NO: 258017 - DNA, 3786 bp, Artificial Sequence
  derived and/or modified sequence
atgagcggtagcaagtccgtgtccccaccagggtacgcggctcagaagacagcagctcctgctcctagaggcggtcctgagcaccgcagcgcttggggggaggctgactcacgcgcaaatggatacccccatgcccctgggggaagcgcgcgtgggtcaactaagaagccagggggagcggtgactccacagcagcaacagcggcttgcaagtcggtggagatctgacgacgacgatgacccaccattgtcgggcgacgacccgttggccggaggatttggtttttccttccggagcaagagcgcgtggcaggaacggggtggggatgactgcggtagaggctctagacgacagagacggggtgcggcatctgggggaagcacacgagctccacccgctgggggagggggaggtagtgcagcagcggcagcttccgccggtggcacagaagtgagacccaggagtgttgaagtgggcctcgaagaacggagaggaaaggggagggcagctgatgagcttgaagcgggagctgtggagggcggagagggatccggagatggcggtagtagcgctgattcagggagcggcgctggcccaggtgcagtgctctctctgggcgcatgctgcctggctctgttgcagatcttcaggagcaaaaaattcccaagcgacaagctggagaggctgtaccagaggtacttcttcagactcaatcaatcatcactaaccatgctgatggcagtgttggtactcgtttgcctagtcatgctggcgtttcacgccgcaaggccgcctttacagttgccttacctcgctgtcttggcagcagccgtcggagtcatactcatcatggctgttctgtgcaatcgtgctgccttccatcaggatcacatgggccttgcttgttacgcactgatcgcagtggtcttagccgtgcaagtagttggcctgcttttaccacagcctcgctccgcctccgagggcatctggtggaccgttttcttcatatatacaatctatacactgctccccgtgagaatgcgggctgcggttttgagcggagtcctgctatcagctctccacttagctatcgctctacggactaatgctcaggatcagtttttactgaaacagctggtcagcaacgtgctgatattttcctgcacaaatattgtcggtgtctgtacccactacccagcagaagtcagtcaacgccaggcttttcaggagacaagggagtgtattcaggcacggctgcacagccaacgggagaaccagcagcaggaacgccttctccttagtgttcttccaagacacgttgccatggagatgaaagccgacattaacgccaagcaggaagacatgatgttccataaaatttacattcagaagcacgacaatgtctctatcctattcgcggacattgaaggttttactagcctggccagccagtgcactgcccaggaactggttatgactctcaacgagctgtttgcaaggttcgacaaactcgccgctgagaaccactgtctgcggattaaaatactaggagactgttactattgtgtgtccggactccctgaggcgcgagctgatcacgcacattgctgtgttgagatgggcatggatatgatcgaggccataagcctcgtgagagaagtcaccggggttaacgtgaatatgcgagtgggaatccatagcgggagagttcactgcggagttcttgggcttcggaaatggcagttcgacgtgtggtctaatgacgtgacactggcgaaccacatggaagcgggtggaaaggccggacggattcatattacaaaagcgaccctgaactacctgaatggagattacgaggtcgaaccgggatgcggaggggaaaggaatgcatatctcaaagagcattccatcgagacattcctcattctgcgctgtacccaaaaacggaaggaggagaaagccatgatcgcaaaaatgaaccgacaaaggaccaactccataggccacaaccctcctcattggggtgccgaaaggccattttacaaccatcttggcggtaatcaggtgtccaaagagatgaaaagaatgggatttgaggacccaaaagataaaaacgctcaggagtctgctaatcccgaggatgaggtcgacgagttcctgggacgagccattgatgctcgttccatcgaccgccttagatctgagcacgtgagaaaattcctgctcacctttagagaacctgatctcgagaagaagtattcaaaacaggtggacgaccgcttcggcgcttatgttgcctgtgcctccctggtattcttgttcatttgctttgtacagatcacgatcgtacctcattctatattcatgctgagcttttatctgacttgcagtcttctgctgaccttagtggtctttgttagcgtgatttacagctgtgtcaaactcttcccttcgccgctccaaacgctgagtaggaagatcgttcgatctaagatgaatagcactctggtgggagtgtttaccatcacactggtgttccttgcagcatttgttaatatgttcacctgtaacagccgtgatctactgggttgtctggcacaggaacacaatatcagtgccagtcaggtgaacgcctgccatgttgctgagtctgcagttaattactcgttaggagacgaacaggggttctgtggctccccttggcctaattgtaactttcctgagtattttacatactcggtgctgcttagcctgttggcttgtagcgtgtttctgcaaattagttgcataggcaagcttgttctgatgcttgccattgagctgatctacgtcttgattgtggaggtacccggtgttactctgtttgacaacgccgatctgctggttaccgcaaacgctatagactttttcaacaatggcacctcccagtgtcccgaacatgctactaaggtagcactgaaggtggtcaccccaattattatctccgtgttcgttttagccctctacctgcatgcccagcaggtggagagtactgcccgactagattttttgtggaagctacaggctaccgaagagaaggaggagatggaggagttacaggcatacaaccgcaggctgcttcacaacatcctccctaaggatgtggccgctcattttctcgcaagagagcgccgaaatgatgagctctactatcagagctgtgagtgcgtggcagtgatgttcgcctccatcgccaacttcagcgaattctacgttgaactggaagcaaataatgagggggtggaatgccttagattgcttaacgaaatcattgccgacttcgacgagatcatatctgaggaccgcttcagacagctggagaagattaagacaataggcagtacctatatggctgcctcaggtttgaatgacagtacgtacgataaagtgggcaaaactcacataaaggcactcgccgattttgctatgaaactaatggaccagatgaagtacatcaatgaacacagctttaacaactttcaaatgaaaattggcctgaatatcggccctgtggtggcaggagtgataggcgctaggaaaccacagtacgacatttgggggaatactgtgaacgtcgcatcaagaatggactccactggtgtgcccgatcgcatccaggttaccacagacatgtaccaggtgctcgcagccaacacctaccagttggagtgtaggggagtcgtaaaggtaaagggtaagggggaaatgatgacttattttctcaatgggggtccacctttgtcttag

SEQ ID NO: 258018 - DNA, 3786 bp, Artificial Sequence
  derived and/or modified sequence
atgagcggcagcaagagcgtgagcccccccggctacgccgcccagaagaccgccgcccccgcccccagaggcggccccgagcacagaagcgcctggggcgaggccgacagcagagccaacggctacccccacgcccccggcggcagcgccagaggcagcaccaagaagcccggcggcgccgtgaccccccagcagcagcagagactggccagcagatggagaagcgacgacgacgacgacccccccctgagcggcgacgaccccctggccggcggcttcggcttcagcttcagaagcaagagcgcctggcaggagagaggcggcgacgactgcggcagaggcagcagaagacagagaagaggcgccgccagcggcggcagcaccagagccccccccgccggcggcggcggcggcagcgccgccgccgccgccagcgccggcggcaccgaggtgagacccagaagcgtggaggtgggcctggaggagagaagaggcaagggcagagccgccgacgagctggaggccggcgccgtggagggcggcgagggcagcggcgacggcggcagcagcgccgacagcggcagcggcgccggccccggcgccgtgctgagcctgggcgcctgctgcctggccctgctgcagatcttcagaagcaagaagttccccagcgacaagctggagagactgtaccagagatacttcttcagactgaaccagagcagcctgaccatgctgatggccgtgctggtgctggtgtgcctggtgatgctggccttccacgccgccagaccccccctgcagctgccctacctggccgtgctggccgccgccgtgggcgtgatcctgatcatggccgtgctgtgcaacagagccgccttccaccaggaccacatgggcctggcctgctacgccctgatcgccgtggtgctggccgtgcaggtggtgggcctgctgctgccccagcccagaagcgccagcgagggcatctggtggaccgtgttcttcatctacaccatctacaccctgctgcccgtgagaatgagagccgccgtgctgagcggcgtgctgctgagcgccctgcacctggccatcgccctgagaaccaacgcccaggaccagttcctgctgaagcagctggtgagcaacgtgctgatcttcagctgcaccaacatcgtgggcgtgtgcacccactaccccgccgaggtgagccagagacaggccttccaggagaccagagagtgcatccaggccagactgcacagccagagagagaaccagcagcaggagagactgctgctgagcgtgctgcccagacacgtggccatggagatgaaggccgacatcaacgccaagcaggaggacatgatgttccacaagatctacatccagaagcacgacaacgtgagcatcctgttcgccgacatcgagggcttcaccagcctggccagccagtgcaccgcccaggagctggtgatgaccctgaacgagctgttcgccagattcgacaagctggccgccgagaaccactgcctgagaatcaagatcctgggcgactgctactactgcgtgagcggcctgcccgaggccagagccgaccacgcccactgctgcgtggagatgggcatggacatgatcgaggccatcagcctggtgagagaggtgaccggcgtgaacgtgaacatgagagtgggcatccacagcggcagagtgcactgcggcgtgctgggcctgagaaagtggcagttcgacgtgtggagcaacgacgtgaccctggccaaccacatggaggccggcggcaaggccggcagaatccacatcaccaaggccaccctgaactacctgaacggcgactacgaggtggagcccggctgcggcggcgagagaaacgcctacctgaaggagcacagcatcgagaccttcctgatcctgagatgcacccagaagagaaaggaggagaaggccatgatcgccaagatgaacagacagagaaccaacagcatcggccacaaccccccccactggggcgccgagagacccttctacaaccacctgggcggcaaccaggtgagcaaggagatgaagagaatgggcttcgaggaccccaaggacaagaacgcccaggagagcgccaaccccgaggacgaggtggacgagttcctgggcagagccatcgacgccagaagcatcgacagactgagaagcgagcacgtgagaaagttcctgctgaccttcagagagcccgacctggagaagaagtacagcaagcaggtggacgacagattcggcgcctacgtggcctgcgccagcctggtgttcctgttcatctgcttcgtgcagatcaccatcgtgccccacagcatcttcatgctgagcttctacctgacctgcagcctgctgctgaccctggtggtgttcgtgagcgtgatctacagctgcgtgaagctgttccccagccccctgcagaccctgagcagaaagatcgtgagaagcaagatgaacagcaccctggtgggcgtgttcaccatcaccctggtgttcctggccgccttcgtgaacatgttcacctgcaacagcagagacctgctgggctgcctggcccaggagcacaacatcagcgccagccaggtgaacgcctgccacgtggccgagagcgccgtgaactacagcctgggcgacgagcagggcttctgcggcagcccctggcccaactgcaacttccccgagtacttcacctacagcgtgctgctgagcctgctggcctgcagcgtgttcctgcagatcagctgcatcggcaagctggtgctgatgctggccatcgagctgatctacgtgctgatcgtggaggtgcccggcgtgaccctgttcgacaacgccgacctgctggtgaccgccaacgccatcgacttcttcaacaacggcaccagccagtgccccgagcacgccaccaaggtggccctgaaggtggtgacccccatcatcatcagcgtgttcgtgctggccctgtacctgcacgcccagcaggtggagagcaccgccagactggacttcctgtggaagctgcaggccaccgaggagaaggaggagatggaggagctgcaggcctacaacagaagactgctgcacaacatcctgcccaaggacgtggccgcccacttcctggccagagagagaagaaacgacgagctgtactaccagagctgcgagtgcgtggccgtgatgttcgccagcatcgccaacttcagcgagttctacgtggagctggaggccaacaacgagggcgtggagtgcctgagactgctgaacgagatcatcgccgacttcgacgagatcatcagcgaggacagattcagacagctggagaagatcaagaccatcggcagcacctacatggccgccagcggcctgaacgacagcacctacgacaaggtgggcaagacccacatcaaggccctggccgacttcgccatgaagctgatggaccagatgaagtacatcaacgagcacagcttcaacaacttccagatgaagatcggcctgaacatcggccccgtggtggccggcgtgatcggcgccagaaagccccagtacgacatctggggcaacaccgtgaacgtggccagcagaatggacagcaccggcgtgcccgacagaatccaggtgaccaccgacatgtaccaggtgctggccgccaacacctaccagctggagtgcagaggcgtggtgaaggtgaagggcaagggcgagatgatgacctacttcctgaacggcggcccccccctgagctag

SEQ ID NO: 258019 - protein, 609 aa, Artificial Sequence
  derived and/or modified sequence
MIEESGNKRKTMAEKRQLFIEMRAQNFDVIRLSTYRTACKLRFVQKRCNLHLVDIWNMIEAFRDNGLNTLDHTTEISVSRLETVISSIYYQLNKRLPSTHQISVEQSISLLLNFMIAAYDSEGRGKLTVFSVKAMLATMCGGKMLDKLRYVFSQMSDSNGLMIFSKFDQFLKEVLKLPTAVFEGPSFGYTEHSVRTCFPQQRKIMLNMFLDTMMADPPPQCLVWLPLMHRLAHVENVFHPVECSYCRCESMMGFRYRCQQCHNYQLCQNCFWRGHAGGPHSNQHQMKEHSSWKSPAKKLSHAISKSLGCVPTREPPHPVFPEQPEKPLDLAHIVPPRPLTNMNDTMVSHMSSGVPTPTKRLQYSQDIPSHLADEHALIASYVARLQHCARVLDSPSRLDEEHRLIARYAARLAAEAGNVTRPPTDLSFNFDANKQQRQLIAELENKNREILQEIQRLRLEHEQASQPTPEKAQQNPTLLAELRLLRQRKDELEQRMSALQESRRELMVQLEELMKLLKEEEQKQAAQATGSPHTSPTHGGGRPMPMPVRSTSAGSTPTHCPQDSLSGVGGDVQEAFAQGTRRNLRNDLLVAADSITNTMSSLVKELHSG

SEQ ID NO: 258020 - DNA, 1830 bp, Artificial Sequence
  derived and/or modified sequence
atgatagaggagagtggcaataagcgtaaaaccatggcagaaaagcggcaactgttcattgaaatgagagcgcagaacttcgatgttattaggctgtcgacttatcgcactgcgtgtaagctccgtttcgttcaaaagaggtgcaacttgcatctggtggacatctggaatatgatcgaagcattcagagacaatggattgaacaccctcgaccacacgacagagatctccgtgagcagactcgaaacagtgattagctcaatttattaccagctgaacaaacggctgcctagcactcatcaaataagtgtcgaacagtcaatcagcttgctgttgaattttatgatcgctgcttacgatagcgaaggacgcggtaaactgacagtgttttcagttaaggccatgttggccacaatgtgtggtggaaaaatgttggacaagctaagatatgtgttctctcagatgtctgactccaacggactcatgattttctccaaattcgaccagttccttaaagaagtactaaagcttccgactgcagtctttgaaggaccctcatttgggtacacagagcatagcgttcgcacttgctttcctcagcagaggaaaattatgctgaatatgttcctggatacgatgatggcagatcccccaccacagtgtttggtctggttacccctcatgcatcgccttgcacacgttgagaatgtgttccaccccgttgaatgcagttactgccgttgtgagagtatgatggggttcaggtaccggtgccagcagtgtcacaattatcaactctgtcaaaactgcttctggcgggggcacgctggaggcccgcactccaaccagcaccaaatgaaggagcattcttcttggaaaagcccagccaagaaactaagccatgccatcagtaaatcactcggttgtgtgccgactcgagagccacctcaccctgtgttccctgagcagcctgaaaaacccttggacctggctcatatcgtgcctcctagacctctgactaacatgaatgatacgatggtgtcccatatgagcagcggagtgcccacccctaccaaacgtctccaatactctcaggatatccccagccacctcgctgatgaacacgccttgatcgcaagctacgtcgcgcgattgcagcactgcgcacgtgtgctcgatagtccctcgcggctagacgaggaacaccgattgattgcacggtacgccgcgaggttggcagcagaggctggaaatgtcacgagacctcccacggacctgtctttcaactttgacgcgaacaagcagcagcggcagttgatcgctgagctggaaaataaaaacagagagatactgcaggaaatccagaggctacgtctagagcatgagcaggctagccagcctactcctgagaaagctcaacagaaccctaccctccttgcagaattgcgcctgctcagacaacggaaggacgaactcgagcagcgcatgagtgccctacaagaaagtcgtagggagctgatggtgcagctggaagaactaatgaagttgttgaaagaggaagagcaaaagcaggctgcacaggccaccggatctcctcatactagccccacccacggcggtggacggccaatgccaatgccagtccggtccacctcagccggttccacaccaacccactgtccacaggactccctcagcggcgttggcggcgacgtccaggaagccttcgctcaggggacccggcgcaacctgaggaacgacttgcttgtggcggccgactctataacaaatacaatgagctcgcttgtcaaggaattgcattccgggtag

SEQ ID NO: 258021 - DNA, 1830 bp, Artificial Sequence
  derived and/or modified sequence
atgattgaggagagcggcaacaagaggaagaccatggccgagaagaggcagctgttcatcgagatgagggcccagaactttgatgtgatccggctgagcacctacagaacagcctgcaagctgcgctttgtgcagaagcgctgcaacctgcacctggtggacatctggaacatgattgaggccttccgggacaatggcctgaacaccctggaccacaccacagagatctctgtgtcccggctggagaccgtcatcagcagcatctactaccagctgaacaagaggctgcccagcacccaccagatctctgtggagcagagcatcagcctgctgctgaacttcatgattgctgcctatgattctgagggccggggcaagctgaccgtcttctctgtgaaggccatgctggccaccatgtgtggcggcaagatgctggacaagctgcgctacgtgttcagccagatgtctgacagcaatggcctgatgatcttcagcaagtttgaccagttcctgaaggaggtgctgaagctgcccacagctgtgtttgagggccccagctttggctacacagagcacagcgtgaggacctgcttcccccagcagaggaagatcatgctgaacatgttcctggacaccatgatggctgaccccccaccccagtgcctggtgtggctgcccctgatgcaccggctggcccacgtggagaatgtgttccaccctgtggagtgcagctactgccgctgtgagagcatgatgggcttccgctaccgctgccagcagtgccacaactaccagctgtgccagaactgcttctggaggggccacgccggcggcccccacagcaaccagcaccagatgaaggagcacagctcctggaagagccctgccaagaagctgagccacgccatcagcaagagcctgggctgtgtgcccacccgggagcccccccaccctgtgtttcctgagcagcctgagaagcccctggacctggcccacatcgtgcccccccggcccctgaccaacatgaatgacaccatggtgagccacatgagcagcggcgtgcccacccccaccaagaggctgcagtacagccaggacatccccagccacctggctgatgaacatgccctgattgccagctatgtggcccggctgcagcactgtgcccgggtgctggacagccccagccggctggatgaggagcaccggctgattgcccgctatgctgcccggctggccgctgaggccggaaatgtgacccggcccccaacagacctgtccttcaactttgatgccaacaagcagcagaggcagctgattgctgagctggagaacaagaaccgggagatcctgcaggagatccagaggctgcggctggagcacgagcaggccagccagcccaccccagagaaggcccagcagaaccccaccctgctggccgagctgcggctgctgcggcagaggaaggatgagctggagcagaggatgtctgccctgcaggagagcagaagagagctgatggtgcagctggaggagctgatgaagctgctgaaggaggaggagcagaagcaggccgcccaggccaccggcagcccccacaccagccccacccacggcggcggccggcccatgcccatgcctgtgcgcagcaccagcgctggcagcacccccacccactgcccccaggacagcctgagcggcgtgggcggagatgtgcaggaggcctttgcccagggcaccaggaggaacctgagaaatgacctgctggtggccgctgacagcatcaccaacaccatgagcagcctggtgaaggagctgcacagcggctag

SEQ ID NO: 258022 - DNA, 1830 bp, Artificial Sequence
  derived and/or modified sequence
atgatcgaggagagcggcaacaagcggaagaccatggccgagaagcggcagttgttcatcgagatgcgagcccagaatttcgatgtgatccgcttgtcaacttaccgcactgcctgtaagctgaggttcgtgcaaaagcggtgcaatttgcatcttgtcgatatctggaacatgatcgaggccttccgggataacggtctgaacacactagaccacactacggagataagcgtttcaagactggagaccgtaatcagttccatttactaccagctgaacaagcggctgccgtcaacccatcagatttctgtcgaacagtcaatatcactgcttctcaatttcatgatagccgcttatgactcagagggccgcgggaaactcaccgtcttctctgtgaaagctatgttagccaccatgtgtgggggtaaaatgcttgataagctgcgctacgtattcagccaaatgtctgacagtaacgggctgatgattttttctaagttcgatcaattcctgaaggaggttctgaaactgccaacggccgtgtttgagggcccttctttcggttatacagaacatagcgtgcggacttgtttcccacaacagcggaagataatgctcaatatgttcttggataccatgatggcagatcccccaccacagtgtcttgtgtggctccccctcatgcatcgcctggcccacgtggagaacgtcttccatcctgtggaatgtagttactgtcggtgcgagtcaatgatggggttccgctataggtgccagcagtgtcacaattaccagctctgtcagaactgtttctggaggggccatgcaggagggcctcatagcaatcagcatcagatgaaggagcacagctcttggaagtcaccagccaagaaactcagtcatgccattagcaaatccctaggttgtgtgccaacgagagaaccacctcatccagtgttcccagagcaacctgaaaaaccactggatctggcccacattgtcccccctaggccactcactaatatgaacgataccatggtgtctcacatgtcttccggcgtgcccactccgactaaacgcctccaatacagccaagacattcccagccacctggcggacgagcatgccctcattgcgtcttacgtagcaagactacagcattgtgcccgagtgttggactcacctagtcgactggatgaggaacatcgcctgatcgcaaggtatgcagctcggttggcggccgaggcaggaaacgttactagaccgccgaccgacctgtcttttaacttcgatgcgaataagcagcagaggcaactcattgcggaactggaaaataagaatcgcgaaatcttacaggaaatccaacgccttagattagagcacgagcaagcctctcagcctacaccagaaaaggcccaacagaatcccaccctcttagctgagctcagactgctccgccagcgtaaggacgaacttgaacagaggatgagcgcacttcaagagagccgacgtgagctcatggtgcagttggaggagctgatgaaactgcttaaggaggaggagcagaagcaggcggcccaggcgacaggcagtccacacacgagccccacgcatggcgggggacgacctatgcctatgccagtgcgcagtacctcggcgggatccacccccacccactgcccccaggactcactcagcggcgtgggaggtgacgtgcaggaggcgttcgcccagggcacacgtcggaatctgcggaatgacctgctagtggctgctgatagcataacgaatacgatgagttcccttgtaaaggagctccactcgggatag

SEQ ID NO: 258023 - DNA, 1830 bp, Artificial Sequence
  derived and/or modified sequence
atgatagaagagagtggtaacaaaagaaagacaatggcagaaaaacgacagctcttcatcgagatgagagcacagaatttcgatgtcatcaggctctccacataccgtacagcatgtaaactccggttcgtgcagaaaaggtgcaacctccacctagtagacatttggaacatgatcgaagcttttagggataacggactgaacactctggatcataccaccgagataagcgtgtcaaggctagaaactgtaattagcagtatttattatcagctcaataagaggctgccctccacgcatcagatctcagtagagcagagtatctccttgcttctcaatttcatgattgccgcttatgactcggagggcagggggaaactgaccgtgttcagcgtgaaagctatgctggccaccatgtgtggcggaaagatgttagataagctgagatatgtgttctcgcagatgagcgattctaatgggctaatgatattttccaaatttgaccagtttcttaaggaggtattaaaactgcccaccgccgtgttcgagggaccctcatttggctatacagagcattcggtccgaacctgctttccccagcaaaggaaaattatgctcaatatgttcctagacaccatgatggccgatcctccccctcaatgccttgtctggctacccctcatgcacaggcttgctcacgtggaaaatgttttccaccctgttgaatgctcttactgccgatgcgaaagcatgatgggattccgctataggtgtcagcagtgtcataactatcagctgtgtcaaaactgcttctggcggggacacgcaggcggtccacactccaaccagcaccagatgaaagaacattccagctggaagtctcctgcaaagaaactgtctcatgctatcagcaaaagcttgggctgcgtccctactagggagcctccacaccctgtgtttcccgaacagccggaaaaacctctagatctggctcacattgtacccccacgtccactgactaatatgaacgacaccatggtgtcccatatgtcgtctggggtgcccactcccaccaaacgactccagtactctcaggacattccttcccacctagcggacgaacacgcactgatcgctagttatgtcgcaaggttacagcactgtgctagggtcctggactccccctctcgtctcgatgaggaacataggctcatcgctcgttacgccgctcggctagcagccgaggcaggtaatgtgacacggccacctacggacctttctttcaatttcgatgcaaataaacagcagagacagctcatcgcggagctggaaaataagaacagggagatcctacaagagatacagagactgaggctggagcacgaacaggcttcccagccaaccccagaaaaggctcagcagaatccaacgctgcttgccgagcttcgcctgttgcggcagaggaaagacgaactggaacagcgaatgtctgccctgcaagaatccagacgggaactgatggttcagctggaagaacttatgaaattgctcaaggaagaagaacaaaagcaagccgctcaggcgaccgggagcccacacacttccccaacccacggcggtggtcgacctatgcccatgccagttaggtcaacctccgcgggttccacccccacccactgtcctcaggactccttatcaggtgtgggcggtgacgttcaggaggccttcgcccaggggacgcgacgcaatcttaggaatgacctgctggttgcagctgatagcattaccaacacgatgtccagcctggtgaaagagcttcactctgggtag

SEQ ID NO: 258024 - DNA, 1830 bp, Artificial Sequence
  derived and/or modified sequence
atgatcgaggagagcggcaacaagagaaagaccatggccgagaagagacagctgttcatcgagatgagagcccagaacttcgacgtgatcagactgagcacctacagaaccgcctgcaagctgagattcgtgcagaagagatgcaacctgcacctggtggacatctggaacatgatcgaggccttcagagacaacggcctgaacaccctggaccacaccaccgagatcagcgtgagcagactggagaccgtgatcagcagcatctactaccagctgaacaagagactgcccagcacccaccagatcagcgtggagcagagcatcagcctgctgctgaacttcatgatcgccgcctacgacagcgagggcagaggcaagctgaccgtgttcagcgtgaaggccatgctggccaccatgtgcggcggcaagatgctggacaagctgagatacgtgttcagccagatgagcgacagcaacggcctgatgatcttcagcaagttcgaccagttcctgaaggaggtgctgaagctgcccaccgccgtgttcgagggccccagcttcggctacaccgagcacagcgtgagaacctgcttcccccagcagagaaagatcatgctgaacatgttcctggacaccatgatggccgacccccccccccagtgcctggtgtggctgcccctgatgcacagactggcccacgtggagaacgtgttccaccccgtggagtgcagctactgcagatgcgagagcatgatgggcttcagatacagatgccagcagtgccacaactaccagctgtgccagaactgcttctggagaggccacgccggcggcccccacagcaaccagcaccagatgaaggagcacagcagctggaagagccccgccaagaagctgagccacgccatcagcaagagcctgggctgcgtgcccaccagagagcccccccaccccgtgttccccgagcagcccgagaagcccctggacctggcccacatcgtgccccccagacccctgaccaacatgaacgacaccatggtgagccacatgagcagcggcgtgcccacccccaccaagagactgcagtacagccaggacatccccagccacctggccgacgagcacgccctgatcgccagctacgtggccagactgcagcactgcgccagagtgctggacagccccagcagactggacgaggagcacagactgatcgccagatacgccgccagactggccgccgaggccggcaacgtgaccagaccccccaccgacctgagcttcaacttcgacgccaacaagcagcagagacagctgatcgccgagctggagaacaagaacagagagatcctgcaggagatccagagactgagactggagcacgagcaggccagccagcccacccccgagaaggcccagcagaaccccaccctgctggccgagctgagactgctgagacagagaaaggacgagctggagcagagaatgagcgccctgcaggagagcagaagagagctgatggtgcagctggaggagctgatgaagctgctgaaggaggaggagcagaagcaggccgcccaggccaccggcagcccccacaccagccccacccacggcggcggcagacccatgcccatgcccgtgagaagcaccagcgccggcagcacccccacccactgcccccaggacagcctgagcggcgtgggcggcgacgtgcaggaggccttcgcccagggcaccagaagaaacctgagaaacgacctgctggtggccgccgacagcatcaccaacaccatgagcagcctggtgaaggagctgcacagcggctag

SEQ ID NO: 258025 - DNA, 2420 bp, Artificial Sequence
  derived and/or modified sequence
gggcgcgcgcccgcccatccgccctccgccctccgccctcgcgccctcgcgccgggggcgggcgctgcgcgtgccgggcggagaagcggcgcgagccgggcgctgcgaacgttcgccgcgggggtggctccggggcctgagtaggcgctgccgctgcctcagccgagggggctgggccggagcgtgcggaggagtgaggccgcaggagaccttcccgacgacccctgctccggcggggaagtgagcaaggatgattgaggaaagtgggaacaagcggaagaccatggcagagaagaggcagctgttcatagaaatgcgtgctcagaattttgatgtcatacgactatcaacttacagaacagcctgcaaattacgatttgtacaaaaacgatgcaaccttcatcttgttgatatctggaacatgattgaagccttccgagacaatggccttaatacactggaccataccaccgagatcagtgtgtcccgcctcgaaactgtcatctcctccatctactatcagttgaacaagcgccttccttctactcaccaaattagtgtggaacaatctatcagcctcctcctcaactttatgattgctgcatatgacagtgagggccgaggcaagttgacggtattttcagttaaagctatgttagcaaccatgtgtggtggaaaaatgctggacaaattgagatatgttttctcccagatgtcagattccaatggcttaatgatatttagcaagtttgaccagtttctgaaggaagttctgaagctcccaacagctgtctttgaagggccatcttttggttacacagagcactcagtccgcacctgttttccacagcagagaaagataatgctaaatatgtttttagacacaatgatggctgaccctcctccccagtgccttgtctggctacctctcatgcacaggcttgcccatgttgagaatgtcttccatcccgtggagtgctcctactgccgatgtgagagtatgatgggtttccggtaccgatgccagcagtgccacaactatcagctctgccagaattgcttttggcgtggccatgccggcggccctcacagcaaccagcaccagatgaaggagcattcctcttggaaatctcctgcaaagaagctgagccatgcaattagtaaatctttggggtgtgtacccacgagagaacccccgcatcctgtttttcctgagcaaccagagaaaccacttgaccttgcacatatagttcctcctcgccctctgactaatatgaatgacaccatggttagccacatgtcctctggagtgcccactcccaccaagaggttacagtatagccaggatatacccagtcacttggccgatgagcatgcgctgatagcctcctatgtggcccgtctgcagcactgtgcacgtgttctggacagtcctagccgactggatgaggaacaccgtcttatagctcgctatgctgcccggctggctgcagaagcaggaaacgtgactcgtcctcccactgacttgagctttaactttgatgccaacaaacaacaaagacagcttattgcagaactggaaaacaaaaacagagagatcctgcaggagattcagcgtctccgcctggaacacgagcaggcctcccagcccacccctgagaaggcacagcagaaccccacgctgctggcagagctgcggctgctgaggcaaaggaaggatgaactggagcagaggatgtcggccctgcaggagagcaggcgggagctgatggtccagctggaagagctgatgaagttgctgaaggaggaagagcaaaagcaggcagctcaggccacagggtcaccacatacatcgcccacccatggaggcggccggccaatgcccatgccagtgcgctccacgtctgccggctccacccccacccactgtccgcaggactcgctgagcggagtcgggggagacgtgcaggaggccttcgcacaaggtacgaggagaaacctccgcaatgacctgctggtggcagctgactccatcaccaacaccatgtcatccctggtgaaggagctccattcaggttagcagaggagccggacacagaggaagctcaggcacagaggacgaggagcaagctggcgccgacatggcgaaggcaaggtcttcccccagaggcacattcctctccatctttccaccgcacacctggaccaggcttgcaggctgccagacgtcactccacccgccagggagaggggagccagagccggtgggaagcggggaggggctgcgtggcacagctagtgggcctccccctgcacagccctgcatgtactagcaccttcatcactcccctcagggcatggtctcatctccgcatcaggaattcacctggaggttgaaaagagaaaagaaaaagcaccaa

SEQ ID NO: 258026 - protein, 560 aa, Artificial Sequence
  derived and/or modified sequence
MIEESGNKRKTMAEKRQLFIEMRAQNFDVIRLSTYRTACKLRFVQKRCNLHLVDIWNMIEAFRDNGLNTLDHTTEISVSRLETVISSIYYQLNKRLPSTHQISVEQSISLLLNFMIAAYDSEGRGKLTVFSVKAMLATMCGGKMLDKLRYVFSQMSDSNGLMIFSKFDQFLKEVLKLPTAVFEGPSFGYTEHSVRTCFPQQRKIMLNMFLDTMMADPPPQCLVWLPLMHRLAHVENVFHPVECSYCRCESMMGFRYRCQQCHNYQLCQNCFWRGHAGGPHSNQHQMKEHSSWKSPAKKLSHAISKSLGCVPTREPPHPVFPEQPEKPLDLAHIVPPRPLTNMNDTMVSHMSSGVPTPTKSVLDSPSRLDEEHRLIARYAARLAAEAGNVTRPPTDLSFNFDANKQQRQLIAELENKNREILQEIQRLRLEHEQASQPTPEKAQQNPTLLAELRLLRQRKDELEQRMSALQESRRELMVQLEELMKLLKAQATGSPHTSPTHGGGRPMPMPVRSTSAGSTPTHCPQDSLSGVGGDVQEAFAQAEEGAEEEEEKMQNGKDRG

SEQ ID NO: 258027 - DNA, 1683 bp, Artificial Sequence
  derived and/or modified sequence
atgattgaggagtcaggcaacaaacgcaagacaatggcggagaagcgacagcttttcattgaaatgagagcccagaatttcgacgtaattcggttatccacttataggactgcctgcaaactacggtttgtacaaaagcggtgcaatctccatctagtggatatttggaacatgatcgaggccttccgtgacaatggattgaatacactcgatcacactacagagataagtgtctcacgcctggaaacagtgatttcctccatctattaccaacttaacaagagacttccctctactcatcagatctctgtggagcaatctatctccctattgctgaatttcatgatcgccgcctatgattctgagggaagagggaagctgacggtgtttagtgttaaggccatgttggcaaccatgtgcgggggtaaaatgttggacaagctcagatatgtgttttctcaaatgagcgatagtaatggactgatgatcttcagtaaattcgatcagtttctgaaagaggtgctgaagctgcccaccgccgtgttcgaaggcccctcatttggttatactgaacatagcgttcggacctgttttccccagcagcgaaaaataatgttgaatatgtttctggataccatgatggcggacccaccccctcaatgcctagtttggttaccactcatgcacagactggcgcacgtcgagaacgtttttcaccccgttgagtgcagttattgccgctgcgaatcaatgatgggtttccgctatcgctgtcagcaatgtcataattatcagttatgtcaaaattgcttttggcggggccatgccggagggcctcacagtaaccagcatcagatgaaagagcacagcagctggaagagtccagcaaagaaactgagccatgcgatctccaagtctctgggctgcgtgccaacccgggagcccccacatcccgtctttccagagcaacccgagaaaccactggacctggcacacatcgtgcccccgaggcctctcaccaatatgaatgacaccatggtttcccatatgtctagtggggtccctacccccacgaaaagtgtgcttgactcaccatcccggttggacgaagagcatcgcctgattgcgaggtatgctgccaggttggccgccgaggctggcaatgttacgcgcccgcccacagacctgagctttaatttcgacgctaacaaacagcagcgtcagttaattgcggaacttgagaacaagaatcgtgagatcttgcaggagattcagagacttcggctcgagcacgagcaggccagccagccgacaccagagaaagctcagcagaatcctacactcttggcagagctccgactgctccgtcagcgcaaagatgagctagaacaaagaatgagtgctctccaggaatcacgtcgagaactgatggtgcagctggaggaactcatgaagctgctgaaggcccaagccacaggatcccctcatacgagcccgactcatggggggggccgccccatgcctatgcctgtgaggagcacatctgctgggtccacacctacccattgccctcaggattctctatccggcgtggggggagatgttcaggaggcatttgctcaggctgaagaaggtgccgaagaagaggaggaaaagatgcaaaacggaaaagaccgggggtag

SEQ ID NO: 258028 - DNA, 1683 bp, Artificial Sequence
  derived and/or modified sequence
atgattgaggagagcggcaacaagaggaagaccatggccgagaagaggcagctgttcatcgagatgagggcccagaactttgatgtgatccggctgagcacctacagaacagcctgcaagctgcgctttgtgcagaagcgctgcaacctgcacctggtggacatctggaacatgattgaggccttccgggacaatggcctgaacaccctggaccacaccacagagatctctgtgtcccggctggagaccgtcatcagcagcatctactaccagctgaacaagaggctgcccagcacccaccagatctctgtggagcagagcatcagcctgctgctgaacttcatgattgctgcctatgattctgagggccggggcaagctgaccgtcttctctgtgaaggccatgctggccaccatgtgtggcggcaagatgctggacaagctgcgctacgtgttcagccagatgtctgacagcaatggcctgatgatcttcagcaagtttgaccagttcctgaaggaggtgctgaagctgcccacagctgtgtttgagggccccagctttggctacacagagcacagcgtgaggacctgcttcccccagcagaggaagatcatgctgaacatgttcctggacaccatgatggctgaccccccaccccagtgcctggtgtggctgcccctgatgcaccggctggcccacgtggagaatgtgttccaccctgtggagtgcagctactgccgctgtgagagcatgatgggcttccgctaccgctgccagcagtgccacaactaccagctgtgccagaactgcttctggaggggccacgccggcggcccccacagcaaccagcaccagatgaaggagcacagctcctggaagagccctgccaagaagctgagccacgccatcagcaagagcctgggctgtgtgcccacccgggagcccccccaccctgtgtttcctgagcagcctgagaagcccctggacctggcccacatcgtgcccccccggcccctgaccaacatgaatgacaccatggtgagccacatgagcagcggcgtgcccacccccaccaagtctgtgctggacagccccagccggctggatgaggagcaccggctgattgcccgctatgctgcccggctggccgctgaggccggaaatgtgacccggcccccaacagacctgtccttcaactttgatgccaacaagcagcagaggcagctgattgctgagctggagaacaagaaccgggagatcctgcaggagatccagaggctgcggctggagcacgagcaggccagccagcccaccccagagaaggcccagcagaaccccaccctgctggccgagctgcggctgctgcggcagaggaaggatgagctggagcagaggatgtctgccctgcaggagagcagaagagagctgatggtgcagctggaggagctgatgaagctgctgaaggcccaggccaccggcagcccccacaccagccccacccatggaggcggccggcccatgcccatgcctgtgcgcagcaccagcgctggcagcacccccacccactgcccccaggacagcctgtctggagtgggcggagatgtgcaggaggcctttgcccaggccgaggagggcgctgaggaggaggaggagaagatgcagaatggcaaggaccggggctag

SEQ ID NO: 258029 - DNA, 1683 bp, Artificial Sequence
  derived and/or modified sequence
atgatcgaggagagcggcaacaagcggaagaccatggccgagaagcggcagctttttatcgagatgcgggctcagaattttgacgttatcagactcagtacttacaggaccgcctgcaagttgcgattcgtccagaaacgatgcaacctgcatctggttgacatctggaatatgatcgaagcctttagagacaatggcctcaacactctcgatcataccaccgagatatcagtatcgcggctggaaactgtgatctcttccatctactatcaactgaacaagcgcctaccatctacacaccaaatatccgtggagcaaagcatctccctgctccttaatttcatgattgccgcctacgactccgagggcagggggaaattgaccgtgttttcagtgaaggctatgctggctactatgtgcggtggtaaaatgttagataaattgcgatacgtgttcagccagatgtccgacagtaatggcctgatgatcttttctaagttcgatcaattccttaaagaggtgctcaagctgccgaccgctgtgttcgagggcccttctttcggctacacagagcactccgtgagaacatgctttccccagcaaagaaagataatgctgaacatgtttttagacacaatgatggcggacccccccccccagtgcctggtttggctccctttaatgcaccggctcgcccatgtggagaacgtattccatcccgtcgagtgctcttattgtcgatgcgagtccatgatgggattccggtatcgctgccaacagtgccacaactatcagctgtgtcaaaactgcttttggcgtggccacgcagggggtcctcactcaaatcaacaccagatgaaagagcacagttcatggaaaagtcccgccaagaagctatcccacgccatctcaaagtcactggggtgcgtgcctaccagagaacccccccaccccgtctttccagagcagcccgaaaagccattggacttggcccacatagtaccaccccgcccgttgactaacatgaacgacaccatggtgtcacacatgtcatctggggtgccgaccccaacgaagtctgtgctggactcacctagtcggctggatgaggagcatcgtctgatcgcaagatatgcagccaggttggccgccgaagcggggaacgtcactcgacctcccaccgatctgtcattcaacttcgacgccaacaaacagcagagacagctgatcgcggaactcgaaaacaagaatagagagatactgcaggagatccagaggctgagactggagcacgagcaggcttctcagcctacccctgagaaggcccagcagaatcccaccctgctagcagagctacgacttctgagacagaggaaggacgaactcgagcaacgaatgtcggcacttcaggagtccaggcgcgagctcatggtccagctcgaggaattgatgaagctcttaaaggcccaggccaccgggtcacctcacacctctcctacccacggcggcggcaggcccatgcccatgcctgtgagatccacatcagccggctcaactcccacgcactgcccccaggactcactgtcaggggtcggcggggacgtccaggaggcctttgcgcaggctgaggagggcgctgaggaagaagaggaaaaaatgcagaacgggaaggatcgggggtag

SEQ ID NO: 258030 - DNA, 1683 bp, Artificial Sequence
  derived and/or modified sequence
atgattgaagagtcagggaacaagcgcaaaacaatggcggaaaagcgtcagctgttcatcgagatgcgcgctcagaacttcgacgttattcggctttccacttaccgcactgcttgcaaactccggttcgttcagaagagatgcaaccttcatctagtggatatttggaatatgatcgaggctttccgagacaacggattgaatactttagatcacactactgagatctctgtctctagacttgagacggtcatcagctctatctactatcagctgaacaagaggctgccttctacacaccaaattagtgtggaacaatccatcagtttgttgcttaactttatgatcgcagcctacgattcagaagggagaggcaagctgaccgtcttttctgtgaaggcaatgctcgcaacaatgtgcggcggaaagatgctcgacaaactgcggtatgtgttctctcagatgtccgactctaatgggctcatgatcttctccaagttcgatcagtttctgaaggaggtgctcaagttgccaaccgcagtgtttgaggggccttcatttgggtacacagagcattccgtcaggacatgcttcccacaacagaggaagattatgttaaatatgttccttgatacaatgatggccgaccctcctcctcaatgcctggtgtggctgcctctaatgcataggctggcccatgttgagaatgtgtttcatcctgtcgagtgttcatattgcaggtgtgagagtatgatgggatttcgctatcgatgccagcaatgtcacaactaccaactgtgtcagaactgtttttggcgaggccacgccggaggacctcactctaaccagcatcagatgaaagaacacagcagctggaagagcccagcaaagaaactgtctcatgcaatctccaaaagcctgggttgcgttcccacccgcgagccaccccacccagtcttccctgagcagccagaaaagcccctagatctggctcacattgttcccccacgacctttgacaaacatgaatgatactatggtgagccacatgagctctggcgtgcctactcctactaagagtgtgttggattctcccagccgtcttgatgaagagcacaggctcatcgcacgttacgccgctcggcttgctgctgaagctggcaatgttacacggccacccactgatctgtcctttaatttcgatgccaacaaacagcagcgccaactgattgccgagttggaaaacaaaaacagggaaatcttacaggaaatacagaggctgcgcttagagcatgagcaagcatctcagccgacccctgagaaagcccagcagaaccccacccttctcgctgaacttagactcctcagacagcgcaaggacgaactggaacagcgcatgagcgctcttcaggaatcaaggagagaactgatggtgcaactcgaagagctgatgaagctgctcaaggcccaggctacgggttccccccacactagccccacgcacggcggtggaaggccaatgcccatgccggtgcggagcacatctgcaggctccaccccaacccattgtcctcaagattcactgtccggcgtgggaggggacgtacaagaagccttcgcccaggctgaggagggagctgaggaagaggaggagaagatgcagaatggcaaggatcgagggtag

SEQ ID NO: 258031 - DNA, 1683 bp, Artificial Sequence
  derived and/or modified sequence
atgatcgaggagagcggcaacaagagaaagaccatggccgagaagagacagctgttcatcgagatgagagcccagaacttcgacgtgatcagactgagcacctacagaaccgcctgcaagctgagattcgtgcagaagagatgcaacctgcacctggtggacatctggaacatgatcgaggccttcagagacaacggcctgaacaccctggaccacaccaccgagatcagcgtgagcagactggagaccgtgatcagcagcatctactaccagctgaacaagagactgcccagcacccaccagatcagcgtggagcagagcatcagcctgctgctgaacttcatgatcgccgcctacgacagcgagggcagaggcaagctgaccgtgttcagcgtgaaggccatgctggccaccatgtgcggcggcaagatgctggacaagctgagatacgtgttcagccagatgagcgacagcaacggcctgatgatcttcagcaagttcgaccagttcctgaaggaggtgctgaagctgcccaccgccgtgttcgagggccccagcttcggctacaccgagcacagcgtgagaacctgcttcccccagcagagaaagatcatgctgaacatgttcctggacaccatgatggccgacccccccccccagtgcctggtgtggctgcccctgatgcacagactggcccacgtggagaacgtgttccaccccgtggagtgcagctactgcagatgcgagagcatgatgggcttcagatacagatgccagcagtgccacaactaccagctgtgccagaactgcttctggagaggccacgccggcggcccccacagcaaccagcaccagatgaaggagcacagcagctggaagagccccgccaagaagctgagccacgccatcagcaagagcctgggctgcgtgcccaccagagagcccccccaccccgtgttccccgagcagcccgagaagcccctggacctggcccacatcgtgccccccagacccctgaccaacatgaacgacaccatggtgagccacatgagcagcggcgtgcccacccccaccaagagcgtgctggacagccccagcagactggacgaggagcacagactgatcgccagatacgccgccagactggccgccgaggccggcaacgtgaccagaccccccaccgacctgagcttcaacttcgacgccaacaagcagcagagacagctgatcgccgagctggagaacaagaacagagagatcctgcaggagatccagagactgagactggagcacgagcaggccagccagcccacccccgagaaggcccagcagaaccccaccctgctggccgagctgagactgctgagacagagaaaggacgagctggagcagagaatgagcgccctgcaggagagcagaagagagctgatggtgcagctggaggagctgatgaagctgctgaaggcccaggccaccggcagcccccacaccagccccacccacggcggcggcagacccatgcccatgcccgtgagaagcaccagcgccggcagcacccccacccactgcccccaggacagcctgagcggcgtgggcggcgacgtgcaggaggccttcgcccaggccgaggagggcgccgaggaggaggaggagaagatgcagaacggcaaggacagaggctag

SEQ ID NO: 258032 - DNA, 2273 bp, Artificial Sequence
  derived and/or modified sequence
gggcgcgcgcccgcccatccgccctccgccctccgccctcgcgccctcgcgccgggggcgggcgctgcgcgtgccgggcggagaagcggcgcgagccgggcgctgcgaacgttcgccgcgggggtggctccggggcctgagtaggcgctgccgctgcctcagccgagggggctgggccggagcgtgcggaggagtgaggccgcaggagaccttcccgacgacccctgctccggcggggaagtgagcaaggatgattgaggaaagtgggaacaagcggaagaccatggcagagaagaggcagctgttcatagaaatgcgtgctcagaattttgatgtcatacgactatcaacttacagaacagcctgcaaattacgatttgtacaaaaacgatgcaaccttcatcttgttgatatctggaacatgattgaagccttccgagacaatggccttaatacactggaccataccaccgagatcagtgtgtcccgcctcgaaactgtcatctcctccatctactatcagttgaacaagcgccttccttctactcaccaaattagtgtggaacaatctatcagcctcctcctcaactttatgattgctgcatatgacagtgagggccgaggcaagttgacggtattttcagttaaagctatgttagcaaccatgtgtggtggaaaaatgctggacaaattgagatatgttttctcccagatgtcagattccaatggcttaatgatatttagcaagtttgaccagtttctgaaggaagttctgaagctcccaacagctgtctttgaagggccatcttttggttacacagagcactcagtccgcacctgttttccacagcagagaaagataatgctaaatatgtttttagacacaatgatggctgaccctcctccccagtgccttgtctggctacctctcatgcacaggcttgcccatgttgagaatgtcttccatcccgtggagtgctcctactgccgatgtgagagtatgatgggtttccggtaccgatgccagcagtgccacaactatcagctctgccagaattgcttttggcgtggccatgccggcggccctcacagcaaccagcaccagatgaaggagcattcctcttggaaatctcctgcaaagaagctgagccatgcaattagtaaatctttggggtgtgtacccacgagagaacccccgcatcctgtttttcctgagcaaccagagaaaccacttgaccttgcacatatagttcctcctcgccctctgactaatatgaatgacaccatggttagccacatgtcctctggagtgcccactcccaccaagagtgttctggacagtcctagccgactggatgaggaacaccgtcttatagctcgctatgctgcccggctggctgcagaagcaggaaacgtgactcgtcctcccactgacttgagctttaactttgatgccaacaaacaacaaagacagcttattgcagaactggaaaacaaaaacagagagatcctgcaggagattcagcgtctccgcctggaacacgagcaggcctcccagcccacccctgagaaggcacagcagaaccccacgctgctggcagagctgcggctgctgaggcaaaggaaggatgaactggagcagaggatgtcggccctgcaggagagcaggcgggagctgatggtccagctggaagagctgatgaagttgctgaaggctcaggccacagggtcaccacatacatcgcccacccatggaggcggccggccaatgcccatgccagtgcgctccacgtctgccggctccacccccacccactgtccgcaggactcgctgagcggagtcgggggagacgtgcaggaggccttcgcacaagcagaggaaggtgcagaggaagaagaagagaagatgcagaatgggaaagacagaggttagcagaggagccggacacagaggaagctcaggcacagaggacgaggagcaagctggcgccgacatggcgaaggcaaggtcttcccccagaggcacattcctctccatctttccaccgcacacctggaccaggcttgcaggctgccagacgtcactccacccgccagggagaggggagccagagccggtgggaagcggggaggggctgcgtggcacagctagtgggcctccccctgcacagccctgcatgtactagcaccttcatcactcccctcagggcatggtctcatctccgcatcaggaattcacctggaggttgaaaagagaaaagaaaaagcaccaa

SEQ ID NO: 258033 - protein, 522 aa, Artificial Sequence
  derived and/or modified sequence
MFPWGLSCLSVLGAAGTALLCAGLLLSLAQHLWTLRWMLSRDRASTLPLPKGSMGWPFFGETLHWLVQGSRFHSSRRERYGTVFKTHLLGRPVIRVSGAENVRTILLGEHRLVRSQWPQSAHILLGSHTLLGAVGEPHRRRRKVLARVFSRAALERYVPRLQGALRHEVRSWCAAGGPVSVYDASKALTFRMAARILLGLRLDEAQCATLARTFEQLVENLFSLPLDVPFSGLRKGIRARDQLHRHLEGAISEKLHEDKAAEPGDALDLIIHSARELGHEPSMQELKESAVELLFAAFFTTASASTSLVLLLLQHPAAIAKIREELVAQGLGRACGCAPGAAGGSEGPPPDCGCEPDLSLAALGRLRYVDCVVKEVLRLLPPVSGGYRTALRTFELDGYQIPKGWSVMYSIRDTHETAAVYRSPPEGFDPERFGAAREDSRGASSRFHYIPFGGGARSCLGQELAQAVLQLLAVELVRTARWELATPAFPAMQTVPIVHPVDGLRLFFHPLTPSVAGNGLCL

SEQ ID NO: 258034 - DNA, 1569 bp, Artificial Sequence
  derived and/or modified sequence
atgtttccttggggactgagctgcctaagcgtgctgggagcagctggaacagccctgctttgtgctggcctgctcctctccctggctcaacacttgtggaccctgagatggatgctgtcaagggaccgtgctagtacattaccactacccaagggaagcatggggtggccttttttcggggaaaccctgcattggctggtccagggttctaggttccactcaagcaggcgcgagcggtatgggactgtattcaaaactcacctcctgggaagacctgtgatccgagtatccggcgccgagaacgtaaggacaatcctgctgggagagcatcgccttgttcgttcgcagtggccacaaagcgctcatattctgttaggatcccataccctattgggagcagtcggtgaaccccataggcgcaggaggaaagtccttgctagggtgttctcccgggccgctttggagcgatatgtacccaggttgcagggcgcccttagacacgaggtccgcagttggtgcgcagctggcggtccggtgagcgtgtatgacgcctcaaaagcactcacgttcagaatggctgcgcgaatcctcctggggttaaggctcgatgaagcacagtgtgccaccctcgcgagaacatttgagcagctagttgaaaatctcttttccttgccacttgacgtgcccttctctggtctgaggaaaggcatccgtgccagagaccaactgcacaggcatctggaaggggccatatccgaaaagctgcacgaagacaaagcagctgagccaggagatgcgctcgacctcattattcacagcgcccgcgaactgggtcatgagccttctatgcaggagctgaaggaatctgcagtggagctgctgtttgctgccttctttaccacagcttctgcatctacctctctggtgctgctgttattgcagcaccccgctgccattgccaaaatccgcgaagaactggtggcccaggggctgggacgagcttgcggctgcgctccaggcgctgccgggggctcagagggcccacctccagactgcggatgcgaaccagatctgtcgctagctgcgctcggccgcctgcgatacgttgactgtgttgtcaaagaagtgctgcgtctcctgccgccagtttccggaggctatcgcaccgctcttagaacatttgaactcgacggataccaaatccccaagggctggtcagtaatgtactcaatacgtgatacccatgaaaccgcagccgtgtaccggtcccccccagagggctttgaccccgagaggtttggcgccgcccgcgaggactcaagaggtgctagttctcgatttcattatatccccttcggtggaggagcccgctcctgcttaggtcaagaactggcgcaagccgtccttcaacttctcgcggtcgaacttgttaggactgcccggtgggagctggcaacacccgcattcccggccatgcagaccgtgccaatagtgcaccccgtcgacggcctgcgattgttcttccacccgctgacaccttcagttgctggaaacggcctatgtttgtag

SEQ ID NO: 258035 - DNA, 1569 bp, Artificial Sequence
  derived and/or modified sequence
atgttcccctggggcctgagctgcctgtctgtgctgggcgctgctggaacagccctgctgtgtgccggcctgctgctgagcctggcccagcacctgtggaccctgcgctggatgctgagccgggaccgggccagcaccctgcccctgcccaagggctccatgggctggcccttctttggagagaccctgcactggctggtgcagggcagccgcttccacagcagccggcgggagagatatggcaccgtcttcaagacccacctgctgggccggcctgtgatccgggtgtctggagcagaaaatgtgaggaccatcctgctgggggagcaccggctggtgcgcagccagtggccccagagcgcccacatcctgctgggcagccacaccctgctgggcgctgtgggggagccccacagaagaagaaggaaggtgctggcccgggtcttcagccgggccgccctggagagatatgtgccccggctgcagggcgccctgcggcatgaggtgcgctcctggtgtgccgccggcggccctgtgtctgtgtatgatgccagcaaggccctgaccttcaggatggccgcccgcatcctgctgggcctgcggctggatgaggcccagtgtgccaccctggcccggacctttgagcagctggtggagaacctcttcagcctgcccctggatgtgcccttcagcggcctgaggaagggcatccgggcccgggaccagctgcaccgccacctggagggcgccatcagcgagaagctgcacgaggacaaggctgctgagcctggagatgccctggacctgatcatccacagcgcccgggagctgggccacgagcccagcatgcaggagctgaaggagagcgctgtggagctgctgtttgctgccttcttcaccacagccagcgccagcaccagcctggtgctgctgctgctgcagcaccctgctgccatcgccaagatccgggaggagctggtggcccagggcctgggccgggcctgtggctgtgcccctggagctgctgggggcagcgagggccccccaccagactgtggctgtgagccagacctgagcctggccgccctgggccgcctgcgctacgtggactgtgtggtgaaggaggtgctgcggctgctgccccctgtgtctgggggctacagaacagccctgcggacctttgagctggatggctaccagatccccaagggctggagcgtgatgtacagcatccgggacacccatgaaacagctgctgtgtaccgcagccccccagagggctttgatcctgagagatttggagctgcccgggaggacagcagaggagccagcagccgcttccactacatcccctttggaggaggagcccggagctgcctgggccaggagctggcccaggccgtgctgcagctgctggccgtggagctggtgaggacagcccgctgggagctggccaccccagccttccctgccatgcagacagtgcccatcgtgcaccctgtggatggcctgcggctcttcttccaccccctgacccccagcgtggccggaaatggcctgtgcctgtag

SEQ ID NO: 258036 - DNA, 1569 bp, Artificial Sequence
  derived and/or modified sequence
atgttcccctggggcctgagctgcctgagcgtgctgggcgccgccggaactgcactgctgtgtgccgggctgctcctgtccctggctcaacatctgtggacgttgagatggatgctttccagggatcgggccagtaccttaccgctgcccaagggcagtatggggtggcccttcttcggcgaaacgctgcattggctggtgcaggggtcccgcttccatagcagtagaagggaaagatatgggaccgtgtttaaaacccacctgctgggcaggcctgtgattcgcgttagcggtgccgaaaatgtgagaacaattttgctcggtgaacatcgcctggtgagatctcagtggcctcagtcggcgcacatcctgttgggaagccacacgctactgggggctgtaggtgaaccgcataggagacgcagaaaggttttggcccgggtgttttcacgggctgcgttggagcgctacgttccccggctgcagggtgccctacggcacgaggtgcggtcctggtgcgccgcgggtggtccggtctccgtttatgacgcgtctaaagccttgactttcaggatggccgctcgcatcctgctgggcttacgcctggacgaagcccagtgcgctacgttggctagaacatttgagcagctggtggagaacctcttctctttacctttagatgtgcctttttctggactgcgtaaaggcattcgcgctagggatcagctgcatagacacttggaaggagccatttccgaaaaacttcacgaagacaaggcagcggagcccggcgacgctctggacctgattatacattcggcccgtgaattgggccatgagccatctatgcaggagctgaaggaatctgctgtggaactccttttcgctgcatttttcacaaccgcaagcgcgagcactagcttagttttgctgctgcttcagcacccggcggcaatcgccaaaatccgggaagaacttgtggctcagggcctgggacgcgcctgcggctgcgcacccggtgctgctggaggcagtgaggggccccctccagattgtggctgcgaacccgatctgtcattggccgccctgggccggttaaggtatgtagactgtgtagttaaggaggtgcttagactgctccctcccgttagtggcgggtataggactgccctgcgaaccttcgagctggacggttatcagattccgaaaggttggtctgtgatgtattccatcagagatacgcacgagaccgcagccgtctatagatcaccacccgaaggatttgacccagaaaggttcggagcggcgcgcgaagactcacggggcgcttccagcagattccattacatacccttcggcggtggggcacggtcatgcctaggccaggaattggcgcaggcagtccttcaactgctcgcggtggaactggtaaggactgcccggtgggaattggctactcccgcctttcccgccatgcagactgtgcctattgtgcacccagtggacggattgcggctcttcttccacccactgacaccgtcggtggcagggaatgggttgtgtctatag

SEQ ID NO: 258037 - DNA, 1569 bp, Artificial Sequence
  derived and/or modified sequence
atgttcccctgggggctgagctgcctgagtgttttgggcgctgcgggaacagccctactgtgcgcaggtcttctcctttctctcgcgcagcatctgtggactctgagatggatgctaagcagagacagagcttccacacttccattgccaaaaggaagcatgggctggccattcttcggagaaacactgcactggcttgtgcagggcagcagatttcatagcagtcgccgagaaagatacggaaccgtcttcaagactcatctgctcggaagaccggtgattagagtttcaggtgctgagaacgtgcgaactatcctactcggtgaacaccggttagttcggtctcagtggccccagagtgctcatattctgctaggaagccatacgcttctgggcgcagttggtgagccacaccgcaggcgaagaaaagtactggctcgcgtcttctccagagccgctcttgagcgatatgtgccacgcctgcaaggagccctgcgccacgaggtgcgcagctggtgtgctgcaggaggtccagtaagcgtctacgatgcatcgaaagcactcacatttcgcatggctgcccgtatcttgttggggctcaggctcgatgaagcgcaatgtgctacccttgctcgtacatttgagcagctggtggagaatctcttctcccttcctctggatgtgcctttcagtgggctgagaaaaggcattagagcgcgagatcagctacataggcacctggaaggtgccatcagcgaaaagctgcatgaggataaggcagcagaaccgggagacgccctggatctcattattcactcagccagagaattaggtcatgagccttccatgcaagagctgaaggaaagcgctgtcgagctcctgtttgccgcttttttcaccacagctagcgcctcgacctcactagtgctgctccttctgcagcatcctgctgcaattgccaagattcgggaagagctggtagcacagggactgggaagggcctgtgggtgcgcccctggcgctgctggcggttccgagggccctcccccagactgtggttgtgagcccgacctctctctggctgccttaggacgattaagatatgtggattgcgtggttaaggaggttcttagactgcttccacccgtgagtggcggatacagaaccgcattgcgcacttttgaactggacggctaccagataccaaaaggctggtctgttatgtatagcatcagggacacccatgagacagccgctgtttaccgatcccctcctgaggggtttgacccggagcggtttggggcagctagagaggatagcaggggtgcgagctcacggtttcattatatcccgttcggcggtggggcaaggtcttgtctgggacaggagctcgcccaggcagtcttgcaactgctggccgtagagttagtgagaaccgccaggtgggaactagccaccccagcctttcctgctatgcagaccgtcccgatcgtgcaccctgttgatggactgagactgttttttcaccccctcacgccgtccgttgccggtaatggcttgtgtttatag

SEQ ID NO: 258038 - DNA, 1569 bp, Artificial Sequence
  derived and/or modified sequence
atgttcccttgggggctgagctgcctgtcagtgctgggggcggcgggcactgctctcctgtgcgcgggcctgctgctcagcctggcccagcacctctggaccctccgctggatgctgagccgggaccgggcctccaccctgcctctgcccaagggctccatggggtggcccttcttcggcgaaacgctgcactggttagttcagggctcgcgcttccacagttctcgccgagagcgctatgggacagtgttcaagacgcacctgctgggcaggccagtgatccgcgtgagcggcgcggagaacgtgcgcaccatcctgctgggcgagcaccgcctggtgcgcagccagtggccgcagagtgcgcacatcctgctgggctcgcacacactgctaggtgcggtcggcgagccgcaccggcggcggcgcaaggtcctggcgcgcgtgttcagccgcgccgcgctggagcgctacgtgccgcgcctgcagggggcgctgcggcatgaggtgcgctcctggtgcgcggcgggcgggccggtctcagtctacgacgcctccaaagcgctcaccttccgcatggccgcgcgcatcctgctggggttgcggctggacgaggcgcagtgcgccacgctggcccggaccttcgagcagctcgtggagaacctcttctcactgcctctggacgttcccttcagtggcctacgcaagggcatccgggcaagggaccagctgcatcggcacctggagggggccatttctgagaagcttcacgaggacaaggctgcagagccgggtgatgccctcgacctaatcattcacagtgcaagggagctgggccatgagccctccatgcaggagctgaaggagtcggctgtggagctcctcttcgccgccttcttcaccacggccagtgccagcacctcgctcgtcctgctgctactgcagcatccggcggccatcgccaagattcgggaggagctggtggcgcaggggctggggcgcgcgtgcggctgcgcgcccggggccgctgggggcagcgaggggcccccgcccgactgcggctgcgagcccgacctcagcctcgcggcgctgggccgtctgcgctacgtcgactgcgtggtcaaggaggtgctgcgcctcctgccgccagtgtccgggggctaccgcaccgccctgcgcaccttcgagctcgacggctaccagatccccaagggctggagcgtgatgtatagcatccgggacacgcacgagacggctgcggtgtaccgcagccctcccgaaggcttcgatccagagcgcttcggcgcagcgcgcgaagattcccggggcgcctccagccgcttccattacatcccgttcggcggcggtgcgcgcagctgcctcggccaggagctggcgcaagccgtgctccagctgctagctgtggagctagtgcgcaccgcgcgctgggaactggccacacccgccttccccgccatgcagacggtgcccatcgtgcacccagtggacgggctgcggctctttttccaccccctcacgccttcggttgcggggaatgggctatgcctctga

SEQ ID NO: 258039 - DNA, 1569 bp, Artificial Sequence
  derived and/or modified sequence
atgttcccctggggcctgagctgcctgagcgtgctgggcgccgccggcaccgccctgctgtgcgccggcctgctgctgagcctggcccagcacctgtggaccctgagatggatgctgagcagagacagagccagcaccctgcccctgcccaagggcagcatgggctggcccttcttcggcgagaccctgcactggctggtgcagggcagcagattccacagcagcagaagagagagatacggcaccgtgttcaagacccacctgctgggcagacccgtgatcagagtgagcggcgccgagaacgtgagaaccatcctgctgggcgagcacagactggtgagaagccagtggccccagagcgcccacatcctgctgggcagccacaccctgctgggcgccgtgggcgagccccacagaagaagaagaaaggtgctggccagagtgttcagcagagccgccctggagagatacgtgcccagactgcagggcgccctgagacacgaggtgagaagctggtgcgccgccggcggccccgtgagcgtgtacgacgccagcaaggccctgaccttcagaatggccgccagaatcctgctgggcctgagactggacgaggcccagtgcgccaccctggccagaaccttcgagcagctggtggagaacctgttcagcctgcccctggacgtgcccttcagcggcctgagaaagggcatcagagccagagaccagctgcacagacacctggagggcgccatcagcgagaagctgcacgaggacaaggccgccgagcccggcgacgccctggacctgatcatccacagcgccagagagctgggccacgagcccagcatgcaggagctgaaggagagcgccgtggagctgctgttcgccgccttcttcaccaccgccagcgccagcaccagcctggtgctgctgctgctgcagcaccccgccgccatcgccaagatcagagaggagctggtggcccagggcctgggcagagcctgcggctgcgcccccggcgccgccggcggcagcgagggccccccccccgactgcggctgcgagcccgacctgagcctggccgccctgggcagactgagatacgtggactgcgtggtgaaggaggtgctgagactgctgccccccgtgagcggcggctacagaaccgccctgagaaccttcgagctggacggctaccagatccccaagggctggagcgtgatgtacagcatcagagacacccacgagaccgccgccgtgtacagaagcccccccgagggcttcgaccccgagagattcggcgccgccagagaggacagcagaggcgccagcagcagattccactacatccccttcggcggcggcgccagaagctgcctgggccaggagctggcccaggccgtgctgcagctgctggccgtggagctggtgagaaccgccagatgggagctggccacccccgccttccccgccatgcagaccgtgcccatcgtgcaccccgtggacggcctgagactgttcttccaccccctgacccccagcgtggccggcaacggcctgtgcctgtag

SEQ ID NO: 258040 - protein, 418 aa, Artificial Sequence
  derived and/or modified sequence
MGGEAGCAAAVGAEGRVKSLGLVFEDERKGCYSSGETVAGHVLLEASEPVALRALRLEAQGRATAAWGPSTCPRASASTAALAVFSEVEYLNVRLSLREPPAGEGIILLQPGKHEFPFRFQLPSEPLVTSFTGKYGSIQYCVRAVLERPKVPDQSVKRELQVVSHVDVNTPALLTPVLKTQEKMVGCWFFTSGPVSLSAKIERKGYCNGEAIPIYAEIENCSSRLIVPKAAIFQTQTYLASGKTKTIRHMVANVRGNHIASGSTDTWNGKTLKIPPVTPSILDCCIIRVDYSLAVYIHIPGAKKLMLELPLVIGTIPYNGFGSRNSSIASQFSMDMSWLTLTLPEQPEAPPNYADVVSEEEFSRHIPPYPQPPNCEGEVCCPVFACIQEFRFQPPPLYSEVDPHPSDVEESQPVSFIL

SEQ ID NO: 258041 - protein, 331 aa, Artificial Sequence
  derived and/or modified sequence
MQGEADARTGCAEWQGEGIILLQPGKHEFPFRFQLPSEPLVTSFTGKYGSIQYCVRAVLERPKVPDQSVKRELQVVSHVDVNTPALLTPVLKTQEKMVGCWFFTSGPVSLSAKIERKGYCNGEAIPIYAEIENCSSRLIVPKAAIFQTQTYLASGKTKTIRHMVANVRGNHIASGSTDTWNGKTLKIPPVTPSILDCCIIRVDYSLAVYIHIPGAKKLMLELPLVIGTIPYNGFGSRNSSIASQFSMDMSWLTLTLPEQPEAPPNYADVVSEEEFSRHIPPYPQPPNCEGEVCCPVFACIQEFRFQPPPLYSEVDPHPSDVEESQPVSFIL

SEQ ID NO: 258042 - DNA, 1257 bp, Artificial Sequence
  derived and/or modified sequence
atgggcggcgaggccggctgcgccgccgccgtgggcgccgagggcagagtgaagagcctgggcctggtgttcgaggacgagagaaagggctgctacagcagcggcgagaccgtggccggccacgtgctgctggaggccagcgagcccgtggccctgagagccctgagactggaggcccagggcagagccaccgccgcctggggccccagcacctgccccagagccagcgccagcaccgccgccctggccgtgttcagcgaggtggagtacctgaacgtgagactgagcctgagagagccccccgccggcgagggcatcatcctgctgcagcccggcaagcacgagttccccttcagattccagctgcccagcgagcccctggtgaccagcttcaccggcaagtacggcagcatccagtactgcgtgagagccgtgctggagagacccaaggtgcccgaccagagcgtgaagagagagctgcaggtggtgagccacgtggacgtgaacacccccgccctgctgacccccgtgctgaagacccaggagaagatggtgggctgctggttcttcaccagcggccccgtgagcctgagcgccaagatcgagagaaagggctactgcaacggcgaggccatccccatctacgccgagatcgagaactgcagcagcagactgatcgtgcccaaggccgccatcttccagacccagacctacctggccagcggcaagaccaagaccatcagacacatggtggccaacgtgagaggcaaccacatcgccagcggcagcaccgacacctggaacggcaagaccctgaagatcccccccgtgacccccagcatcctggactgctgcatcatcagagtggactacagcctggccgtgtacatccacatccccggcgccaagaagctgatgctggagctgcccctggtgatcggcaccatcccctacaacggcttcggcagcagaaacagcagcatcgccagccagttcagcatggacatgagctggctgaccctgaccctgcccgagcagcccgaggccccccccaactacgccgacgtggtgagcgaggaggagttcagcagacacatccccccctacccccagccccccaactgcgagggcgaggtgtgctgccccgtgttcgcctgcatccaggagttcagattccagcccccccccctgtacagcgaggtggacccccaccccagcgacgtggaggagagccagcccgtgagcttcatcctgtag

SEQ ID NO: 258043 - DNA, 996 bp, Artificial Sequence
  derived and/or modified sequence
atgcagggcgaggccgacgccagaaccggctgcgccgagtggcagggcgagggcatcatcctgctgcagcccggcaagcacgagttccccttcagattccagctgcccagcgagcccctggtgaccagcttcaccggcaagtacggcagcatccagtactgcgtgagagccgtgctggagagacccaaggtgcccgaccagagcgtgaagagagagctgcaggtggtgagccacgtggacgtgaacacccccgccctgctgacccccgtgctgaagacccaggagaagatggtgggctgctggttcttcaccagcggccccgtgagcctgagcgccaagatcgagagaaagggctactgcaacggcgaggccatccccatctacgccgagatcgagaactgcagcagcagactgatcgtgcccaaggccgccatcttccagacccagacctacctggccagcggcaagaccaagaccatcagacacatggtggccaacgtgagaggcaaccacatcgccagcggcagcaccgacacctggaacggcaagaccctgaagatcccccccgtgacccccagcatcctggactgctgcatcatcagagtggactacagcctggccgtgtacatccacatccccggcgccaagaagctgatgctggagctgcccctggtgatcggcaccatcccctacaacggcttcggcagcagaaacagcagcatcgccagccagttcagcatggacatgagctggctgaccctgaccctgcccgagcagcccgaggccccccccaactacgccgacgtggtgagcgaggaggagttcagcagacacatccccccctacccccagccccccaactgcgagggcgaggtgtgctgccccgtgttcgcctgcatccaggagttcagattccagcccccccccctgtacagcgaggtggacccccaccccagcgacgtggaggagagccagcccgtgagcttcatcctgtag

SEQ ID NO: 258044 - DNA, 1257 bp, Artificial Sequence
  derived and/or modified sequence
atgggcggcgaggctggatgcgctgctgctgtgggggctgaggggagagtcaagtctctcggactcgtgttcgaggacgagaggaaaggctgctactcatcgggtgaaactgttgcaggccatgttctcctggaggccagcgaaccagtggcccttcgggccctgaggcttgaggcccagggtagagcaaccgcagcctgggggccaagcacttgtcctcgcgcctccgcatccaccgcagccctggccgtcttctccgaggttgaatatttaaatgtgcgacttagtttgcgagagcccccagctggagaggggattattctgctccagccaggaaaacacgaatttccatttagatttcagcttccctctgaacctctcgtaacctcctttaccggaaagtacgggagcatccagtactgcgtgagggcagtgctggaaaggcccaaagtgcccgaccagtcagttaagcgggagctccaggtcgtcagtcacgttgacgtaaatacccccgctctcctcacccctgtccttaaaacgcaggagaaaatggtcggttgttggtttttcacctccggaccagtgtccttgtcggcgaaaattgagcggaaagggtattgtaacggcgaggcaataccgatctacgccgagattgaaaactgttcgagtcgtctgatcgtccccaaggcagctatctttcagacacagacctatctggctagcggcaagactaagacaatcagacatatggtggccaacgtccgaggcaaccatatcgcatccgggagcacagacacatggaatgggaagactctgaagattccccccgtgacccctagcattctcgactgctgtatcatccgcgtggactatagcctcgccgtttacattcacatcccaggagccaaaaagttaatgctggagcttccactggtcattggtacaattccttacaatggatttggttctcgcaattcaagtatcgcttcacagttcagcatggacatgtcatggctgacactcaccctgccagagcagcctgaagctcccccaaattatgctgacgtggtgtcagaagaagaatttagcagacatatcccaccttacccgcagccacctaattgcgaaggtgaggtgtgttgtcccgtctttgcctgtatccaagagttccgttttcaacccccccctctgtactccgaagtggaccctcatccttctgatgtggaagagtcacagccagtgtcattcatactttag

SEQ ID NO: 258045 - DNA, 996 bp, Artificial Sequence
  derived and/or modified sequence
atgcaaggtgaagccgatgccaggaccggctgtgctgagtggcaaggtgaagggatcatcctgctccagcccggcaaacacgagtttcctttcagatttcagctgccaagtgagccacttgtgacatcttttacgggcaaatacggatccatccagtactgtgtgagagcggttctagaaaggccaaaagtccccgatcagtcagtgaaacgtgagctacaggtggtgtcacatgtggatgtgaataccccagccttgttgacacccgtcctgaaaacgcaggaaaaaatggtgggctgctggtttttcactagtggccccgtcagtctgagcgccaagatagagaggaagggatactgtaatggcgaagctatccccatttacgcggaaattgagaattgctctagcaggctcattgtgcctaaagctgcaatcttccagactcagacgtatctggcctctggcaaaaccaagactatacggcatatggtggccaatgtacggggaaaccatattgcttctggttctaccgacacttggaacggcaagactttaaaaattccgcctgtcacaccctccatcctggattgttgtatcataagggtcgactactcactggctgtttatattcatatcccgggcgccaagaagttaatgctggagctgcccctggtcattggtacgattccctacaacgggtttggatcgcgcaatagctccatcgcaagccaattttcaatggatatgtcttggctcacgctgactctacccgagcaacctgaagcgcccccgaactacgctgacgtggtgagtgaagaggagttctctcgccacatccccccctatccccaaccccccaactgtgaaggagaggtctgttgcccagtgttcgcctgtatccaggagtttcggttccaacctccaccgctgtactcggaggtagatccacatccctccgatgtcgaggagagtcagccagtttcctttatactatag

SEQ ID NO: 258046 - DNA, 1257 bp, Artificial Sequence
  derived and/or modified sequence
atgggcggggaggccggctgtgccgctgctgtgggcgctgagggccgggtgaagagcctgggcctggtgtttgaagatgagaggaagggctgctacagcagcggggagaccgtggccggccacgtgctgctggaggccagcgagcctgtggccctgcgggccctgcggctggaggcccagggccgggccacagctgcctggggccccagcacctgcccccgggccagcgccagcacagctgccctggccgtgttcagcgaggtggagtacctgaatgtgcggctgagcctgcgggagcccccagctggggagggcatcatcctgctgcagcccgggaagcatgagttccccttccgcttccagctgcccagcgagcccctggtgaccagcttcaccgggaagtatggcagcatccagtactgtgtgcgggctgtgctggagcggcccaaggtgcctgaccagagcgtgaagcgggagctgcaggtggtgagccacgtggatgtgaacaccccagccctgctgacccctgtgctgaagacccaggagaagatggtgggctgctggttcttcaccagcggccctgtgtccctgagcgccaagattgaaaggaagggctactgcaatggagaggccatccccatctatgcagaaattgagaactgcagcagccgcctcatcgtgcccaaggccgccatcttccagacccagacctacctggccagcggcaagaccaagaccatccgccacatggtggccaacgtgcggggcaaccacatcgccagcggcagcacagacacctggaatggcaagaccctgaagatcccccctgtgacccccagcatcctggactgctgcatcatccgggtggactacagcctggccgtgtacatccacatccctggggccaagaagctgatgctggagctgcccctggtgattggcaccatcccctacaatggatttggcagcaggaacagcagcatcgccagccagttctccatggacatgtcctggctgaccctgaccctgcctgagcagcctgaggccccacccaactatgcagatgtggtgtctgaggaggagttcagccgccacatccccccctacccccagccccccaactgtgagggggaggtgtgctgccctgtgtttgcctgcatccaggagttccgcttccagcccccacccctgtacagcgaggtggacccccaccccagtgatgtggaggagagccagcctgtgtccttcatcctgtag

SEQ ID NO: 258047 - DNA, 996 bp, Artificial Sequence
  derived and/or modified sequence
atgcagggcgaggctgatgccaggacaggctgtgccgagtggcagggcgagggcatcatcctgctgcagcccgggaagcatgagttccccttccgcttccagctgcccagcgagcccctggtgaccagcttcaccgggaagtatggcagcatccagtactgtgtgcgggctgtgctggagcggcccaaggtgcctgaccagagcgtgaagcgggagctgcaggtggtgagccacgtggatgtgaacaccccagccctgctgacccctgtgctgaagacccaggagaagatggtgggctgctggttcttcaccagcggccctgtgtccctgagcgccaagattgaaaggaagggctactgcaatggagaggccatccccatctatgcagaaattgagaactgcagcagccggctgattgtgcccaaggccgccatcttccagacccagacctacctggccagcggcaagaccaagaccatccgccacatggtggccaacgtgcggggcaaccacatcgccagcggcagcacagacacctggaatggcaagaccctgaagatcccccctgtgacccccagcatcctggactgctgcatcatccgggtggactacagcctggccgtgtacatccacatccctggggccaagaagctgatgctggagctgcccctggtgattggcaccatcccctacaacggcttcggcagcaggaacagcagcatcgccagccagttctccatggacatgtcctggctgaccctgaccctgcctgagcagcctgaggccccacccaactatgcagatgtggtgtctgaggaggagttcagccgccacatccccccctacccccagccccccaactgtgagggggaggtgtgctgccctgtgtttgcctgcatccaggagttccgcttccagcccccacccctgtacagcgaggtggacccccaccccagtgatgtggaggagagccagcctgtgtccttcatcctgtag

SEQ ID NO: 258048 - DNA, 1257 bp, Artificial Sequence
  derived and/or modified sequence
atgggcggcgaggccggctgcgccgccgccgtgggcgccgagggcagagtgaagagcctcggtctggtcttcgaagatgaacgtaaggggtgctattccagcggcgaaacagtggctgggcacgtcctcctggaggcctccgaaccagtggccctgcgcgctctcaggctcgaggcccaaggacgtgctactgcagcttggggacctagcacctgtcccagagcatcagcatcaactgctgctctcgcggttttctccgaggtggagtacttaaatgtgcgcctttcattgcgggagcccccagcaggcgagggcattatcttactgcagcctggcaaacacgagttcccctttaggtttcagctgccaagtgagccactcgtcacatccttcacaggcaagtatggtagcatccagtattgcgtacgggccgttctagagcgtccaaaggttccagatcagtcagtgaagcgggaactgcaggtcgtatcccatgtggatgtcaacacccccgcactgctgactccagtcttaaaaacgcaagaaaagatggtgggctgttggttcttcacatccgggcccgtgtcattatccgccaaaatagagaggaaaggctattgcaacggtgaggccattcccatctatgccgagatagagaactgtagcagccggctgatagtgcccaaggccgccatttttcagactcagacttacctcgcctccggcaagactaagactattcgccatatggttgcaaatgtcaggggcaatcacatcgcctccggcagcactgacacatggaacggtaaaaccctgaaaatccctccggtcacccccagtatcctggattgttgtataattcgtgtagactatagccttgccgtgtacatccacatcccaggagctaaaaagttaatgctcgagctacccttggtcatagggaccatcccctataacggattcggttcaagaaattctagtatagcctcccaattctccatggacatgagctggctaaccctcaccctgcccgagcaacctgaggcccctcccaattacgcagacgtggtgtcggaagaggagttcagccgacatatcccaccataccctcagcctcctaattgtgagggggaggtgtgttgccccgtcttcgcttgtatccaagagtttcgattccagcctccgccattgtatagcgaggtggatccccaccccagtgacgtcgaagagtctcagccagtcagtttcattctctag

SEQ ID NO: 258049 - DNA, 996 bp, Artificial Sequence
  derived and/or modified sequence
atgcagggcgaggccgacgcccggaccggctgcgccgagtggcagggtgagggaattattctgctgcagcctggcaagcatgaattcccgttcagattccaactgcctagtgagcccctggtgacttctttcactggtaagtacggatccattcagtactgcgtcagagccgttctagaacgcccaaaagttcctgatcagtctgttaagcgagagcttcaggtggttagccacgtggatgtgaacactcctgcgctcctaactccggtgctaaaaacacaggagaagatggtgggctgctggtttttcacatcaggaccagtgtccctgtccgccaaaatcgagcggaaggggtactgtaacggcgaagccatcccaatttatgccgagattgagaattgctcttctaggctcattgtgcctaaagccgctatcttccagacccagacttatctggccagtggaaagactaagactatcagacatatggtcgccaacgtgagggggaatcacattgcgagcggctctacagacacctggaatggtaagaccctcaaaattccaccagtgacgcctagcattctcgattgctgcatcatcagggtggactactccctcgcggtgtatatccacattccgggcgccaagaagttaatgctggaactgcctctggtgataggaacaattccttataacgggttcggctctcggaattcctcaattgcgagtcagttcagcatggatatgtcttggctgacccttaccctccctgaacagccagaggcaccaccaaattatgccgacgtcgtctctgaagaagagtttagccgccatattccaccctatccccagcccccgaattgcgagggcgaggtgtgctgtcccgtgttcgcctgcattcaggaatttcgcttccagccaccccctttgtactcagaggtggacccccatccttcagatgtggaagagtctcagcccgtttccttcatactttag

SEQ ID NO: 258050 - DNA, 1257 bp, Artificial Sequence
  derived and/or modified sequence
atgggcggagaggccggatgtgcagcagctgtgggcgctgagggtcgcgtgaagtccctcggcctggtattcgaggacgagcgcaaaggctgttactcttccggtgagacggtcgccggtcacgttttactggaagcttccgagccggttgccttgcgtgccttgaggctggaggcccagggcagggcgactgcagcatgggggccaagcacatgtcctagggcaagcgcatctaccgccgctctcgccgttttcagcgaagttgaatacttgaatgttaggctgagtctgagggaaccacctgccggagagggaattattttgctccagcccggaaaacacgaattcccctttaggttccaactgccaagcgagcctctcgtgacttcgttcaccgggaagtatggctctatccagtattgtgttagagcagtgctggaacgtccaaaagtgcctgaccagtcagtgaaacgtgagctgcaggtggttagccatgttgacgtgaatactcccgcactgctgacccccgtgctgaagacccaggaaaagatggtcggttgttggttctttacgagtgggcctgtgagcctcagtgcaaaaatagaaagaaagggatactgcaatggggaggccatcccaatttacgccgagatcgaaaactgtagttcacggctgatcgtgccgaaagccgctattttccaaacgcagacatacctcgcgtccggcaaaacaaagacgattcggcacatggtggccaacgtgcgcggaaaccatatagcatcagggagcaccgatacctggaatggcaagaccctgaaaatcccccctgtgactccatctattctggattgctgtattatccgggttgattatagccttgccgtgtacatccatattcccggagccaagaagttaatgcttgagctgccactcgtgattggaactatcccctacaacggctttggtagccgcaattcttctatcgcatcccaattttctatggacatgtcctggctgaccctgacactccccgagcagccagaagccccacccaactacgccgacgtcgtaagcgaggaagaattctctcggcacattcctccctacccccaaccgcctaattgcgagggggaagtgtgctgtcccgtgttcgcctgtatacaggagtttagattccagcctcctcctctgtattctgaggtggacccccatcccagcgatgtggaagaatcacagcctgtgtctttcatcctctag

SEQ ID NO: 258051 - DNA, 996 bp, Artificial Sequence
  derived and/or modified sequence
atgcaaggcgaggccgacgccagaacgggatgcgctgaatggcagggagagggtattattctcctgcaacccggaaaacacgaatttccttttaggttccagttgccatccgaaccactggtcacctctttcaccggaaaatacggctctatccaatattgcgtgcgagctgtgctcgagaggcccaaggtgccggaccaatccgtgaagagggagcttcaagttgtgtcgcatgtggacgtcaatacacccgcactgttaacacccgtcctaaagacccaggagaagatggtcgggtgctggtttttcacatctggacctgtctcattatcggctaagatagagcgtaagggctattgcaatggcgaggccatacctatctacgctgaaatcgaaaattgttctagccgcctgattgtgccaaaggcagctatctttcagactcagacttacttagcttccggcaagaccaagaccattagacacatggtcgcaaacgtgagggggaatcatatcgcaagcggaagcaccgacacatggaacgggaaaacactgaagattccccctgtcactccctcaatcctggattgttgcatcatcagagtcgattacagcctggctgtatatatccacattcctggcgcaaagaaactgatgctcgagttgcctctggtgatcggtacaattccatacaatggctttgggagtcgcaactcatctatcgcatcccagttttccatggacatgtcgtggctgacgctcacgttgcctgaacagccagaggccccacccaactatgcagacgtggtgagtgaagaggaattcagcagacatattcctccatatcctcaaccacccaactgcgagggcgaagtctgttgccccgttttcgcgtgcattcaagaattcaggttccaaccaccccctctctacagcgaagtggatcctcacccaagcgacgttgaggaaagtcagccggtctccttcatcctgtag

SEQ ID NO: 258052 - DNA, 4072 bp, Artificial Sequence
  derived and/or modified sequence
aaagcgacaggcctctcggcgagccggtgccccatcgggtaccgcacggctgccgcggcggccttaccctgccgcgagcgcctgtgacagcggcgccgctgtgctcgcgaccccggctccgggcctctgccgacctcaggggcaggaaagagtcgcccggcgggatgggcggggaggctgggtgcgcggcggccgtgggtgccgagggccgcgtgaagagcctgggtctggtgttcgaggacgagcgcaagggctgctattccagcggcgagacagtggccgggcacgtgctgctggaggcgtccgagccggtggccctgcgcgcgctgcgcctggaggcccaggggcgcgccaccgccgcctggggcccgagcacctgcccccgcgcctcggccagcaccgcggccctggctgtcttctcggaggtggagtacctgaacgtgcgcctcagcctgcgggagcccccggccggtgaaggcatcattttattacagcctggaaaacatgaatttccatttcgctttcaacttccatctgaacctttggtcacctcgtttactgggaaatatggaagcattcagtactgtgtgcgggcagtgttggaacgacccaaggtacctgatcagagtgtaaagcgggaactccaggttgttagtcatgtcgatgtcaacacaccagcattattaacccctgtattgaaaactcaagagaaaatggttggctgttggtttttcacttctggtccagtctcgctgagtgccaaaattgaaagaaagggatactgtaatggagaagctattccaatctatgcagaaatagaaaattgttcctctcgtctgattgttccaaaggctgctattttccaaacgcagacatatttggctagtggaaaaacaaagaccattcgacacatggtcgccaatgtgcgaggaaaccacatcgcttctgggagcacagacacatggaatgggaaaacgctaaaaatcccacctgttactccatccatcctggattgctgcattatcagagtggactattccttagctgtatacattcacattcctggtgctaaaaaattgatgctcgaactgccattagtgatcggtacaattccatataatggttttggcagcagaaactccagcattgccagccagttcagtatggatatgagctggttgacactgaccctgccagagcagcctgaagcaccaccaaattatgcagatgtggtatcagaggaagaattctctagacacattcctccttaccctcaaccccctaactgtgagggagaagtgtgctgtcctgtgtttgcctgtatacaagaattccggtttcaacccccacctctttattcagaggttgacccacatcctagcgacgtagaagagagccagcctgtttccttcattctctgaacgtatttcagaaatcactgtgttcatcatcaaattagaatgttggttcttttccttctgcctttttgggaaagagacaggaaagattcacttgaaaacataaatgaacgtcaagactgaaggcaatagaaattaaagaatgtgagaaagttctggtgggccggcaggattgccgcacaagtttatatgatggtcgtatatatatccctgttaaaaactgggatgaagatgtgcaaagtcacagaatgtaatggaagtcctgatggttacagagtaagtgaaagggtgcctgcgctgacgtgagagaaaggaatctgtaaacagtggaaacactgtgggagtttcccatggtgaagagtggaacgaaggcgatatgaactgaaggggtgaagacttgattttggagagggcaacaaaacaagggtgtgtgtgcataggagaatggcccactccaaatacgaagtgagatcctgagtctttgggtgcttcatgatttcctaccatattcaggcctaaagacattgaaaaagcatcttttcttgagatcatggtcatatgaggtcctaatgaagtactacagttttcattctttcaagggtagactaaaatatagtttataaatcggcagtacggtattatgaaaccaagaaagggtttcttgaaaagcttgtcggttcaaagaggaaagatgaatttcaatgtgaaaacacgttttgttgagggctgtactttttaccccctttaagtgctttaacaggatatacgtttgattttcctcatatcttatttacctaggagcatgtaagagaaagaagggagagaaaaggttgcatctgcaggatgccttgataactacacagtcccaaataaaaggcctttttctaacctacctctaatggggttatcagatatgtttttaaatctctcgccctgagtactcttcttgggagttgctgctgtttacagccacagtctcatctatcactaaatatgaaactgggccaaggggaaaattcagtaagttagcgttaaatggaagtaaatatatgtatacctaagagaatgtcaaaataaacaccaaaccaaaagaaggtaggagtgccatttttagaaaagacacaactttaattcctgtcaagagacctaggtctactgatggcagtcactgcattgtacattattccagttcttcagtaattctgtttaaactgtgattttctttattgtgttggtgcaatattttattatcatttaacctcaggatattcagaccaacaggattgtgttgctgctgaaagtctgagcagtgttttaccgtccccagcccccctcccacatggtcacatgttcacttgcttttccttccatctgttggttttgtgagctgagagcatctctggacacatggaagggagccagggattcctgtgatacagattttgaaccagcagagtactttggttttcttcatgtcctaagggtttgatccagaaaccctggtgcttcccctgcagaatactgtacttcatttaacagaatgattgatttttctttcaatcagcatgttcaccaaaaatagaaaagttcttctaaggttaaattttgtatttaaaagttagttggccatttgatcagggaattttctacacacattaggcaaatgtatgcttttcatcctctgggcttacctctctcctctgcaatcctggaagcatcgtgcatagttctttcattgtaagccgctatttaaattcccacaatgcaaaactgttagaccagtaattgtgctactgaaattgtcacaaaacgttattccttgatttggtttttaaattttgctttcgtgtgtgtgtctttaaacaggtaatgtgtatttaagtgttgtctaaacagttgatttttactttagaaaagatcatcttcaactgtttattgacttctgagttatatagttcatgccctgccaaggcattgttcgactccatgatactaaaacataatgaaagaaacaaactccagtatggagaagagaaagtttaattatttggttccatctagaaaagcaacaacttaaaggaatccttcactaggattgtcttatcacctttattagataaatcatgaagtgtccctgtgaaattgaagtgaaactatctctgtaggacttaagagaatagctaaaaggtgtgacttgccttattgaaatgatactggcatatctgactgtaagcagtaggttgaagatatcattttatgaatgtggagaattctacattgaaacagaaaatacctgggaatgaagattaaaaatgtagctgctgttatttgcttggttattcccctcttgctcttctttagtttgaaaaaacaaaaacgtggccttggaattttcattttgatgcagaaattttgaaattgaaaatgtgcatgttttggtgcacaaaatccttctgtgggcaaaactttgtttttgttttgcacagtaagaaacaataggcaagcgttatgtttttggtaagttaactatgaaagctttcttatttttattattaaaaatgtaacaatttaacccacaggaaaaaaaattactttgtatgcttgtttgaaccctatgggttcgttttattaataaaattattacactaatgcta

SEQ ID NO: 258053 - DNA, 1884 bp, Artificial Sequence
  derived and/or modified sequence
atgcagggagaagcagatgccaggactggatgtgcagaatggcaaggtgaaggcatcattttattacagcctggaaaacatgaatttccatttcgctttcaacttccatctgaacctttggtcacctcgtttactgggaaatatggaagcattcagtactgtgtgcgggcagtgttggaacgacccaaggtacctgatcagagtgtaaagcgggaactccaggttgttagtcatgtcgatgtcaacacaccagcattattaacccctgtattgaaaactcaagagaaaatggttggctgttggtttttcacttctggtccagtctcgctgagtgccaaaattgaaagaaagggatactgtaatggagaagctattccaatctatgcagaaatagaaaattgttcctctcgtctgattgttccaaaggctgctattttccaaacgcagacatatttggctagtggaaaaacaaagaccattcgacacatggtcgccaatgtgcgaggaaaccacatcgcttctgggagcacagacacatggaatgggaaaacgctaaaaatcccacctgttactccatccatcctggattgctgcattatcagagtggactattccttagctgtatacattcacattcctggtgctaaaaaattgatgctcgaactgccattagtgatcggtacaattccatataatggttttggcagcagaaactccagcattgccagccagttcagtatggatatgagctggttgacactgaccctgccagagcagcctgaagcaccaccaaattatgcagatgtggtatcagaggaagaattctctagacacattcctccttaccctcaaccccctaactgtgagggagaagtgtgctgtcctgtgtttgcctgtatacaagaattccggtttcaacccccacctctttattcagaggttgacccacatcctagcgacgtagaagagagccagcctgtttccttcattctctgaacgtatttcagaaatcactgtgttcatcatcaaattagaatgttggttcttttccttctgcctttttgggaaagagacaggaaagattcacttgaaaacataaatgaacgtcaagactgaaggcaatagaaattaaagaatgtgagaaagttctggtgggccggcaggattgccgcacaagtttatatgatggtcgtatatatatccctgttaaaaactgggatgaagatgtgcaaagtcacagaatgtaatggaagtcctgatggttacagagtaagtgaaagggtgcctgcgctgacgtgagagaaaggaatctgtaaacagtggaaacactgtgggagtttcccatggtgaagagtggaacgaaggcgatatgaactgaaggggtgaagacttgattttggagagggcaacaaaacaagggtgtgtgtgcataggagaatggcccactccaaatacgaagtgagatcctgagtctttgggtgcttcatgatttcctaccatattcaggcctaaagacattgaaaaagcatcttttcttgagatcatggtcatatgaggtcctaatgaagtactacagttttcattctttcaagggtagactaaaatatagtttataaatcggcagtacggtattatgaaaccaagaaagggtttcttgaaaagcttgtcggttcaaagaggaaagatgaatttcaatgtgaaaacacgttttgttgagggctgtactttttaccccctttaagtgctttaacaggatatacgtttgattttcctcatatcttatttacctaggagcatgtaagagaaagaagggagagaaaaggttgcatctgcaggatgccttgataactacacagtcccaaataaaaggcctttttctaacct

SEQ ID NO: 258054 - protein, 563 aa, Artificial Sequence
  derived and/or modified sequence
MSRIGGAGLPAAALTGPGRFRMAREEPAPAALAAAGQPGGGRGGERALQGPGVARRGRPSLSRAKLHGLRHMCAGRTAAGGSFQRRALWVLAFCTSFGLLLSWSSNRLLYWLSFPSHTRVHREWSRQLPFPAVTVCNNNPLRFPRLSKGDLYYAGHWLGLLLPNRTARPLVSELLRGDEPRRQWFRKLADFRLFLPPRHFEGISAAFMDRLGHQLEDMLLSCKYRGELCGPHNFSSVFTKYGKCYMFNSGEDGKPLLTTVKGGTGNGLEIMLDIQQDEYLPIWGETEETTFEAGVKVQIHSQSEPPFIQELGFGVAPGFQTFVATQEQRLTYLPPPWGECRSSEMGLDFFPVYSITACRIDCETRYIVENCNCRMVHMPGDAPFCTPEQHKECAEPALGLLAEKDSNYCLCRTPCNLTRYNKELSMVKIPSKTSAKYLEKKFNKSEKYISENILVLDIFFEALNYETIEQKKAYEVAALLGDIGGQMGLFIGASILTILELFDYIYELIKEKLLDLLGKEEDEGSHDENVSTCDTMPNHSETISHTVNVPLQTTLGTLEEIAC

SEQ ID NO: 258055 - DNA, 1692 bp, Artificial Sequence
  derived and/or modified sequence
atgagcagaatcggcggcgccggcctgcccgccgccgccctgaccggccccggcagattcagaatggccagagaggagcccgcccccgccgccctggccgccgccggccagcccggcggcggcagaggcggcgagagagccctgcagggccccggcgtggccagaagaggcagacccagcctgagcagagccaagctgcacggcctgagacacatgtgcgccggcagaaccgccgccggcggcagcttccagagaagagccctgtgggtgctggccttctgcaccagcttcggcctgctgctgagctggagcagcaacagactgctgtactggctgagcttccccagccacaccagagtgcacagagagtggagcagacagctgcccttccccgccgtgaccgtgtgcaacaacaaccccctgagattccccagactgagcaagggcgacctgtactacgccggccactggctgggcctgctgctgcccaacagaaccgccagacccctggtgagcgagctgctgagaggcgacgagcccagaagacagtggttcagaaagctggccgacttcagactgttcctgccccccagacacttcgagggcatcagcgccgccttcatggacagactgggccaccagctggaggacatgctgctgagctgcaagtacagaggcgagctgtgcggcccccacaacttcagcagcgtgttcaccaagtacggcaagtgctacatgttcaacagcggcgaggacggcaagcccctgctgaccaccgtgaagggcggcaccggcaacggcctggagatcatgctggacatccagcaggacgagtacctgcccatctggggcgagaccgaggagaccaccttcgaggccggcgtgaaggtgcagatccacagccagagcgagccccccttcatccaggagctgggcttcggcgtggcccccggcttccagaccttcgtggccacccaggagcagagactgacctacctgccccccccctggggcgagtgcagaagcagcgagatgggcctggacttcttccccgtgtacagcatcaccgcctgcagaatcgactgcgagaccagatacatcgtggagaactgcaactgcagaatggtgcacatgcccggcgacgcccccttctgcacccccgagcagcacaaggagtgcgccgagcccgccctgggcctgctggccgagaaggacagcaactactgcctgtgcagaaccccctgcaacctgaccagatacaacaaggagctgagcatggtgaagatccccagcaagaccagcgccaagtacctggagaagaagttcaacaagagcgagaagtacatcagcgagaacatcctggtgctggacatcttcttcgaggccctgaactacgagaccatcgagcagaagaaggcctacgaggtggccgccctgctgggcgacatcggcggccagatgggcctgttcatcggcgccagcatcctgaccatcctggagctgttcgactacatctacgagctgatcaaggagaagctgctggacctgctgggcaaggaggaggacgagggcagccacgacgagaacgtgagcacctgcgacaccatgcccaaccacagcgagaccatcagccacaccgtgaacgtgcccctgcagaccaccctgggcaccctggaggagatcgcctgctag

SEQ ID NO: 258056 - DNA, 1692 bp, Artificial Sequence
  derived and/or modified sequence
atgagccgcatcggcggggcaggactgcctgccgcggccctaacaggacctgggaggtttcggatggcacgggaagagcctgcccccgcggcactcgccgctgctggacagcccggaggtgggcgagggggcgagcgagcactgcagggaccaggagtagcgcgtcgcgggaggccaagtttgtcgcgagctaagctgcacggattgcgtcatatgtgcgcgggtcgaaccgctgctggaggatctttccagagacgcgctctgtgggtgctcgccttttgtacgtccttcggcttactgttgagttggtcctccaataggctgctgtactggctttcatttccttctcacacacgggtccatcgagaatggtcaagacaactgccctttcccgccgtgaccgtctgtaacaacaacccgctgcgattcccccgactttcgaaaggcgatctgtattacgctgggcactggctagggctgttgttgccaaacaggacagccagaccgctagtcagcgaattgctgagaggagatgagccacgacgtcaatggttcaggaaactggcggacttcaggttgtttctccctccacgccactttgaggggatctccgccgctttcatggatagactgggccaccagcttgaggacatgttgttgtcatgcaaatataggggcgaactgtgtgggccacacaacttttctagtgtgttcacgaagtatgggaaatgttatatgttcaacagtggggaggacggcaaaccactgttgacaactgtgaagggaggcaccggaaacgggctcgagatcatgctggacatccagcaggacgagtatctgccgatttggggggaaactgaggaaactacattcgaagcgggtgttaaagtccagattcattcccagagcgagccgccttttatccaggagctcggctttggtgttgcgcctggtttccagactttcgtcgccacgcaggaacagcggctcacataccttccccctccctggggcgagtgtagaagctccgagatgggcctggattttttccctgtttactccattaccgcatgtcggattgattgtgaaacacggtacatcgtagaaaattgtaactgccggatggtccatatgccaggggacgcacctttttgtacacccgaacaacacaaagagtgtgccgaacccgcccttggtctcctggccgaaaaggacagtaattattgcttgtgtcgaacaccatgcaatcttacccggtacaataaagaacttagcatggtcaaaatcccctctaagacatctgcaaagtatctagaaaaaaaattcaacaagtccgagaagtatatctctgagaatatcctggtgttggatattttctttgaagcattgaactatgagaccatcgagcagaagaaagcttatgaggtcgctgccctgctcggggacataggtggtcagatggggctgtttatcggagcatccattctcaccatcctggaactgttcgactatatctacgagcttattaaagagaagcttcttgatttactcggcaaagaggaagatgaaggctcacacgatgaaaatgtgagtacatgtgacacaatgccgaaccattccgaaacaatatcacatactgtcaatgtcccactgcagaccacgcttgggaccctcgaggagatcgcttgctag

SEQ ID NO: 258057 - DNA, 1692 bp, Artificial Sequence
  derived and/or modified sequence
atgagccgcatcggcggggccggcctgcctgctgctgccctgactggacctggccgcttcaggatggcccgggaggagcccgccccagctgccctggccgctgctggccagcccggcggcggccggggcggggagcgggccctgcagggccctggggtggcccggcggggccggcccagcctgagccgggccaagctgcacggcctgcggcacatgtgtgccggccgcacagctgctgggggcagcttccagaggcgggccctgtgggtgctggccttctgcaccagctttggcctgctgctgtcctggagcagcaaccggctgctgtactggctgtccttccccagccacaccagggtgcaccgggagtggagccggcagctgcccttccctgctgtgacagtgtgcaacaacaaccccctgcgcttcccccggctgagcaagggggacctgtactatgccggccactggctgggcctgctgctgcccaacagaacagcccggcccctggtgtctgagctgctgcggggagatgagccccggcggcagtggttcaggaagctggccgacttccgcctcttcctgccccccaggcactttgagggcatctctgctgccttcatggaccggctgggccaccagctggaggacatgctgctgagctgcaagtacagaggagagctgtgtggcccccacaacttcagcagcgtcttcaccaagtatggcaagtgctacatgttcaacagcggagaagatggcaagcccctgctgaccaccgtgaagggcggcactggaaatggcctggagatcatgctggacatccagcaggatgagtacctgcccatctggggcgagacagaggagaccacctttgaagctggggtgaaggtgcagatccacagccagagcgagccccccttcatccaggagctgggctttggagtggcccctggcttccagacctttgtggccacccaggagcagaggctgacctacctgcccccaccctggggagaatgtcgcagcagcgagatgggcctggacttcttccctgtgtacagcatcacagcctgcagaattgactgtgagacccgctacatcgtggagaactgcaactgcaggatggtgcacatgcctggagatgcccccttctgcaccccagagcagcacaaggaatgtgccgagcccgccctgggcctgctggccgagaaggacagcaactactgcctgtgcaggaccccctgcaacctgacccgctacaacaaggagctgtccatggtgaagatccccagcaagaccagcgccaagtacctggagaagaagttcaacaagtctgagaagtacatcagcgagaacatcctggtgctggacatcttctttgaggccctgaactatgagaccatcgagcagaagaaggcctatgaggtggccgccctgctgggggacattggaggccagatgggcctcttcatcggggccagcatcctgaccatcctggagctgtttgactacatctatgagctgatcaaggagaagctgctggacctgctgggcaaggaggaggatgagggcagccatgatgaaaatgtgtccacctgtgacaccatgcccaaccacagcgagaccatcagccacacagtgaatgtgcccctgcagaccaccctgggcaccctggaggagatcgcctgctag

SEQ ID NO: 258058 - DNA, 1692 bp, Artificial Sequence
  derived and/or modified sequence
atgagccggatcggcggcgccggcctgcccgccgccgccctgaccgggcccggccgattccgaatggcccgggaggaacctgcgcctgccgcgttggcggccgccgggcagcctggaggtgggcggggaggagaaagagccctgcagggccccggggtcgcgaggcgtggaaggccttctctcagtcgggcaaagcttcacgggctcagacacatgtgcgcgggacgcacagccgccggcggctcctttcagcgcagagccctctgggtgctggcgttctgtacaagttttggcctcctactttcttggagctctaatcgcctgctctactggctgagctttcctagccacacgcgagtgcaccgcgagtggagcaggcagttgcccttccccgccgtgacggtgtgcaataataatcctctgagattcccaagattgtccaaaggggacctgtattacgctggccattggctcgggcttctccttcccaaccgaactgctcggccgttggtgagcgaattacttcgcggagatgaacccagaagacagtggttccgtaagctggctgatttccgcttgttcctaccaccccgacatttcgagggcatttcggcggcttttatggatcgcctgggccatcaattggaagatatgttgctatcgtgtaaatacagaggagaactatgcggcccacataattttagttcagtgttcactaaatatggcaagtgctatatgtttaacagcggggaggatggaaagcccttgctcacaacagtaaaggggggaaccggaaatgggctcgaaatcatgctagatatccagcaagatgaatatttacctatctggggcgaaactgaggagaccacctttgaggccggggtaaaggtacagattcacagccagagcgagcctcccttcattcaagaattgggctttggggtggcccccggatttcagacattcgtcgctacccaggaacagcggctgacttatctccctccgccatggggtgaatgtaggagtagcgagatgggcctggatttctttcctgtgtacagcatcacggcttgcagaattgattgcgagacacgctacatcgtggagaactgcaactgtaggatggtccacatgcctggagacgcacccttctgtacgcctgagcagcacaaggaatgcgccgagcccgccctgggtctgctggctgaaaaggacagtaattactgcttgtgcaggacaccttgtaacctcactaggtataataaggagctgtccatggtcaagatccccagcaagacttcggcaaagtatctcgaaaagaagtttaataaaagcgaaaagtatatctctgaaaatatattggtcttggatatattcttcgaagctctcaattatgagactattgagcagaaaaaggcttacgaggtggccgctttgctgggcgatatcggaggacagatgggcctttttatcggtgcaagcattctgactatcttggagctgtttgattatatttatgagttaataaaagaaaagctactcgacttgctcgggaaagaagaagatgagggctcccacgacgaaaatgttagtacctgcgatactatgcccaaccatagcgagacaatttcccatacagtcaatgtgcccctgcagactaccttaggaactttagaagaaatcgcctgctag

SEQ ID NO: 258059 - DNA, 1692 bp, Artificial Sequence
  derived and/or modified sequence
atgtcaaggatcggaggcgctggccttcctgcagcagcacttaccgggccaggacggtttcggatggcgagagaggaaccagcacctgctgctctggccgctgccggtcagccgggtgggggaaggggaggcgaaagagccctgcaaggaccaggcgtcgccagaaggggcagaccatccctttctagggctaagctgcacggcctaagacacatgtgtgcaggcaggaccgcagcgggtgggtccttccaacgcagagcgctctgggtcctggccttctgcacttccttcggcctgcttctaagctggagcagcaatcggctcctctattggctctcatttccgagtcacaccagagtgcacagggaatggtcccgacagctccccttccccgcagtcacggtgtgtaacaataatcctctgcgctttccacgcctgagtaagggtgacttatattatgcagggcattggcttggcctgcttctgcccaaccgcaccgctagacctctggtcagcgagctcctgcgcggagatgaacctcgtcgtcagtggtttcgcaagctagctgacttccgcctgtttctcccgcctcgtcactttgaaggcatcagcgctgcgtttatggataggctggggcaccaactggaagacatgcttctgtcctgtaagtataggggggagctctgtggccctcacaatttttcaagtgtgttcactaagtacggcaagtgttatatgttcaattccggcgaggacgggaaacccctactgactacagtgaaaggtgggaccggtaatggcctcgagattatgcttgatatccaacaagatgagtacctgcctatatggggcgaaacagaagaaaccactttcgaagctggagtgaaagtgcagatccactctcagtcagagccacccttcatccaggagctgggctttggcgtcgctcccggattccagacttttgtagctactcaggagcagagactgacgtaccttccccctccatggggtgaatgtcgtagcagcgagatgggtctagacttcttccccgtctatagcatcaccgcctgccggatcgactgtgaaacccgctatatcgtggaaaattgtaactgcaggatggtccacatgccaggggacgcgcctttctgcactcccgaacagcacaaagaatgcgccgagcccgctctcggcttactggcggagaaggactcaaactattgcctgtgcagaaccccctgtaatctcactcgctataataaagagcttagtatggttaagattccctccaagacgagcgctaaatacctggaaaaaaaattcaacaagtctgagaaatacatatccgaaaatattctggtgttggacatctttttcgaagcacttaactacgagactatagaacaaaagaaggcttacgaggtagccgcattgctgggcgatataggtgggcagatgggactcttcattggggcatcaatattgaccattctggaactcttcgactatatctacgagctgattaaggaaaagctgctcgatctgctcggaaaggaagaagacgagggttctcacgacgaaaacgtctctacttgcgacaccatgccaaaccatagcgagacgattagtcacaccgtgaatgttcctcttcagacaactcttggcactcttgaggaaattgcatgctag

SEQ ID NO: 258060 - DNA, 3443 bp, Artificial Sequence
  derived and/or modified sequence
cacctgggagagccgaggcgagaagcgacacttccctgcggctagcatccttgaaggaccccggcggcgaacagcctcccgcaggacgccctgagaagctctcagccccaggcgagagcgggcgcctggcaggacttaggcgcaggacttggggaagcctaagcaggtctctgccgagcgcagcccagggagcagtaacaaggaagggtcctggaggggaagggaaagaaggcggcagccggcaaggcgaccactcacccccgtacacacccaccccgcccgcccagccaggagccgcggtgcgcctctgggggcgctcgttccttggcgccttctctcccgtgtcccagcaccgctgggctacgggccgggctggtggggtccctggggatgtccagatcaggcatggtggccgagtggcccttctcccaggaccagcgtaaaagctggggttaggcggggcaggggggactcggctcagggtcccccgaggtccaggacgagggaaggcgggcgcagcacccagggactggagaggcggctcccagtgggacccctccagaagtagtgccgggcgccgggcatcctccaggaagaccaggggccgggaaagcctgggaggcgctcgggagaggccactgccaggggctgcgggctgaggcggcgctcagccccgggcgggcgcccgcggaggcggcagcggcggcgccgggcgggcatgccgcgccaccggagctcctttcgggcgcacgcttccctggcgcgggctgcgcgcggctgccgctgctgctgcttccactgctgctgcggactcccatggcggctccgcccggccggggccgccgccgctgccgccagccgcgggctgaatgaatgagccggattggcggagccgggctgcccgcagccgcgctcaccggcccgggacgcttccgcatggcccgcgaggagccggcgcccgcggcgttggcggctgccgggcagcccgggggcggcagaggcggcgagcgggcgctgcaggggccaggggtcgcccgcagggggcggccatcgctgagccgcgctaaactgcacgggctgcggcacatgtgtgccgggcgcacggcggctgggggctccttccagcggcgggcgctgtgggtgctggccttctgtacatccttcggcttgctgctgtcctggtcctcgaaccgcttgctctactggctcagcttcccgtcacacacgcgggtgcaccgcgagtggagccgccagttacccttccccgccgtcactgtgtgcaacaacaacccgctgcgcttcccgcgcctctccaagggggacctctactatgccggccactggctcgggctgctgctgcccaaccgcaccgcgcgcccgcttgtcagcgagctgctgcggggcgacgagccgcgccgccagtggttccgcaagctggcggacttccgcctcttcctgcctccgcgccacttcgagggaatcagcgccgccttcatggaccgcctgggccaccagctggaggacatgctgctctcctgcaagtaccgcggcgagctctgcgggccgcacaacttctcctccgtgtttacaaaatatgggaagtgttacatgtttaactcaggcgaggatggcaaacctctgctcaccacggtcaagggggggacaggcaacgggctggagatcatgctggacattcagcaggatgagtacctgcccatctggggagagacagaggaaacgacatttgaagcaggagtgaaagttcagatccacagtcagtctgagccacctttcatccaagagctgggctttggggtggctccagggttccagacctttgtggccacacaggagcagaggctcacatacctgcccccaccgtggggtgagtgccgatcctcagagatgggcctcgacttttttcctgtttacagcatcaccgcctgtaggattgactgtgagacccgctacattgtggaaaactgcaactgccgcatggttcacatgccaggggatgcccctttttgtacccctgagcagcacaaggagtgtgcagagcctgccctaggtctgttggcggaaaaggacagcaattactgtctctgcaggacaccctgcaacctaacccgctacaacaaagagctctccatggtgaagatccccagcaagacatcagccaagtaccttgagaagaaatttaacaaatcagaaaaatatatctcagagaacatccttgttctggatatattttttgaagctctcaattatgagacaattgaacagaagaaggcgtatgaagttgctgccttacttggtgatattggtggtcagatgggattgttcattggtgctagtatccttacaatactagagctctttgattatatttatgagctgatcaaagagaagctattagacctgcttggcaaagaggaggacgaagggagccacgatgagaatgtgagtacttgtgacacaatgccaaaccactctgaaaccatcagtcacactgtgaacgtgcccctgcagacgaccctggggaccttggaggagattgcctgctgacacccctcgagtcacccagcactccctccaaacagaccttgaggcccaagacccaggacaaggaacagcaagctcaggtgggatggccccagtgctggaaagaagcaagagccccctatgcacacattgcagactagctgcctagacctcgctccggccacgtccaacacgacgcatccttgggccccgccgtgcgtccctcttaggagagatgagtcacactctggaactgtccaagaacgaacctgccatcacatctcactgccagatgtataaagcacctgcatgctcagacttcttgtggcgccacctccacgtctgtcttgtacatgacactcctccacgcggtttccagtgtccacactgctgcccgtgcagtgggaccagattccaggtccaaagtcaccatgaggccaccctggaatcagaactgcacaatcaagagggaacccatgggactctctgctacattcagttcttgtgtcgtttgtgaaagttcttaacctgcccaaaaacccccttttccccaagctgcccatggggcttcggcgccaaaggtgacccgcgccaacctccctcccccccagtgcctatgacggcggcacagcagccagcgggtgggggacgcctgtgttcacccatggtgcccatgtcgttcttctctccctgtgacacagcttgtacagtctgattctttttatctggggtaggggggcttttatgtttgtccgatggagatttgttttgttttgcttcattttatgcttttttattttagttttgatgttctgaggtttgctttggtttttccattttctttggcatttatttattcgtgcttcaaatcacagtcatattaaaagctggtcttgtggaaa

SEQ ID NO: 258061 - protein, 5457 aa, Artificial Sequence
  derived and/or modified sequence
MAGYLSPAAYLYVEEQEYLQAYEDVLERYKDERDKVQKKTFTKWINQHLMKVRKHVNDLYEDLRDGHNLISLLEVLSGDTLPREKGRMRFHRLQNVQIALDYLKRRQVKLVNIRNDDITDGNPKLTLGLIWTIILHFQISDIHVTGESEDMSAKERLLLWTQQATEGYAGIRCENFTTCWRDGKLFNAIIHKYRPDLIDMNTVAVQSNLANLEHAFYVAEKIGVIRLLDPEDVDVSSPDEKSVITYVSSLYDAFPKVPEGGEGIGANDVEVKWIEYQNMVNYLIQWIRHHVTTMSERTFPNNPVELKALYNQYLQFKETEIPPKETEKSKIKRLYKLLEIWIEFGRIKLLQGYHPNDIEKEWGKLIIAMLEREKALRPEVERLEMLQQIANRVQRDSVICEDKLILAGNALQSDSKRLESGVQFQNEAEIAGYILECENLLRQHVIDVQILIDGKYYQADQLVQRVAKLRDEIMALRNECSSVYSKGRILTTEQTKLMISGITQSLNSGFAQTLHPSLTSGLTQSLTPSLTSSSMTSGLSSGMTSRLTPSVTPAYTPGFPSGLVPNFSSGVEPNSLQTLKLMQIRKPLLKSSLLDQNLTEEEINMKFVQDLLNWVDEMQVQLDRTEWGSDLPSVESHLENHKNVHRAIEEFESSLKEAKISEIQMTAPLKLTYAEKLHRLESQYAKLLNTSRNQERHLDTLHNFVSRATNELIWLNEKEEEEVAYDWSERNTNIARKKDYHAELMRELDQKEENIKSVQEIAEQLLLENHPARLTIEAYRAAMQTQWSWILQLCQCVEQHIKENTAYFEFFNDAKEATDYLRNLKDAIQRKYSCDRSSSIHKLEDLVQESMEEKEELLQYKSTIANLMGKAKTIIQLKPRNSDCPLKTSIPIKAICDYRQIEITIYKDDECVLANNSHRAKWKVISPTGNEAMVPSVCFTVPPPNKEAVDLANRIEQQYQNVLTLWHESHINMKSVVSWHYLINEIDRIRASNVASIKTMLPGEHQQVLSNLQSRFEDFLEDSQESQVFSGSDITQLEKEVNVCKQYYQELLKSAEREEQEESVYNLYISEVRNIRLRLENCEDRLIRQIRTPLERDDLHESVFRITEQEKLKKELERLKDDLGTITNKCEEFFSQAAASSSVPTLRSELNVVLQNMNQVYSMSSTYIDKLKTVNLVLKNTQAAEALVKLYETKLCEEEAVIADKNNIENLISTLKQWRSEVDEKRQVFHALEDELQKAKAISDEMFKTYKERDLDFDWHKEKADQLVERWQNVHVQIDNRLRDLEGIGKSLKYYRDTYHPLDDWIQQVETTQRKIQENQPENSKTLATQLNQQKMLVSEIEMKQSKMDECQKYAEQYSATVKDYELQTMTYRAMVDSQQKSPVKRRRMQSSADLIIQEFMDLRTRYTALVTLMTQYIKFAGDSLKRLEEEEKSLEEEKKEHVEKAKELQKWVSNISKTLKDAEKAGKPPFSKQKISSEEISTKKEQLSEALQTIQLFLAKHGDKMTDEERNELEKQVKTLQESYNLLFSESLKQLQESQTSGDVKVEEKIVAERQQEYKEKLQGICDLLTQTENRLIGHQEAFMIGDGTVELKKYQSKQEELQKDMQGSAQALAEVVKNTENFLKENGEKLSQEDKALIEQKLNEAKIKCEQLNLKAEQSKKELDKVVTTAIKEETEKVAAVKQLEESKTKIENLLDWLSNVDKDSERAGTKHKQVIEQNGTHFQEGDGKSAIGEEDEVNGNLLETDVDGQVGTTQENLNQQYQKVKAQHEKIISQHQAVIIATQSAQVLLEKQGQYLSPEEKEKLQKNMKELKVHYETALAESEKKMKLTHSLQEELEKFDADYTEFEHWLQQSEQELENLEAGADDINGLMTKLKRQKSFSEDVISHKGDLRYITISGNRVLEAAKSCSKRDGGKVDTSATHREVQRKLDHATDRFRSLYSKCNVLGNNLKDLVDKYQHYEDASCGLLAGLQACEATASKHLSEPIAVDPKNLQRQLEETKALQGQISSQQVAVEKLKKTAEVLLDARGSLLPAKNDIQKTLDDIVGRYEDLSKSVNERNEKLQITLTRSLSVQDGLDEMLDWMGNVESSLKEQGQVPLNSTALQDIISKNIMLEQDIAGRQSSINAMNEKVKKFMETTDPSTASSLQAKMKDLSARFSEASHKHKETLAKMEELKTKVELFENLSEKLQTFLETKTQALTEVDVPGKDVTELSQYMQESTSEFLEHKKHLEVLHSLLKEISSHGLPSDKALVLEKTNNLSKKFKEMEDTIKEKKEAVTSCQEQLDAFQVLVKSLKSWIKETTKKVPIVQPSFGAEDLGKSLEDTKKLQEKWSLKTPEIQKVNNSGISLCNLISAVTTPAKAIAAVKSGGAVLNGEGTATNTEEFWANKGLTSIKKDMTDISHGYEDLGLLLKDKIAELNTKLSKLQKAQEESSAMMQWLQKMNKTATKWQQTPAPTDTEAVKTQVEQNKSFEAELKQNVNKVQELKDKLTELLEENPDTPEAPRWKQMLTEIDSKWQELNQLTIDRQQKLEESSNNLTQFQTVEAQLKQWLVEKELMVSVLGPLSIDPNMLNTQRQQVQILLQEFATRKPQYEQLTAAGQGILSRPGEDPSLRGIVKEQLAAVTQKWDSLTGQLSDRCDWIDQAIVKSTQYQSLLRSLSDKLSDLDNKLSSSLAVSTHPDAMNQQLETAQKMKQEIQQEKKQIKVAQALCEDLSALVKEEYLKAELSRQLEGILKSFKDVEQKAENHVQHLQSACASSHQFQQMSRDFQAWLDTKKEEQNKSHPISAKLDVLESLIKDHKDFSKTLTAQSHMYEKTIAEGENLLLKTQGSEKAALQLQLNTIKTNWDTFNKQVKERENKLKESLEKALKYKEQVETLWPWIDKCQNNLEEIKFCLDPAEGENSIAKLKSLQKEMDQHFGMVELLNNTANSLLSVCEIDKEVVTDENKSLIQKVDMVTEQLHSKKFCLENMTQKFKEFQEVSKESKRQLQCAKEQLDIHDSLGSQAYSNKYLTMLQTQQKSLQALKHQVDLAKRLAQDLVVEASDSKGTSDVLLQVETIAQEHSTLSQQVDEKCSFLETKLQGIGHFQNTIREMFSQFAEFDDELDSMAPVGRDAETLQKQKETIKAFLKKLEALMASNDNANKTCKMMLATEETSPDLVGIKRDLEALSKQCNKLLDRAQAREEQVEGTIKRLEEFYSKLKEFSILLQKAEEHEESQGPVGMETETINQQLNMFKVFQKEEIEPLQGKQQDVNWLGQGLIQSAAKSTSTQGLEHDLDDVNARWKTLNKKVAQRAAQLQEALLHCGRFQDALESLLSWMVDTEELVANQKPPSAEFKVVKAQIQEQKLLQRLLDDRKSTVEVIKREGEKIATTAEPADKVKILKQLSLLDSRWEALLNKAETRNRQLEGISVVAQQFHETLEPLNEWLTTIEKRLVNCEPIGTQASKLEEQIAQHKALEDDIINHNKHLHQAVSIGQSLKVLSSREDKDMVQSKLDFSQVWYIEIQEKSHSRSELLQQALCNAKIFGEDEVELMNWLNEVHDKLSKLSVQDYSTEGLWKQQSELRVLQEDILLRKQNVDQALLNGLELLKQTTGDEVLIIQDKLEAIKARYKDITKLSTDVAKTLEQALQLARRLHSTHEELCTWLDKVEVELLSYETQVLKGEEASQAQMRPKELKKEAKNNKALLDSLNEVSSALLELVPWRAREGLEKMVAEDNERYRLVSDTITQKVEEIDAAILRSQQFDQAADAELSWITETEKKLMSLGDIRLEQDQTSAQLQVQKTFTMEILRHKDIIDDLVKSGHKIMTACSEEEKQSMKKKLDKVLKNYDTICQINSERYLQLERAQSLVNQFWETYEELWPWLTETQSIISQLPAPALEYETLRQQQEEHRQLRELIAEHKPHIDKMNKTGPQLLELSPGEGFSIQEKYVAADTLYSQIKEDVKKRAVALDEAISQSTQFHDKIDQILESLERIVERLRQPPSISAEVEKIKEQISENKNVSVDMEKLQPLYETLKQRGEEMIARSGGTDKDISAKAVQDKLDQMVFIWENIHTLVEEREAKLLDVMELAEKFWCDHMSLIVTIKDTQDFIRDLEDPGIDPSVVKQQQEAAETIREEIDGLQEELDIVINLGSELIAACGEPDKPIVKKSIDELNSAWDSLNKAWKDRIDKLEEAMQAAVQYQDGLQAVFDWVDIAGGKLASMSPIGTDLETVKQQIEELKQFKSEAYQQQIEMERLNHQAELLLKKVTEESDKHTVQDPLMELKLIWDSLEERIINRQHKLEGALLALGQFQHALDELLAWLTHTEGLLSEQKPVGGDPKAIEIELAKHHVLQNDVLAHQSTVEAVNKAGNDLIESSAGEEASNLQNKLEVLNQRWQNVLEKTEQRKQQLDGALRQAKGFHGEIEDLQQWLTDTERHLLASKPLGGLPETAKEQLNVHMEVCAAFEAKEETYKSLMQKGQQMLARCPKSAETNIDQDINNLKEKWESVETKLNERKTKLEEALNLAMEFHNSLQDFINWLTQAEQTLNVASRPSLILDTVLFQIDEHKVFANEVNSHREQIIELDKTGTHLKYFSQKQDVVLIKNLLISVQSRWEKVVQRLVERGRSLDDARKRAKQFHEAWSKLMEWLEESEKSLDSELEIANDPDKIKTQLAQHKEFQKSLGAKHSVYDTTNRTGRSLKEKTSLADDNLKLDDMLSELRDKWDTICGKSVERQNKLEEALLFSGQFTDALQALIDWLYRVEPQLAEDQPVHGDIDLVMNLIDNHKAFQKELGKRTSSVQALKRSARELIEGSRDDSSWVKVQMQELSTRWETVCALSISKQTRLEAALRQAEEFHSVVHALLEWLAEAEQTLRFHGVLPDDEDALRTLIDQHKEFMKKLEEKRAELNKATTMGDTVLAICHPDSITTIKHWITIIRARFEEVLAWAKQHQQRLASALAGLIAKQELLEALLAWLQWAETTLTDKDKEVIPQEIEEVKALIAEHQTFMEEMTRKQPDVDKVTKTYKRRAADPSSLQSHIPVLDKGRAGRKRFPASSLYPSGSQTQIETKNPRVNLLLREFANFDFDIWRKKYMRWMNHKKSRVMDFFRRIDKDQDGKITRQEFIDGILSSKFPTSRLEMSAVADIFDRDGDGYIDYYEFVAALHPNKDAYKPITDADKIEDEVTRQVAKCKCAKRFQVEQIGDNKYRVSFQSNFGDSQQLRLVRILRSTVMVRVGGGWMALDEFLVKNDPCRVHHHGSKMLRSESNSSITTTQPTIAKGRTNMELREKFILADGASQGMAAFRPRGRRSRPSSRGASPNRSTSVSSQAAQAASPQVPATTTPKGTPIQGSKLRLPGYLSGKGFHSGEDSGLITTAAARVRTQFADSKKTPSRPGSRAGSKAGSRASSRRGSDASDFDISEIQSVCSDVETVPQTHRPTPRAGSRPSTAKPSKIPTPQRKSPASKLDKSSKR

SEQ ID NO: 258062 - DNA, 16374 bp, Artificial Sequence
  derived and/or modified sequence
atggctggctacctgtcgccagctgcctacttgtacgtagaagagcaggaatatctgcaagcgtacgaagatgtcctggaaagatacaaagatgagcgggacaaggtgcagaagaaaacattcaccaaatggatcaaccaacacctgatgaaagtccgtaaacatgtcaacgatctttacgaggacctccgcgacggacacaacctcatttctcttctggaggtactcagtggggacacactgccccgtgaaaaaggacggatgcgtttccataggctccaaaatgtgcagatagccctggactatctgaagaggcggcaggttaagcttgtcaacattaggaacgacgacattaccgatggtaacccgaaactgaccttggggctgatctggacaattattctgcactttcaaatcagtgatattcacgtgaccggggagtctgaggatatgtccgccaaggaaaggctattactgtggacgcaacaggccaccgaaggctacgcagggattagatgcgaaaattttaccacgtgttggcgtgacggcaagctgttcaatgcaatcatccataagtatcgacccgatctcattgacatgaacacggtggcggtgcaatctaatctcgccaatctggaacacgcattttatgttgctgaaaagattggggtgatacgcttgctggaccctgaggatgtggacgtgagctcgccagacgaaaaatctgtgattacctatgtgagttcactttacgacgcttttcctaaggttccggaggggggggaagggatcggggctaacgacgtggaggtgaaatggattgagtatcagaacatggtgaactacctgattcagtggatccggcaccatgtaactacaatgtcagaacgtacttttccaaataatcccgttgagctgaaggctctgtataaccagtatctccagtttaaggaaaccgagatcccaccgaaagaaacggagaagagcaagatcaaaaggctttataagctcttggaaatctggatagaatttggtcgtatcaaattgctacagggttatcacccgaatgacatagagaaagagtggggaaaattgataatcgctatgctcgagcgggagaaagccctccgacctgaggtggagcgtctcgaaatgctgcaacagattgccaaccgggtgcagcgggattctgtgatttgcgaggataagctaatcctggccggaaacgccctgcagagtgatagcaagcggcttgagtcgggagtgcaattccagaatgaagccgagatcgctggatatattctcgaatgtgaaaatctgcttaggcagcacgtcatcgacgtgcagattctgattgatgggaagtactaccaggccgaccaactcgtgcaaagagtggctaagttgcgggacgagattatggccctgaggaacgagtgctcctccgtgtatagcaaaggccgcattctcaccaccgaacagacgaaactgatgataagtggcataacacagtcactgaattctgggtttgctcagaccctccatccgagcctaacctccggtctcacacagagcctaacacccagcctgaccagttcttcaatgacttcaggccttagctctggaatgacctcccggcttacacctagtgtgacacctgcctacacgcctggctttccctcaggcctggtacccaacttttctagcggcgtcgaaccaaactctctgcagactctgaagctgatgcagattagaaaaccgttgctgaagtcctccctcctggatcaaaatttgactgaggaagagataaatatgaagtttgttcaggatctgttaaactgggtagacgagatgcaggtacagttagataggactgagtggggatcggatttgcccagtgtcgagtcacacctcgagaaccataagaacgtccaccgggccattgaagaattcgagtcttccctgaaggaggccaaaatcagtgaaattcaaatgacagcaccgcttaagctcacctacgcagaaaaactgcacaggctagagtcacagtatgccaaacttctgaatacctcccgcaatcaggaacgccaccttgacacactccataacttcgtgagtcgggcaactaatgagctgatttggttgaacgaaaaagaggaggaagaagttgcctacgattggtcagaacgcaataccaacatcgccagaaaaaaggattatcacgccgagctcatgagggagctggaccagaaggaggaaaacattaagtcagtccaggagattgccgaacagctgctgcttgaaaatcatcctgcccgtctgactatcgaggcataccgggccgctatgcagacacagtggtcctggatcctacagctgtgccaatgcgtggagcagcacatcaaggagaatacagcctatttcgaattttttaacgatgccaaggaggcgacagattatcttcgcaacctgaaagatgctatacaacgaaagtatagctgcgaccggtccagctcaatccacaagcttgaggacctggtgcaggaatctatggaggaaaaagaagagctgttgcagtataaatcaacaattgcgaaccttatgggaaaagcgaagactatcattcaactgaagcccagaaatagcgactgccctctcaagacttccatcccgattaaggccatctgcgactataggcagatcgagattacaatctataaagacgacgaatgcgtgctggccaacaacagccatcgagcaaaatggaaagtgataagccccactggtaatgaagccatggtcccatctgtgtgtttcaccgtgcctccccctaacaaagaggccgtcgacttagcaaatagaatcgaacagcagtatcagaatgtgctaacactgtggcatgagtctcacatcaatatgaagagtgtggtgtcttggcactatttgattaatgagatcgatagaatcagagctagtaacgtcgctagtattaagactatgcttcctggcgagcatcagcaggttctctcgaacctgcagtccaggttcgaagacttcttggaggactctcaagaatcacaggtgttctcaggtagcgatataacccaacttgagaaggaagtgaatgtctgcaaacaatactaccaggagctcctcaaaagtgcggaacgcgaggagcaggaggagagtgtttacaatctctacatcagcgaagtgagaaatatcaggctccgcttggagaactgtgaggaccggcttattagacagattcggacgcccctggaacgggacgatttgcatgaaagtgtgtttcgaataactgagcaggaaaaactgaagaaagaactggagagactgaaggacgacttaggtactatcaccaacaagtgtgaagagttcttctctcaagcagctgcaagttcctccgtcccaacattgagatccgagttgaacgtggtgctgcaaaatatgaaccaagtgtatagcatgtctagcacctacattgacaaacttaaaactgtcaacctagtccttaagaacacacaggcagcagaggcgcttgttaaactctacgagactaagctctgtgaggaggaggccgtcatcgcagacaagaataatatcgaaaatctgatcagcacattaaaacaatggcggagcgaggtcgacgagaagagacaggtgttccacgccttagaagacgaactccagaaggcaaaagctatatccgatgagatgttcaagacttacaaggaacgagatttagattttgattggcataaggaaaaagccgatcaactggttgagcggtggcagaacgtgcacgtccaaatcgacaaccggctgcgagacctggaaggaattggaaaaagtttaaagtactatcgagatacctaccaccccctggacgattggatccaacaggtcgagacgacccagcgaaaaattcaggaaaaccaacccgaaaatagtaagactctcgctacccagctaaaccagcagaagatgttggtgagtgagattgagatgaagcaatcaaaaatggatgaatgtcagaagtatgccgagcagtactctgctactgtgaaggactatgaacttcagactatgacctaccgcgcgatggtggactctcagcagaagagtcctgttaaacgccggcgtatgcagagctccgctgatcttatcatccaggagttcatggatctgcggactagatataccgctttagttacccttatgactcagtacatcaagtttgcgggagatagcctgaagcggctggaagaggaagaaaaaagcttggaagaggaaaaaaaggagcatgtggaaaaggccaaagaactgcagaaatgggttagtaatatcagcaagacactcaaagatgccgagaaggccggcaagccccctttcagtaaacaaaagatttcctccgaggagattagcaccaaaaaggagcaactctctgaggctctgcagactatccaactatttctggctaaacatggggataagatgaccgatgaggagagaaatgagctcgagaagcaggtgaagaccctgcaggagtcttacaacctgctgttctccgagtctttaaagcagctgcaggagtcacagaccagtggagatgtaaaagtggaggaaaagatcgtagcagagcgtcaacaagaatataaggaaaaattgcaagggatctgtgatctgcttacccagaccgaaaacagactgatcggccaccaggaggcattcatgataggagacggcactgtggagttgaaaaaataccagagcaagcaggaggagttacagaaggacatgcaggggagcgcccaggccctggccgaggtggtgaaaaacactgagaattttttaaaagaaaacggggaaaaactgagtcaggaagacaaggcattaattgagcagaagttaaatgaggcaaaaattaaatgcgaacagttgaacctgaaggctgaacagtcaaaaaaagagctggacaaagtcgtgaccaccgccattaaagaggaaactgagaaggtcgcagcagtgaagcagcttgaggagtctaaaacgaaaatcgaaaacttgctagattggctgtcaaacgtggataaggactctgagcgggctggcacaaagcataagcaggtgatcgaacagaacggcactcactttcaagagggagacggaaaatctgctatcggggaagaagatgaggtaaatgggaacttgctcgaaacagacgtcgacggccaggttggcacgactcaggagaacttaaatcaacagtaccagaaagtaaaggctcaacatgagaaaatcatttctcagcatcaggcggtgatcatcgccactcagtcggcccaggtgctcctcgaaaagcaaggccagtacctgagtcctgaggagaaagagaaactccagaagaatatgaaagagctgaaggttcactacgaaaccgctctagcagaatctgaaaagaaaatgaagcttacacatagtttgcaagaagaactggaaaaattcgacgccgactatacagagtttgagcattggctacaacaatctgagcaggaacttgagaacctggaagcaggtgctgatgatattaacggtctcatgactaagttaaaaaggcaaaagtctttctcagaagacgttatctcgcacaaaggcgatctgcggtacatcacaataagtgggaaccgcgtgttagaggccgccaaatcttgctctaagcgggacggaggcaaggtggacacatccgccacacatagagaggtccagcgcaagttggaccacgcgactgatagattccggagcctgtacagcaaatgcaacgtcctggggaataacctgaaagatctagtggataagtaccagcattacgaagatgccagctgtgggctgctggcaggcctgcaggcttgcgaggctactgccagcaaacatttgtctgaaccgatcgctgtggaccctaagaacctgcagcgtcagctggaggaaaccaaggctctacaagggcagatcagcagccagcaagtcgctgtggagaagctcaaaaagacagcagaggtgctgcttgatgctagaggaagcttgcttcccgcgaaaaacgacatccagaaaacacttgatgacatcgtaggacgttacgaagatctgagcaagagcgtcaacgagcggaacgaaaagctgcagattactctgacccggtcattgagtgttcaagacgggctggacgaaatgctcgactggatggggaatgtggaatcatctcttaaggagcagggacaggttcccctgaactctacggcgctccaggacatcatttctaagaatatcatgttagagcaggacatcgcgggaaggcagtcatctatcaacgcgatgaatgaaaaggtgaagaagtttatggaaacaacagacccttctactgcgagctcactgcaagctaagatgaaggacctgagcgcaagattctctgaggcatcacacaaacataaagaaaccctagcgaagatggaagaactgaaaactaaggtcgaactttttgaaaatctgagcgaaaaattgcagacattcttggagacaaagacccaggcccttaccgaagtcgacgtgcctggcaaagacgtaaccgagttgtctcaatacatgcaggaaagcaccagcgagtttctcgaacataaaaaacacctggaagtgttgcatagtctgttgaaagaaataagcagccatggcctccctagtgataaagcattggtgttagagaagaccaataacctgtccaaaaaatttaaagagatggaagatacgattaaggagaagaaggaagccgtgactagttgccaggaacaactagacgctttccaagtcctcgtcaagtccttaaaatcttggataaaagagaccaccaaaaaggtccctatcgtccagccttctttcggcgctgaggatttgggcaagtccctggaggacaccaaaaagctccaagagaagtggagtctcaagacccccgagatacagaaagtgaataacagtggaatatcgctatgcaatctcattagtgccgtgaccacccccgctaaagccatcgcggctgtgaaaagtggtggggccgtacttaacggagaaggaacggcaaccaataccgaagagttttgggccaacaaggggttgacatcaataaagaaggacatgaccgatattagtcatgggtatgaggaccttgggctacttctcaaggacaaaatcgccgaactcaatactaaactttcaaaactgcaaaaggctcaagaagaatcatccgctatgatgcagtggcttcagaagatgaataagactgccaccaagtggcagcaaacaccggctcctactgacactgaggccgtgaagactcaagtcgaacagaataagtcattcgaggctgagttgaagcaaaatgtgaataaggtacaggaactcaaagacaagctgaccgagctgttggaagaaaaccctgataccccagaagcaccacggtggaaacaaatgcttactgaaatcgattcaaagtggcaggagttgaaccagctgaccatcgatcgtcagcagaagctcgaggagtcttcaaacaaccttacacagttccagactgttgaagctcagcttaagcagtggttggtcgaaaaagagcttatggtaagtgtactaggacctctgagtattgatccaaatatgttaaatacacagaggcagcaagtgcagatcctgcttcaggaattcgctaccaggaagccccagtatgaacagctcacagcagcaggacagggcatcctctcccgccctggggaagatccctctttgcggggcattgtcaaagaacagctggcagctgtgacccagaaatgggactctttgactggccagttgtcagatcgttgcgactggatcgatcaagcaatcgtgaagtccacacagtatcaatctctcctgcgcagcttgagcgataagttgtccgacctagacaataagctgtccagttctctcgccgtcagcacccatcctgatgcgatgaaccaacagctggagaccgcacagaagatgaaacaggagatccaacaggaaaaaaagcagattaaggtggcccaggccctttgtgaggacctgagtgcccttgtgaaggaggaatatctgaaggctgagctgtcccgtcagttggaggggatcttaaagtcattcaaggacgtggaacagaaagctgagaaccacgttcagcatttacaaagtgcctgcgcatcctcacaccagttccagcagatgtcaagggattttcaggcttggcttgacaccaaaaaggaggagcagaacaaaagtcatccaatctccgcaaagctagacgtgctggagtccctcattaaggaccacaaagacttctctaaaacgctcacggctcagtcccatatgtacgagaagacaatcgctgagggggagaacctgttactgaagacccagggcagcgaaaaagccgccctccaactgcaactgaatactatcaagactaattgggataccttcaacaagcaggttaaggagagagaaaataaactgaaggagagcttagagaaggccctgaagtataaagagcaggtagagaccctgtggccctggatagacaagtgccagaacaatctcgaggagatcaagttttgcttagaccccgcagagggcgagaatagcatcgctaagttgaaaagtctacaaaaagaaatggatcagcattttggtatggtcgagctcctcaataatacagcgaattccctcctctcagtgtgcgagatcgacaaggaggtggtcactgatgaaaataaatccttaattcaaaaggtggacatggtcacagagcagcttcattcgaagaaattttgcctcgagaatatgacgcagaagttcaaggagttccaggaagtgtccaaagaatcaaagaggcaattgcagtgtgccaaagagcagctggatatacacgattccttgggaagtcaggcttactccaacaagtaccttacaatgctgcagacccaacaaaagtcccttcaggccctcaagcaccaggtggatctcgccaagaggctggcccaggacctggtggtggaggcatctgatagtaagggcacgtcagacgtactgctgcaggtggaaacaatcgcacaggagcattccacattgtcacagcaggtggacgaaaaatgtagtttcctggagactaagctccagggaattggacattttcaaaacacaatacgggaaatgttcagtcagtttgctgagttcgacgatgagctcgacagcatggcccccgtgggacgagacgccgaaaccctgcagaagcagaaggagacaataaaggcattccttaagaagctggaggccctgatggcttccaacgataacgccaacaagacatgcaagatgatgctcgccactgaagaaacttctccagaccttgtcgggatcaagagagacctcgaggccctgagcaaacagtgcaataaacttctggaccgcgcgcaggctcgggaagagcaggtagaaggcaccattaagaggctggaagaattctatagcaagttgaaggagttctctatcctgctgcaaaaggctgaagaacacgaagaaagtcagggtccagtgggaatggaaactgagacgatcaaccagcagctcaacatgttcaaggttttccaaaaggaagagattgaacccctgcagggcaagcagcaagatgtgaactggctcgggcagggactgatccagtccgccgccaaatcgacctcaacgcagggcctcgagcatgatctggatgatgtgaacgctcgatggaaaaccctgaataaaaaggtggcccagagagctgctcagttacaagaggccctcctccactgcggccgattccaggatgcacttgagtcacttctcagttggatggttgataccgaagaacttgttgcgaaccaaaaacctccaagcgccgaattcaaggtggtcaaggcccaaatacaagaacagaagctgttacagcgactactcgacgacagaaaatcgactgttgaggtgataaagcgagagggagaaaagattgcaaccacagccgaaccagctgataaagtcaagatcctgaagcagctgagtctcctcgattctcgctgggaagctcttctcaataaggcagagacccgaaatcgacaattggagggcatatccgtggtggcccagcagttccatgagacgttagagcctctgaatgaatggttaaccacaatcgagaagaggctggtcaattgcgagcctataggcactcaagcaagtaagctggaggaacagatagcccaacacaaggcgctcgaagacgacatcattaaccacaataagcacctgcaccaggccgtctcgatcgggcagagccttaaagtgctctcatctagagaagacaaagatatggtgcagagcaagctcgactttagccaagtgtggtatatcgaaatccaagagaagtcccatagtaggtctgagctgttacagcaggccctgtgcaacgccaaaatatttggagaggacgaggtagagctcatgaactggcttaacgaggtgcacgacaagctgtctaaactctctgtgcaggactatagtaccgaagggctctggaagcagcagagcgaactacgcgttctccaggaggacattctgttgcgaaaacaaaacgttgatcaggcattgttgaatggccttgagctccttaaacagacgaccggcgacgaagtgttaatcatccaagacaagttggaagctatcaaggctcgttataaggatataaccaaactgtccacagatgttgcaaagacattggagcaggcgctgcagctggccaggcggttacatagcacccatgaggagttgtgcacctggctggataaagtcgaagtcgaacttcttagttacgaaacgcaggttctgaagggggaggaggcaagtcaagcccaaatgcgacccaaggaactgaagaaggaggctaagaataacaaagccctgttggattcactgaatgaggtcagctctgctctcctggagctggtcccatggcgagctagagaggggctcgagaagatggttgctgaggataacgaaaggtataggttggtcagtgacacaatcactcagaaagtggaagagatcgatgctgcaatcctgaggtctcaacaatttgatcaggctgctgacgccgaattgagttggattacggaaaccgaaaagaagctgatgagcttgggcgatatccgactcgagcaagatcaaactagtgctcagttacaagtccagaaaacatttaccatggagattctgcgacacaaggacataattgacgatttagtgaaatccgggcacaaaatcatgactgcttgttccgaggaggaaaagcagtccatgaaaaagaaacttgacaaggtgctcaaaaattacgatactatttgtcagattaatagcgagcgctatttacagctggaacgcgcccagtcactcgtcaatcagttctgggagacctatgaggagctttggccatggttgacagaaacacaatcaatcatttcccagctcccagccccggctctcgagtatgaaaccttgagacagcagcaagaggagcaccgtcagttgagggagctgattgccgagcataagccacatattgataaaatgaacaagacaggtccacagctgttagagttgagtcctggggaaggcttctccatccaggagaagtatgtggctgcagataccctgtacagtcagattaaagaggacgtaaaaaagagagctgtggcactcgacgaggcaatcagtcaatcgacacagttccacgacaagattgaccaaatccttgagagtttggagagaatcgtggaaagattgagacagccaccatccatcagcgccgaggtggaaaagatcaaagagcagatatcagagaataaaaacgtgagcgtggacatggaaaaattgcaacctctatatgagaccctcaagcagaggggcgaggagatgattgctcgttctggaggaaccgacaaggacatttcggctaaggctgtccaggacaaattagatcagatggtgttcatttgggagaacatccatactcttgtcgaggagagggaggctaagcttcttgacgttatggagctcgccgaaaaattttggtgcgatcatatgtctctcattgtcaccatcaaagacacacaggattttattcgcgatctggaggatccagggatcgacccttccgttgtgaaacagcagcaagaggcggccgaaacaatacgagaggaaatcgacggtctgcaagaggagctggatatcgtcattaacctcggaagtgagttgatcgctgcttgtggtgagcccgacaagcccatcgtcaaaaaatcaattgatgaactgaactccgcttgggattctttaaacaaggcatggaaagatcggatcgataagctggaggaggctatgcaggcagcagtacaatatcaggatgggctgcaggctgtcttcgactgggttgacatcgccggtggaaagttggcatccatgagccctatcggcaccgatctggagaccgtgaaacagcaaattgaagaattgaagcagttcaagtccgaggcctaccagcagcagattgaaatggagagattaaaccatcaagcggaattgttacttaaaaaagtaaccgaggaatccgacaaacacaccgtgcaggatcccttgatggaattgaagctgatttgggattctctcgaggagaggataatcaatcggcaacacaagctcgagggagccctgctggcgctgggccagtttcagcacgccctggacgaactgcttgcctggctgacccatacagagggcctcctgtctgagcaaaaaccagtaggaggcgaccctaaagcaatagagatcgagctggctaagcatcacgtgctgcagaatgacgtgctggctcatcagagcacagtcgaggcggtgaacaaggccggaaacgacctcatcgaatcatccgctggggaggaggcctctaacctgcaaaacaaacttgaggtcctgaatcagcgctggcagaatgtattagagaagactgaacagcgcaagcagcaacttgacggagccttacgccaggctaaaggtttccacggcgagatcgaagacctgcagcagtggctgaccgacaccgagagacacctcttggcgtcaaaacctctcggcggactcccagagacagcaaaggagcagctcaacgttcacatggaagtgtgtgccgctttcgaagcaaaagaggaaacatataagtccctgatgcagaagggccagcaaatgctagcacgttgtcctaaaagtgcggaaaccaacatagatcaggacatcaacaatcttaaagaaaagtgggaaagtgtggagaccaagctgaatgagcggaaaaccaaacttgaagaagccctaaatctcgcaatggagttccacaactcactccaagactttataaactggctaacccaggctgagcagacacttaatgttgcgagcagaccctctcttatcctggacacagtcctattccagatagacgaacacaaagtctttgcaaatgaagtgaacagccaccgcgaacagatcatcgaacttgacaagacagggacgcacttgaaatactttagccagaagcaggatgtcgtgctaatcaagaacctgctgatcagtgtccagtcgagatgggagaaggtggtgcaaagactggtcgaaagagggcgttccctagatgacgcgcggaagagggcaaagcagttccacgaagcctggagcaaattaatggaatggctcgaagaaagcgagaagtcgcttgattctgagctcgagattgctaacgaccctgacaagataaagacgcaactggcccagcacaaggaatttcagaaatcccttggcgcgaagcactctgtgtatgacacgactaaccgaactgggcggagcctgaaagagaagacctcattggccgatgataatttgaaactcgatgatatgctgtccgagctgcgggacaaatgggataccatatgtggaaagtccgtcgaacgccagaacaaactggaggaggctctcctcttcagtggccagtttaccgatgccttgcaggcgctgatagactggctatatcgggtggaaccccagctcgccgaagaccagcctgttcatggggatattgatctcgtgatgaacctgatcgataaccacaaagcattccaaaaggaactggggaagaggacatccagcgtgcaggccctgaaacgctcggctagggagctcatcgaaggctctcgggacgatagctcttgggtgaaagtgcagatgcaagagctgagcacccggtgggagacagtgtgtgcgctgtccatcagcaagcaaacccgcctcgaagctgcattgcggcaggcagaggaatttcactctgtcgtgcatgcactgctagaatggctcgccgaagcagagcaaactctgagatttcacggagtgctgcccgacgatgaggacgccctacggactctgatcgatcagcataaggaattcatgaaaaagcttgaagagaaaagagctgagttaaacaaggccaccaccatgggggataccgtattggccatctgccaccctgacagcattactaccattaaacactggattactattattagagcgaggttcgaggaggtgctggcctgggccaaacagcaccagcagaggctggctagcgcacttgctggtctcattgcgaagcaagagttgctcgaagcattgctggcatggctgcagtgggccgagactaccctgacagataaggataaggaggttattccccaagagattgaagaagttaaggcccttattgcggagcatcagaccttcatggaagaaatgacccgaaaacagcctgacgtggacaaggttaccaagacatataagcgaagggcggccgacccatcctctctgcagtctcacattcccgtgctggataaaggcagggccgggagaaagagatttcccgcctcttccctctatccttccggctcacagacacagatagagactaagaatccaagggtcaacctccttctgagggaattcgcaaacttcgatttcgatatctggcgtaaaaaatatatgaggtggatgaaccataagaagagtcgcgtgatggatttctttcggcggattgataaagatcaagacggcaaaatcactagacaggagtttatcgacggcatattgtcaagtaaatttcctaccagccggctagagatgtccgccgtggcggatatttttgaccgggacggagacggctacattgattactacgagttcgttgctgcgctgcaccctaataaagatgcctacaaaccgatcaccgatgctgacaagatcgaagacgaagtgacgcggcaggtggctaaatgcaaatgcgcaaaaagattccaggtagagcagatcggggacaacaaataccgggtgtccttccagagtaactttggagacagtcaacagttaagattggtcagaatactgcgaagtacagttatggttcgcgtaggcggaggctggatggcactggacgagttcctcgtgaagaatgacccatgcagggtgcaccaccacggaagcaagatgctaagaagtgagagtaactcctctatcacaacaacacagccaactattgccaagggcagaaccaacatggaattgcgtgagaagttcatcctggctgatggcgcttctcaaggaatggccgcatttagaccacgaggacgccgatccagaccatcaagccggggcgcctctccgaacagatctacatcggtaagttcacaagctgctcaggccgccagtccacaagtccctgccacgactacccccaaggggacccctatacaaggctcgaaactccggctgcccggctatctgtctggaaagggcttccactctggagaagacagtggcctgattactacagctgccgcccgcgtccggactcagttcgccgattcgaagaagactcctagtaggccaggctcccgagctggcagtaaagctggcagcagagccagttctcgaagaggcagcgacgcctcggattttgatatttcagagatccagtccgtctgttctgacgttgaaacagtgccacaaactcatcgaccaaccccccgtgctgggtctcgtcccagtacagccaaaccatcgaagattcctacaccacagaggaagtcgcctgccagtaaactggataagtcttctaagagatag

SEQ ID NO: 258063 - DNA, 16374 bp, Artificial Sequence
  derived and/or modified sequence
atggccggctacctgagccctgctgcctacctgtatgtggaggagcaggagtacctgcaggcctatgaagatgtgctggagcgctacaaggatgagcgggacaaggtgcagaagaagaccttcaccaagtggatcaaccagcacctgatgaaggtgaggaagcacgtgaatgacctgtatgaggacctgagagatggccacaacctgatcagcctgctggaggtgctgagcggggacaccctgccccgggagaagggccgcatgaggttccaccggctgcagaatgtgcagatcgccctggactacctgaagaggcggcaggtgaagctggtgaacatcagaaatgatgacatcacagatggcaaccccaagctgaccctgggcctcatctggaccatcatcctgcacttccagatcagtgacatccacgtgactggagagagcgaggacatgtctgccaaggagcggctgctgctgtggacccagcaggccacagagggctacgccggcatccgctgtgagaacttcaccacctgctggagagatggcaagctgttcaatgccatcatccacaagtacagaccagacctgattgacatgaacacagtggccgtgcagagcaacctggccaacctggagcacgccttctacgtggccgagaagattggagtcatccggctgctggaccctgaagatgtggatgtgagcagcccagatgagaagagcgtcatcacctacgtgagcagcctgtatgatgccttccccaaggtgcctgagggcggggagggcatcggggccaatgatgtggaggtgaagtggattgagtaccagaacatggtgaactacctgatccagtggatccgccaccacgtgaccaccatgtctgagaggaccttccccaacaaccctgtggagctgaaggccctgtacaaccagtacctgcagttcaaggagacagagatcccccccaaggagacagagaagagcaagatcaagaggctgtacaagctgctggagatctggattgaatttggccgcatcaagctgctgcagggctaccaccccaatgacatcgagaaggagtggggcaagctgatcatcgccatgctggagcgggagaaggccctgcggcctgaggtggagcggctggagatgctgcagcagatcgccaacagagtgcagagggacagcgtcatctgtgaggacaagctgatcctggccggaaatgccctgcagagcgacagcaagaggctggagagcggcgtgcagttccagaatgaggccgagattgctggctacatcctggagtgtgagaacctgctgcggcagcacgtgattgatgtgcagatcctgattgatggcaagtactaccaggccgaccagctggtgcagagggtggccaagctgagagatgagatcatggccctgagaaatgaatgttcttctgtgtacagcaagggccgcatcctgaccacagagcagaccaagctgatgatcagcggcatcacccagagcctgaacagcggctttgcccagaccctgcaccccagcctgaccagcggcctgacccagagcctgacccccagcctgaccagcagctccatgaccagcggcctgagcagcggcatgaccagccggctgacccccagcgtgaccccagcctacaccccaggcttccccagcggcctggtgcccaacttcagcagtggagtggagcccaacagcctgcagaccctgaagctgatgcagatcaggaagcccctgctgaagagcagcctgctggaccagaacctgacagaggaggagatcaacatgaagtttgtgcaggacctgctgaactgggtggatgagatgcaggtgcagctggacagaacagagtggggcagtgacctgcccagcgtggagagccacctggagaaccacaagaatgtgcaccgggccatcgaggagtttgagagcagcctgaaggaggccaagatcagcgagatccagatgacagcccccctgaagctgacctacgccgagaagctgcaccggctggagagccagtatgccaagctgctgaacaccagcaggaaccaggagcggcacctggacaccctgcacaactttgtgtcccgggccaccaatgagctgatctggctgaatgagaaggaggaggaggaggtggcctatgactggagcgagaggaacaccaacatcgccaggaagaaggactaccacgccgagctgatgagggagctggaccagaaggaggagaacatcaagtctgtgcaggagattgctgagcagctgctgctggagaaccacccagcccggctgaccatcgaggcctacagagctgccatgcagacccagtggagctggatcctgcagctgtgccagtgtgtggagcagcacatcaaggaaaatacagcctactttgagttcttcaatgatgccaaggaggccacagactacctgaggaacctgaaggatgccatccagaggaagtacagctgtgacaggagcagcagcatccacaagctggaggacctggtgcaggagagcatggaggagaaggaggagctgctgcagtacaagagcaccatcgccaacctgatgggcaaggccaagaccatcatccagctgaagcccaggaacagcgactgccccctgaagaccagcatccccatcaaggccatctgtgactaccggcagatcgagatcaccatctacaaggatgatgaatgtgtgctggccaacaacagccaccgggccaagtggaaggtgatcagccccactggaaatgaggccatggtgcccagcgtgtgcttcaccgtgcccccacccaacaaggaggccgtggacctggccaacagaattgagcagcagtaccagaatgtgctgaccctgtggcatgagagccacatcaacatgaagtctgtggtgtcctggcactacctgatcaatgaaattgaccgcatccgggccagcaatgtggccagcatcaagaccatgctgcccggggagcaccagcaggtgctgagcaacctgcagagcagatttgaggacttcctggaggacagccaggagagccaggtgttcagcggcagtgacatcacccagctggagaaggaggtgaatgtgtgcaagcagtactaccaggagctgctgaagtctgctgagcgggaggagcaggaggagagcgtgtacaacctgtacatcagcgaggtgaggaacatccggctgcggctggagaactgtgaagatagactcatccggcagatccgcacccccctggagagagatgacctgcacgagagcgtcttccgcatcacagagcaggagaagctgaagaaggagctggagcggctgaaggatgacctgggcaccatcaccaacaagtgtgaggagttcttcagccaggccgccgccagcagctctgtgcccaccctgcggtctgagctgaatgtggtgctgcagaacatgaaccaggtgtacagcatgagcagcacctacatcgacaagctgaagacagtgaacctggtgctgaagaacacccaggccgctgaggccctggtgaagctgtatgagaccaagctgtgtgaggaggaggccgtgattgctgacaagaacaacattgaaaatctcatcagcaccctgaagcagtggaggtctgaggtggatgagaagaggcaggtgttccacgccctggaggatgagctgcagaaggccaaggccatcagtgatgagatgttcaagacctacaaggagcgggacctggactttgactggcacaaggagaaggctgaccagctggtggagcgctggcagaatgtgcacgtgcagattgacaaccggctgcgggacctggagggcatcggcaagagcctgaagtactacagagacacctaccaccccctggatgactggatccagcaggtggagaccacccagaggaagatccaggagaaccagcctgagaacagcaagaccctggccacccagctgaaccagcagaagatgctggtgtctgaaattgagatgaagcagagcaagatggatgagtgccagaagtatgcagagcagtacagcgccaccgtgaaggactatgagctgcagaccatgacctaccgggccatggtggacagccagcagaagagccctgtgaagagaagaaggatgcagagcagcgctgacctgatcatccaggagttcatggacctgcggacccgctacacagccctggtgaccctgatgacccagtacatcaagtttgctggggacagcctgaagaggctggaggaggaggagaagagcctggaggaggagaagaaggagcacgtggagaaggccaaggagctgcagaagtgggtgagcaacatcagcaagaccctgaaggatgctgagaaggccggcaagccacccttcagcaagcagaagatcagcagcgaggagatcagcaccaagaaggagcagctgtctgaggccctgcagaccatccagctgttcctggccaagcacggggacaagatgacagatgaggagagaaatgagctggagaagcaggtgaagaccctgcaggagagctacaacctgctcttcagcgagagcctgaagcagctgcaggagagccagaccagcggagatgtgaaggtggaggagaagatcgtggccgagcggcagcaggagtacaaggagaagctgcagggcatctgtgacctgctgacccagacagagaacagactcatcggccaccaggaggccttcatgattggagatggcaccgtggagctgaagaagtaccagagcaagcaggaggagctgcagaaggacatgcagggcagcgcccaggccctggccgaggtggtgaagaacacagagaacttcctgaaggaaaatggagagaagctgagccaggaggacaaggccctgattgagcagaagctgaatgaggccaagatcaagtgtgagcagctgaacctgaaggccgagcagagcaagaaggagctggacaaggtggtgaccacagccatcaaggaggagacagagaaggtggccgctgtgaagcagctggaggagagcaagaccaagattgagaacctgctggactggctgagcaatgtggacaaggacagcgagcgggccggcaccaagcacaagcaggtgattgagcagaatggcacccacttccaggagggagatggcaagagcgccatcggggaggaggatgaggtgaatggaaacctgctggagacagatgtggatggccaggtgggcaccacccaggagaacctgaaccagcagtaccagaaggtgaaggcccagcacgagaagatcatcagccagcaccaggccgtcatcatcgccacccagagcgcccaggtgctgctggagaagcagggccagtacctgagccctgaggagaaggagaagctgcagaagaacatgaaggagctgaaggtgcactatgaaacagccctggccgagagcgagaagaagatgaagctgacccacagcctgcaggaggagctggagaagtttgatgctgactacacagaatttgagcactggctgcagcagagcgagcaggagctggagaacctggaggccggggctgatgacatcaatggcctgatgaccaagctgaagaggcagaagagcttctctgaagatgtgatcagccacaagggggacctgcgctacatcaccatcagcggcaacagagtgctggaggccgccaagagctgcagcaagagagatggcggcaaggtggacaccagcgccacccaccgggaggtgcagaggaagctggaccacgccacagaccgcttccgcagcctgtacagcaaatgtaatgtgctgggcaacaacctgaaggacctggtggacaagtaccagcactatgaagatgccagctgtggcctgctggccggcctgcaggcctgtgaggccacagccagcaagcacctgtctgagcccatcgctgtggaccccaagaacctgcagaggcagctggaggagaccaaggccctgcagggccagatcagcagccagcaggtggccgtggagaagctgaagaagacagctgaggtgctgctggatgcccggggcagcctgctgcctgccaagaatgacatccagaagaccctggatgacatcgtgggccgctatgaggacctgagcaagtctgtgaatgaaagaaatgagaagctgcagatcaccctgaccaggagcctgtctgtgcaggacggcctggatgagatgctggactggatgggaaatgtggagagcagcctgaaggagcagggccaggtgcccctgaacagcacagccctgcaggacatcatcagcaagaacatcatgctggagcaggacattgctggccggcagagcagcatcaatgccatgaatgagaaggtgaagaagttcatggagaccacagaccccagcacagccagcagcctgcaggccaagatgaaggacctgagcgcccgcttcagcgaggccagccacaagcacaaggagaccctggccaagatggaggagctgaagaccaaggtggagctgtttgagaacctgtctgagaagctgcagaccttcctggagaccaagacccaggccctgacagaggtggatgtgcctgggaaggatgtgacagagctgagccagtacatgcaggagagcaccagcgagttcctggagcacaagaagcacctggaggtgctgcacagcctgctgaaggagatcagcagccacggcctgcccagcgacaaggccctggtgctggagaagaccaacaacctgagcaagaagttcaaggagatggaggacaccatcaaggagaagaaggaggccgtgaccagctgccaggagcagctggatgccttccaggtgctggtgaagagcctgaagtcctggatcaaggagaccaccaagaaggtgcccatcgtgcagcccagctttggagctgaggacctgggcaagagcctggaggacaccaagaagctgcaggagaagtggagcctgaagaccccagagatccagaaggtgaacaacagcggcatcagcctgtgcaacctgatctctgctgtgaccaccccagccaaggccatcgctgctgtgaagtctggaggagctgtgctgaatggagagggcacagccaccaacacagaggagttctgggccaacaagggcctgaccagcatcaagaaggacatgacagacatcagccacggctatgaggacctgggcctgctgctgaaggacaagattgctgagctgaacaccaagctgagcaagctgcagaaggcccaggaggagagcagcgccatgatgcagtggctgcagaagatgaacaagacagccaccaagtggcagcagaccccagcccccacagacacagaggccgtgaagacccaggtggagcagaacaagagctttgaagctgagctgaagcagaatgtgaacaaggtgcaggagctgaaggacaagctgacagagctgctggaggagaacccagacaccccagaggccccccgctggaagcagatgctgacagaaattgacagcaagtggcaggagctgaaccagctgaccatcgaccggcagcagaagctggaggagagcagcaacaacctgacccagttccagacagtggaggcccagctgaagcagtggctggtggagaaggagctgatggtgtctgtgctgggccccctgagcattgaccccaacatgctgaacacccagaggcagcaggtgcagatcctgctgcaggagtttgccaccaggaagccccagtatgagcagctgacagctgctggccagggcatcctgagcaggcctggagaggaccccagcctgcggggcatcgtgaaggagcagctggccgctgtgacccagaagtgggacagcctgaccggccagctgagtgacagatgtgactggattgaccaggccatcgtgaagagcacccagtaccagagcctgctgcggagcctgagtgacaagctgagtgacctggacaacaagctgagcagcagcctggccgtgtccacccacccagatgccatgaaccagcagctggagacagcccagaagatgaagcaggagatccagcaggagaagaagcagatcaaggtggcccaggccctgtgtgaggacctgagcgccctggtgaaggaggagtacctgaaggccgagctgagccggcagctggagggcatcctgaagagcttcaaggatgtggagcagaaggcagaaaatcatgtgcagcacctgcagagcgcctgtgccagcagccaccagttccagcagatgagccgggacttccaggcctggctggacaccaagaaggaggagcagaacaagagccaccccatcagcgccaagctggatgtgctggagagcctcatcaaggaccacaaggacttcagcaagaccctgacagcccagagccacatgtatgagaagaccatcgccgagggggagaacctgctgctgaagacccagggcagcgagaaggccgccctgcagctgcagctgaacaccatcaagaccaactgggacaccttcaacaagcaggtgaaggagcgggagaacaagctgaaggagagcctggagaaggccctgaagtacaaggagcaggtggagaccctgtggccctggattgacaagtgccagaacaacctggaggagatcaagttctgcctggaccctgcagaaggagaaaattccatcgccaagctgaagagcctgcagaaggagatggaccagcacttcggcatggtggagctgctgaacaacacagccaacagcctgctgtctgtgtgtgaaattgacaaggaggtggtgacagatgagaacaagagcctcatccagaaggtggacatggtgacagagcagctgcacagcaagaagttctgcctggagaacatgacccagaagttcaaggagttccaggaggtgtccaaggagagcaagaggcagctgcagtgtgccaaggagcagctggacatccatgacagcctgggcagccaggcctacagcaacaagtacctgaccatgctgcagacccagcagaagagcctgcaggccctgaagcaccaggtggacctggccaagaggctggcccaggacctggtggtggaggccagtgacagcaagggcaccagtgatgtgctgctgcaggtggagaccatcgcccaggagcacagcaccctgagccagcaggtggatgagaagtgcagcttcctggagaccaagctgcagggcatcggccacttccagaacaccatccgggagatgttcagccagtttgctgagtttgatgatgagctggacagcatggcccctgtgggcagagatgctgagaccctgcagaagcagaaggagaccatcaaggccttcctgaagaagctggaggccctgatggccagcaatgacaatgccaacaagacctgcaagatgatgctggccacagaggagaccagcccagacctggtgggcatcaagagggacctggaggccctgagcaagcagtgcaacaagctgctggaccgggcccaggcccgggaggagcaggtggagggcaccatcaagaggctggaggagttctacagcaagctgaaggagttcagcatcctgctgcagaaggccgaggagcacgaggagagccagggccctgtgggcatggagacagagaccatcaaccagcagctgaacatgttcaaggtgttccagaaggaggagattgagcccctgcagggcaagcagcaggatgtgaactggctgggccagggcctcatccagagcgctgccaagagcaccagcacccagggcctggagcatgacctggatgatgtgaatgcccgctggaagaccctgaacaagaaggtggcccagagagctgcccagctgcaggaggccctgctgcactgcggccgcttccaggatgccctggagagcctgctgtcctggatggtggacacagaggagctggtggccaaccagaagccacccagcgctgagttcaaggtggtgaaggcccagatccaggagcagaagctgctgcagaggctgctggatgacaggaagagcacagtggaggtgatcaagcgggagggggagaagatcgccaccacagctgagcctgctgacaaggtgaagatcctgaagcagctgagcctgctggacagccgctgggaggccctgctgaacaaggccgagaccaggaaccggcagctggagggcatctctgtggtggcccagcagttccacgagaccctggagcccctgaatgagtggctgaccaccatcgagaagaggctggtgaactgtgagcccatcggcacccaggccagcaagctggaggagcagatcgcccagcacaaggccctggaggatgacatcatcaaccacaacaagcacctgcaccaggccgtgtccatcggccagagcctgaaggtgctgagcagccgggaggacaaggacatggtgcagagcaagctggacttcagccaggtgtggtacatcgagatccaggagaagagccacagccgctctgagctgctgcagcaggccctgtgcaatgccaagatctttggagaagatgaggtggagctgatgaactggctgaatgaggtgcatgacaagctgagcaagctgtctgtgcaggactacagcacagagggcctgtggaagcagcagagcgagctgcgggtgctgcaggaggacatcctgctgaggaagcagaatgtggaccaggccctgctgaatggcctggagctgctgaagcagaccactggagatgaggtgctgatcatccaggacaagctggaggccatcaaggcccgctacaaggacatcaccaagctgagcacagatgtggccaagaccctggagcaggccctgcagctggcccggcggctgcacagcacccatgaggagctgtgcacctggctggacaaggtggaggtggagctgctgtcctatgagacccaggtgctgaagggggaggaggccagccaggcccagatgaggcccaaggagctgaagaaggaggccaagaacaacaaggccctgctggacagcctgaatgaggtgagcagcgccctgctggagctggtgccctggagggcccgggagggcctggagaagatggtggccgaggacaatgaaagataccgcctggtgtctgacaccatcacccagaaggtggaggagattgatgctgccatcctgcggagccagcagtttgaccaggccgcagatgctgagctgtcctggatcacagaaacagagaagaagctgatgagcctgggggacatccggctggagcaggaccagaccagcgcccagctgcaggtgcagaagaccttcaccatggagatcctgcggcacaaggacatcattgatgacctggtgaagagcggccacaagatcatgacagcctgcagcgaggaggagaagcagagcatgaagaagaagctggacaaggtgctgaagaactatgacaccatctgccagatcaacagcgagcgctacctgcagctggagcgggcccagagcctggtgaaccagttctgggagacctatgaggagctgtggccctggctgacagagacccagagcatcatcagccagctgcctgccccagccctggagtatgagaccctgcggcagcagcaggaggagcaccggcagctgcgggagctgattgctgagcacaagccccacatcgacaagatgaacaagacaggcccccagctgctggagctgagccctggagagggcttcagcatccaggagaagtatgtggccgctgacaccctgtacagccagatcaaggaggatgtgaagaagagagctgtggccctggatgaggccatcagccagagcacccagttccatgacaagattgaccagatcctggagagcctggagcgcatcgtggagcggctgcggcagcccccatccatctctgctgaggtggagaagatcaaggagcagatcagcgagaacaagaatgtgtctgtggacatggagaagctgcagcccctgtatgagaccctgaagcagagaggagaggagatgattgcccggagcggcggcacagacaaggacatcagcgccaaggctgtgcaggacaagctggaccagatggtgttcatctgggagaacatccacaccctggtggaggagcgggaggccaagctgctggatgtgatggagctggccgagaagttctggtgtgaccacatgagcctgattgtgaccatcaaggacacccaggacttcatccgggacctggaggaccccggcatcgaccccagcgtggtgaagcagcagcaggaggccgctgagaccatccgggaggagattgatggcctgcaggaggagctggacatcgtcatcaacctgggcagcgagctgattgctgcctgtggggagccagacaagcccatcgtgaagaagagcattgatgagctgaacagcgcctgggacagcctgaacaaggcctggaaggacagaattgacaagctggaggaggccatgcaggccgctgtgcagtaccaggacggcctgcaggccgtgtttgactgggtggacattgctgggggcaagctggcctccatgagccccatcggcacagacctggagaccgtgaagcagcagatcgaggagctgaagcagttcaagtctgaggcctaccagcagcagatcgagatggagcggctgaaccaccaggccgagctgctgctgaagaaggtgacagaggagagtgacaagcacacagtgcaggaccccctgatggagctgaagctgatctgggacagcctggaggagcgcatcatcaaccggcagcacaagctggagggcgccctgctggccctgggccagttccagcacgccctggatgagctgctggcctggctgacccacacagagggcctgctgtctgagcagaagcctgtgggcggggaccccaaggccattgaaattgagctggccaagcaccacgtgctgcagaatgatgtgctggcccaccagagcacagtggaggccgtgaacaaggctggaaatgacctgattgagagcagcgctggggaggaggccagcaacctgcagaacaagctggaggtgctgaaccagcgctggcagaatgtgctggagaagacagagcagaggaagcagcagctggatggagccctgcggcaggccaagggcttccacggggagattgaggacctgcagcagtggctgacagacacagagcggcacctgctggccagcaagcccctgggcggcctgcctgagacagccaaggagcagctgaatgtgcacatggaggtgtgtgccgcctttgaggccaaggaggagacctacaagagcctgatgcagaagggccagcagatgctggcccgctgccccaagtctgctgagaccaacatcgaccaggacatcaacaacctgaaggagaagtgggagagcgtggagaccaagctgaatgaaaggaagaccaagctggaggaggccctgaacctggccatggagttccacaacagcctgcaggacttcatcaactggctgacccaggccgagcagaccctgaatgtggccagccggcccagcctcatcctggacacagtgctcttccagattgatgagcacaaggtgtttgccaatgaggtgaacagccaccgggagcagatcatcgagctggacaagacaggcacccacctgaagtacttcagccagaagcaggatgtggtgctgatcaagaacctgctgatctctgtgcagagccgctgggagaaggtggtgcagaggctggtggagcggggccgcagcctggatgatgccaggaagagggccaagcagttccacgaggcctggagcaagctgatggagtggctggaggagagcgagaagagcctggacagcgagctggagatcgccaatgaccctgacaagatcaagacccagctggcccagcacaaggagttccagaagagcctgggcgccaagcacagcgtgtatgacaccaccaacagaacaggccgcagcctgaaggagaagaccagcctggctgatgacaacctgaagctggatgacatgctgtctgagctgcgggacaagtgggacaccatctgtgggaagtctgtggagcggcagaacaagctggaggaggccctgctcttcagcggccagttcacagatgccctgcaggccctgattgactggctgtacagagtggagccccagctggccgaggaccagcctgtgcacggggacatcgacctggtgatgaacctgattgacaaccacaaggccttccagaaggagctgggcaagaggaccagctctgtgcaggccctgaagaggtctgcccgggagctgattgagggcagcagagatgacagctcctgggtgaaggtgcagatgcaggagctgagcacccgctgggagaccgtgtgtgccctgagcatcagcaagcagacccggctggaggccgccctgcggcaggccgaggagttccacagcgtggtgcacgccctgctggagtggctggccgaggccgagcagaccctgcgcttccacggcgtgctgcctgatgatgaagatgccctgcggaccctgattgaccagcacaaggagttcatgaagaagctggaggagaagagagctgagctgaacaaggccaccaccatgggagacacagtgctggccatctgccacccagacagcatcaccaccatcaagcactggatcaccatcatccgggccaggtttgaggaggtgctggcctgggccaagcagcaccagcagaggctggccagcgccctggccggcctcatcgccaagcaggagctgctggaggccctgctggcctggctgcagtgggccgagaccaccctgacagacaaggacaaggaggtgatcccccaggagattgaggaggtgaaggccctgattgctgagcaccagaccttcatggaggagatgaccaggaagcagccagatgtggacaaggtgaccaagacctacaagagaagagctgctgaccccagcagcctgcagagccacatccctgtgctggacaagggccgggccggcaggaagcgcttccctgccagcagcctgtaccccagcggcagccagacccagatcgagaccaagaacccccgggtgaacctgctgctgcgggagtttgccaactttgattttgacatctggaggaagaagtacatgcgctggatgaaccacaagaagagccgggtgatggacttcttcagaagaattgacaaggaccaggacggcaagatcacccggcaggagttcattgatggcatcctgagcagcaagttccccaccagccggctggagatgtctgctgtggccgacatctttgacagagatggagatggctacatcgactactatgaatttgtggccgccctgcaccccaacaaggatgcctacaagcccatcacagatgctgacaagattgaagatgaggtgacccggcaggtggccaagtgcaagtgtgccaagcgcttccaggtggagcagattggagacaacaagtacagagtgtccttccagagcaactttggagacagccagcagctgcggctggtgcgcatcctgcggagcacagtgatggtgcgggtgggcggcggctggatggccctggatgagttcctggtgaagaatgacccctgccgggtgcaccaccacggcagcaagatgctgcggtctgagagcaacagcagcatcaccaccacccagcccaccatcgccaagggccgcaccaacatggagctgcgggagaagttcatcctggctgatggagccagccagggcatggccgccttccggccccggggcagaagaagccggcccagcagcagaggagccagccccaacagaagcacctctgtgagcagccaggccgcccaggccgccagcccccaggtgcctgccaccaccacccccaagggcacccccatccagggcagcaagctgcggctgcccggctacctgagcggcaagggcttccacagcggagaagattctggcctcatcaccacagctgctgcccgggtgaggacccagtttgctgacagcaagaagacccccagcaggcctggcagcagagctggcagcaaggccggcagccgggccagcagccggcggggcagtgatgccagtgactttgacatcagcgagatccagagcgtgtgcagtgatgtggagaccgtgccccagacccaccggcccacccccagggctggcagccggcccagcacagccaagcccagcaagatccccaccccccagaggaagagccctgccagcaagctggacaagagcagcaagaggtag

SEQ ID NO: 258064 - DNA, 16374 bp, Artificial Sequence
  derived and/or modified sequence
atggccggctacctgagccccgccgcctacctgtacgtggaggagcaggagtatctccaggcttacgaagatgtgctggagagatataaggacgaacgtgacaaagtacagaaaaagacattcactaaatggatcaaccagcatctaatgaaagttaggaagcacgtcaacgatctgtacgaagatcttagagatggccacaacctcatatcactcttagaagtactgagcggcgatactttaccgcgtgagaagggcagaatgcgtttccaccggctccagaacgttcagattgctctggattatctgaaaagacggcaagtcaagctagtgaacatccgtaatgacgacattaccgatggaaaccctaaattaactctcggactgatctggactattattttacattttcagatcagcgatatccatgtcactggagaatccgaggatatgtcggctaaggaacgcctcctactgtggactcaacaggccactgagggttatgctgggatccgctgcgagaatttcactacttgttggagggacggcaaactgttcaatgccatcatccataagtaccgcccagatctgattgacatgaatacagttgccgtgcagtcaaacctggcaaatctggaacacgctttctacgtggctgagaagatcggcgtaattcgactgctggatccagaagatgtagacgtttcttcacctgatgaaaagagtgttataacttacgtgagtagcttgtacgatgccttcccaaaggtgccagagggcggggagggcataggagcaaacgacgtagaggtcaagtggatcgagtaccagaacatggtcaattacctcatacagtggattcgccatcatgtaacgaccatgtcagaacggaccttcccaaataaccctgtggagctgaaggctttgtacaaccagtaccttcagtttaaagaaacggagattcctcctaaagagaccgaaaagagtaagatcaagaggttgtataaactgctggaaatatggattgagtttggacgcatcaagttactccagggctatcaccccaatgatatcgagaaggaatggggtaagctaatcatcgccatgctggagcgcgagaaggctctaaggcccgaggtcgagcgactggagatgctgcagcagatagccaatcgcgtgcaaagggatagcgtgatttgcgaggataaattaattctagccggcaacgctctgcagagtgacagtaagcggctcgaatccggtgtgcaattccagaatgaagccgagattgctgggtacattctcgaatgcgaaaacctcctaagacagcatgtaatagatgtgcagattcttatcgacgggaagtactatcaggcagatcagctggtgcaacgtgtagctaaactcagggatgagatcatggcccttagaaatgaatgctcctctgtgtattctaagggcagaatccttaccacagaacagacgaaacttatgatttctggcattacccaatctcttaatagcggcttcgcccagaccttgcatccatcactcaccagcggactgacgcaaagcctgacacccagtcttacttcctccagtatgacgtcgggactcagcagtggaatgacaagccggcttacaccatccgtgacgccagcatacactcctggattcccctctggattggtaccgaacttttcaagtggagtagaacctaactcactacaaaccttgaagcttatgcagattaggaaaccgctcctgaaaagcagcctgctcgaccagaatctgacagaggaggaaatcaatatgaagtttgtgcaggatttgctgaactgggtcgatgaaatgcaagtgcagttggaccgaacggagtgggggtcggatctacccagtgtggaaagtcatctagagaatcacaaaaacgtgcatcgagcgatcgaagaattcgaatcctctctgaaggaagctaagatcagtgaaattcagatgaccgccccattgaagttgacatatgccgagaaactgcaccggctggagtcccaatacgccaaactccttaacacctctcgaaaccaggagcgccacctggatacactgcataactttgtgtcccgtgccaccaatgaactgatctggttaaatgagaaagaagaagaagaagtggcctacgattggagcgagcggaatacgaatattgcccgaaagaaggactatcatgcggaacttatgcgcgagctggaccagaaagaggagaacataaaatccgtgcaagagattgctgaacagttactgctcgagaaccatcccgcaaggctgactatagaggcctaccgagccgccatgcaaacccagtggagttggatcttgcagctgtgccaatgcgtagaacaacacatcaaagagaatactgcttattttgaatttttcaatgatgcaaaagaggcaactgattacctgcggaacctcaaggacgcaattcagcgtaaatactcttgtgaccgaagctcaagcattcacaaactggaggatcttgttcaggaatccatggaggagaaggaggaactgttgcagtacaaatctaccatagctaatctgatgggaaaagccaagactataattcagttgaagccgagaaatagcgattgccccctcaagacttcgatcccaattaaggcaatttgcgattatcgtcagattgagattaccatctacaaggatgatgaatgtgttcttgcaaataacagccaccgggccaagtggaaagttatatcgcctaccggcaacgaggctatggtgccctccgtctgtttcactgtacctcctccaaataaagaagccgtggacctggctaaccgaattgagcagcaataccagaatgtgctcacattatggcatgaatcgcatattaacatgaagtctgtggtgtcatggcattacttaattaacgaaattgacagaatcagagcctccaacgtagctagcatcaagacgatgcttcccggcgaacaccagcaggtactatcaaacttgcagtctaggttcgaggacttcttggaggacagccaagaatctcaggttttcagcggcagtgacataacccagctcgagaaggaagtgaatgtgtgtaaacagtattatcaggagcttctcaagagcgctgagagggaggaacaagaagagtccgtctataacctgtacatcagcgaggtccggaatatccgccttaggcttgaaaattgcgaagatcgtctgatcaggcagattagaacccctctcgaaagagacgacttgcatgagtccgtgtttcggatcaccgagcaagaaaaactgaagaaggagctggagagactgaaagacgatctggggacaattaccaataagtgtgaggagtttttctctcaggccgctgcctctagcagcgtcccgacgctgagaagcgagctgaatgtggtcctacagaatatgaatcaggtttattctatgagcagcacctatatcgacaagctaaagaccgtaaacctcgttctcaagaacactcaggctgcagaggctctggtcaagctgtatgagaccaaactgtgcgaagaggaagcagtgatcgcagataaaaacaatatcgaaaatcttatctctacactgaagcaatggcgcagtgaggtcgatgagaagaggcaagttttccacgcactggaggacgagctgcaaaaggcgaaggctatttcggatgagatgtttaagacctataaggagcgagacctggatttcgactggcataaggaaaaagccgaccagctcgtggagcgttggcaaaacgtgcatgtgcagatcgacaacaggctgcgcgatctcgagggaatagggaaaagcttgaaatactaccgtgacacataccatcccctggatgactggattcaacaggtggagacaacccaacgaaagatccaggaaaaccaacccgagaactcaaaaaccctggcgacacagctcaaccaacagaagatgctagtttcggagatcgagatgaaacagtccaagatggatgagtgtcagaaatacgccgagcagtactccgcaaccgtgaaggattacgagctccaaaccatgacgtaccgggctatggtggattcccagcagaagagccccgtgaagagaagacgcatgcaaagctctgctgatctgatcatccaggagttcatggacctgagaacaagatacacagctctggtcaccttaatgacccaatatataaaattcgccggcgattcactcaaaaggcttgaagaagaagagaaatcactggaggaggagaaaaaggaacatgtcgagaaggctaaagaactgcagaaatgggtctccaacatctcaaagactctcaaggacgcagagaaggctggcaagccaccatttagtaagcaaaaaatctccagcgaggagataagtacaaagaaggagcaacttagtgaggccctccagacaatccagcttttccttgctaagcatggggataagatgacggatgaggagcgtaacgaactggaaaaacaggtgaaaacactccaggaatcttacaacctgctgttctctgaatctctcaaacagttacaggaaagccaaacctcaggggatgtcaaggtggaggagaagattgtcgcagaacggcagcaggagtacaaggaaaaattacagggaatctgtgatctcctgactcaaaccgagaatcggttaataggccatcaagaagcctttatgattggggacggaaccgtcgagctgaagaaatatcagagtaagcaggaagaactgcagaaggatatgcagggctcagcccaggctctggcagaagtggtgaagaatacagagaacttcttaaaagaaaatggcgagaagctgtctcaggaggacaaagctctcattgaacaaaagctgaacgaggctaagatcaaatgtgaacagctgaacttgaaggccgagcagagtaagaaggagttagacaaggtggtcacaactgcaatcaaggaagagacagagaaggtcgccgcagtgaagcagctggaagagagtaaaacgaagatagagaatctcttggattggttatcgaacgtcgacaaagactccgagcgagcaggcacaaagcataagcaggtgatcgagcagaacggaacccactttcaggagggggacggaaaatccgctattggggaggaagacgaagtgaacggcaatctgttagaaaccgatgttgacgggcaggtcgggaccacacaagagaatttgaatcagcaatatcagaaggtgaaagctcagcatgaaaaaattatcagtcagcaccaagctgtgatcattgctactcaaagtgcccaggtcctgttagaaaagcagggccagtacctttcacccgaggaaaaagaaaagttgcagaagaacatgaaagagctgaaagtgcattatgagacagcactggccgaatccgagaagaagatgaagctgacacattccctgcaagaggagcttgagaagtttgatgctgattacaccgaattcgagcactggcttcagcagagtgaacaagagcttgaaaacctggaagcaggggcagatgatataaatggccttatgaccaaacttaaacggcagaaatcattcagtgaagatgtcattagccacaagggcgacctcagatacataactatcagtgggaaccgcgtactcgaggcagctaagtcttgttccaaacgcgatggagggaaagtggatacgagtgcgactcatcgggaggtccagcgaaagctggatcacgcaaccgaccgctttagatcactttattccaagtgtaatgttctggggaacaacctcaaggacctggttgataaataccagcattatgaggatgcgtcgtgtggtctcctcgcagggcttcaggcctgtgaggccacagcctccaagcatctctctgaaccgattgccgtcgatcctaaaaacctgcagcgtcagcttgaagagactaaggccctgcaggggcagatttccagtcagcaggtggccgtggagaagctcaagaaaacggctgaagtcttgctggatgccagaggctcgctacttccggcaaagaacgatatacagaaaactcttgacgatatcgtgggcagatacgaggatttatctaagtctgtcaatgaacggaatgaaaaattgcagatcaccctcactcggagcctctccgtccaggacggactcgacgagatgctggactggatgggcaatgtggaatcgagcctcaaggaacaagggcaggtccctctgaacagtaccgcccttcaggacattatctccaaaaacatcatgctggaacaggacattgctggacggcaatcatctattaacgccatgaatgagaaggtgaagaagttcatggagacaaccgaccctagcactgcctcaagcttacaggccaaaatgaaggaccttagtgcccgcttcagtgaagcatcccataaacacaaagagacactggccaagatggaggaactgaagacaaaagtggagctcttcgagaacctgtctgagaaactccagacattcttggagacgaaaacacaggcacttacggaggtggatgttcctggcaaagacgtcaccgagcttagtcagtatatgcaagaatcaacctccgagttcttagagcataagaaacacctggaggtcctccacagcctcctgaaagaaatcagcagccacggacttccttccgacaaggccctggttctggagaagaccaacaatctgagtaaaaagttcaaagagatggaagacacgatcaaggagaaaaaggaagccgtgacatcctgccaggagcagctcgacgccttccaagtcttggtaaagtcccttaaatcatggattaaggagacgaccaaaaaggtgcctattgtccagccatccttcggcgccgaagaccttggaaagagtcttgaggatactaaaaaattacaggagaagtggtctctgaagactcccgagatacagaaggtcaacaactcgggtatctctctgtgtaacctgattagtgctgtgactacgcccgcaaaagcgattgctgccgtcaagtccgggggggctgtcctgaacggagaaggcaccgccaccaacacagaggagttctgggcgaataaaggcctgacatccattaaaaaagatatgaccgacatctcccacggctacgaagacctggggttgctcctcaaggataaaatcgctgaacttaacaccaagttgagtaagctgcagaaagctcaggaagagagttcagctatgatgcagtggctccagaaaatgaataaaactgctaccaagtggcagcaaacgcccgcccccactgacactgaagccgtgaagacgcaagtcgaacagaacaaatctttcgaagccgagctgaagcagaatgtgaacaaagttcaagaactgaaggacaagctcacagaactcctcgaggagaatcctgacacccctgaagcgccgaggtggaagcagatgctcaccgagatcgactcaaaatggcaagaactgaatcagctcactattgacagacaacagaagctcgaggaatcttccaacaacttgactcagttccaaaccgtggaggctcagctgaagcagtggttggtggagaaggagttgatggtttccgtcctgggacccctatcaatcgacccaaacatgctgaatacacagagacagcaggtgcagatcttactgcaggagttcgccaccagaaagccacaatatgagcaacttaccgctgccggccagggaatcctgagtcggccaggcgaagacccttctctgcgcggaatagtgaaagaacaactcgccgctgtcacacaaaaatgggacagtctgaccggccagctttctgatagatgcgactggattgaccaggccatcgtgaagtctacccagtaccagagtctgctgcggtccctcagcgacaagctttccgatttagacaacaagcttagctcctctctggcagttagcacgcatccagatgccatgaatcagcagctagagaccgcacagaagatgaaacaggagatccaacaggagaaaaaacaaatcaaagtggcacaggctctctgcgaagatttatccgctctggtaaaggaggagtatctcaaggccgagctgagtcgccagctggaggggattctgaagtcattcaaagacgtggaacagaaagccgaaaaccacgtgcagcacttgcaatctgcctgtgccagttctcatcaatttcaacaaatgagtcgggacttccaggcctggctggataccaagaaggaggaacagaataagagtcatcccatctccgctaaactggacgttcttgagagtctgattaaggatcacaaggactttagtaagacactgacagcccaatcacatatgtatgaaaaaactatcgctgagggtgagaacctcctgctaaagacgcaggggagcgagaaagcggcccttcagctccagctaaataccataaagactaattgggacaccttcaataagcaggtaaaggagcgggagaataagcttaaagaaagcctcgaaaaagcccttaaatacaaagaacaggtggagacgctgtggccatggatcgacaaatgtcaaaacaatcttgaggagataaagttctgtcttgatccagcagaaggagagaattcaatagccaagctgaaatcccttcagaaagagatggatcagcattttggtatggtggagttgctcaacaacacagctaactccttgctgtcggtctgcgagattgacaaggaagtggtcactgatgagaataaatccctgatccaaaaagtagatatggtcactgaacaattacatagcaagaagttttgcctcgagaatatgacgcagaagtttaaggagttccaagaggtctctaaagagtccaaacgccaactccagtgcgctaaggaacaactggacatccacgatagcctgggaagtcaggcctacagtaacaaatacctgacgatgctgcagactcaacaaaaaagcctccaggccctaaagcaccaggtggatcttgctaaacgtctggcacaggacctcgtcgttgaggcatctgattctaaggggacctccgacgtcttactccaagtggaaacaattgcacaagagcacagtacactgtcacagcaagtggacgaaaaatgcagtttcctggagaccaaactccagggaattggtcattttcaaaatactattcgggaaatgttcagccagtttgcggaattcgacgacgagctggactccatggcacccgttggcagagatgcggagacactgcaaaagcaaaaagaaacaattaaagcgtttctgaaaaagctggaagccttaatggcatccaatgataatgccaataaaacttgcaagatgatgttagctactgaggaaacgtctccagacttggttggtatcaagcgggatctagaagccctgagcaagcaatgcaataaacttctggatcgggcccaagccagggaagaacaggtggagggcaccatcaagagactggaagaattttacagcaagctgaaggaattcagcatcctgctgcagaaagccgaggaacacgaagaaagccagggacccgtgggtatggagactgaaacaataaaccagcagctgaatatgttcaaggtctttcagaaagaagaaatcgaaccgctgcaaggcaaacagcaggacgttaattggttgggccagggccttattcaatccgcagcaaagtctacaagcacacagggtctcgagcacgatcttgacgacgtgaatgcccgctggaagacattaaacaaaaaagttgcccagcgcgcagctcaactgcaggaggcgcttctgcactgcgggcggtttcaggacgcccttgagtcacttctttcatggatggttgacacagaggagctggtagctaatcaaaaaccccccagcgccgagttcaaggtggtgaaagctcagatccaggagcaaaagcttttgcaaagactcctggatgataggaaatctactgtcgaggttataaaacgggaaggagagaagattgctaccacggcggaacccgctgacaaggtgaagattcttaagcagttatctcttctggactctagatgggaagcgcttcttaataaggccgagacccggaatcggcagctcgaaggtatttccgtggtggctcagcagtttcatgagacattggaaccactgaatgagtggcttaccacaatcgaaaagaggctggtgaattgtgagccaataggcacgcaggcttcaaagttagaggaacagattgctcaacataaggccctagaggacgacatcatcaatcataacaaacacttgcatcaagccgtctcgattggtcaatcgctgaaagtcctttcctctagggaggataaagacatggttcagtctaagctggatttctctcaggtgtggtacattgagatccaggaaaaatcacactcgaggtccgagctgcttcaacaagccctctgcaacgctaaaatctttggggaggatgaggttgaactgatgaactggctcaatgaagtgcatgataagctctctaaactgagcgtacaagactatagtactgaggggctttggaaacaacagtccgagctccgcgtattacaggaagatatccttctgaggaagcagaacgttgaccaggcattgctgaacgggttggagttgctgaagcagaccacaggggacgaagtacttattattcaggacaagctggaggcgattaaggcccggtacaaagacatcaccaagctgtctaccgatgtcgccaaaactttagagcaggctcttcagctagcccggcgcttgcacagcacccatgaagaactctgcacgtggctggacaaagtggaggtggagcttttatcatatgagactcaagtactgaaaggggaggaggcaagtcaggcgcagatgagaccaaaggagttaaagaaagaagctaagaacaacaaggccctcctcgactccctcaatgaggtttcaagtgctctgctcgaactggtgccatggcgcgccagagagggcctcgagaagatggtcgccgaggacaacgagcgctacagactcgtatcggacaccatcacacagaaggtggaggagattgatgccgccatattacgatctcagcagtttgaccaggcagcagacgctgagctttcctggataaccgagaccgaaaagaaactgatgtcgcttggggacatccgactcgaacaggaccagacttcagctcaactccaggtgcagaagaccttcacaatggagattttacgacacaaagacatcatagacgatttagtgaagtctggccataagatcatgacggcttgctctgaggaggaaaaacaaagtatgaagaagaagctcgataaagtccttaaaaattacgatactatttgtcaaataaattctgagcggtacctacaactcgagagggctcagtctttagtgaatcagttttgggaaacctatgaggagctttggccctggctgacggagacgcagagcatcataagccagcttcccgcccccgcgctggaatacgaaaccctgcgtcaacaacaggaggagcaccggcagctgagggaactaatagctgaacacaaacctcacatcgacaaaatgaataagacaggcccccagctgttagagctttcccccggcgagggcttttccattcaggagaagtacgtggctgccgacacactgtacagtcagataaaggaagacgtgaagaagagggctgttgcactcgacgaggcgatcagccagtctacccagtttcatgacaaaatagaccagattcttgagtccctcgaacgtatagttgagcgcctgcgacaaccaccaagcatctccgcagaagtggagaagattaaagaacagatatctgagaacaagaacgtgagcgtggatatggagaagctgcagcccctctatgagactttgaaacagcgcggagaagagatgatcgcccgtagcggtggcaccgacaaagacatctcagccaaggccgttcaggacaagctcgatcagatggtttttatatgggagaacattcacacgctggtggaggaaagggaggctaaacttttggacgtgatggaactcgccgagaagttttggtgcgaccacatgtctctcatagtgactataaaagatacacaagatttcattcgcgatctagaagacccgggaattgatccatccgtggtcaagcagcagcaagaagccgctgagaccatccgggaagaaatagatggacttcaggaggagcttgacattgtaattaatctggggtcagaactgatcgccgcctgcggggaaccagacaaaccaatcgtcaaaaagagtatcgacgagctgaattccgcatgggactcgctcaacaaggcatggaaggaccggattgacaaacttgaggaagccatgcaggccgctgtgcagtatcaggacggacttcaggctgtgtttgattgggtagacatcgccggaggtaagctggcctccatgtcacctattggcactgacttagaaaccgttaaacagcagattgaggagctcaagcagtttaaatctgaggcctaccagcagcaaatcgagatggagcggctgaaccaccaagcagagctcttattgaaaaaggtgactgaggagtcagataagcacacagtgcaggacccactgatggaactcaagctaatctgggatagcttagaggaacggattatcaacaggcaacacaagctggaaggcgccctgcttgcgctcggtcagtttcagcacgcactcgacgagctcctggcctggctgacccatacggaaggcctgctgtccgaacaaaagcctgtaggaggtgaccccaaggccatcgagatcgaactggctaagcaccatgtcctgcagaacgacgttctcgctcaccagtcaaccgtggaggccgttaacaaggcagggaacgacttaatcgaatccagcgcaggggaagaggcctccaacctccaaaataaactggaggtgttaaaccagcggtggcagaacgttctcgaaaagacagagcagcggaagcagcagctggacggtgcccttaggcaggccaagggattccacggtgagattgaggatcttcagcagtggctgacagataccgagaggcacttgctcgcctctaagcctttgggtggcctcccagaaactgccaaggaacagctcaacgttcatatggaggtgtgtgcagcctttgaagccaaggaggaaacctacaagagcctgatgcagaaggggcagcaaatgctcgcccgctgcccgaagagcgctgaaactaatatcgaccaggatatcaataatttaaaggaaaaatgggaatccgtagaaacaaagttgaacgagcggaaaactaagctggaagaggcgctcaacttggccatggagtttcacaatagcttacaggattttatcaattggttgactcaggcggagcagactctgaatgtggcctctagaccgtccttaatcctagacacggttctcttccagattgacgagcacaaggtttttgctaatgaggtgaactctcatcgcgagcaaattattgaacttgacaagacgggcactcatctcaaatactttagtcagaagcaagatgtcgtgctgatcaaaaatctgttgatctccgtgcagagccgatgggagaaggtcgtgcagaggcttgtcgagaggggacgctcactcgatgacgctagaaagcgcgctaagcagttccatgaagcctggagcaaattgatggagtggctagaagaaagtgaaaagagcctagacagtgagctggaaatcgcaaatgaccccgacaaaatcaaaactcaattggcacagcacaaagagtttcagaagtcactgggtgcgaaacactccgtatatgatacaactaacagaacaggcagatctttgaaagagaagacatccttggcagacgacaacttgaaactagacgacatgctctctgaactgagagacaagtgggacaccatttgcgggaagagtgttgaaaggcaaaacaagctagaggaggctttactctttagcggccagttcacagacgccctgcaagctctcatcgattggctgtaccgggtcgagccacaactcgctgaggaccagccggttcacggcgacattgatttagtcatgaatctgatcgataaccacaaggcttttcagaaagaattgggtaagcgcacttccagcgtgcaggcgttgaaacggagcgccagggaactgatagagggaagcagagatgacagctcttgggtaaaagtccagatgcaagaactgtctacaagatgggaaaccgtatgcgccctttcaatctccaaacagaccaggttggaagctgccctgcgacaggccgaagaattccactcagtggtccacgcactgctggaatggctcgctgaagcagaacagactctcagattccacggtgtgcttccagatgacgaggatgctctgcggacactgatcgatcagcacaaggaattcatgaagaagctggaagagaaaagggccgagctgaataaagccaccaccatgggcgacactgtccttgccatatgccatccagactccattactaccatcaaacactggataacaatcatcagagcccgctttgaggaggtgctcgcgtgggcgaaacagcatcagcagcgattagccagcgccctggccggacttattgctaaacaagaattgttggaagctctgctggcctggctgcagtgggcagagactactcttaccgacaaagataaggaggtgatcccccaggagattgaggaggtgaaggcactgatcgccgaacatcagacatttatggaagagatgacacggaaacaaccagacgttgataaggtgaccaaaacgtacaaacgtcgggccgctgacccctccagtctacaatcacacattccagtgcttgataagggcagagccggacgcaaaaggttccccgcttcttctttgtacccttctggctcccagacccagatcgagaccaaaaaccctagagtaaacctgctcttacgagaatttgcaaactttgactttgacatttggcgaaagaaatacatgagatggatgaaccacaagaaaagccgggtaatggacttcttcaggaggattgataaggaccaggatggcaagatcaccagacaggaatttatcgacgggatactcagttccaagttccctacttcaagactggagatgtctgccgtcgccgacatcttcgatcgagatggcgatggatatattgactattacgaatttgtggccgccctgcatccaaacaaggatgcttacaagccaattacagatgccgacaaaatcgaagatgaggttacacggcaagtggctaagtgcaaatgcgcgaagagatttcaagtggagcagatcggggacaataaatatagagtgtcatttcagtcaaattttggtgacagccagcaacttagactagtgcggattttgcgcagtaccgtgatggtgcgtgttggggggggatggatggccctcgatgagttcttagtcaagaacgatccttgccgagtgcatcatcacggaagcaaaatgctcagatcagagagcaatagcagcatcaccaccacacaaccaaccattgccaaaggccgtaccaacatggaactacgggagaagttcatcttggctgatggggcaagtcaaggtatggccgcttttaggcccagaggccgtcgttccagaccttcatccagaggcgcgtccccgaataggtcgacttccgtttcctcacaggctgcccaggcagcctccccgcaggtgcctgccactacaacccccaaaggcactcctatccagggatcaaagttgcggctacccggctacctgtctggaaagggcttccatagcggcgaggattccggtcttattacgactgcagctgcgcgggtgagaactcagttcgcagactccaagaagacgccgtctaggcctgggtcccgagcaggtagcaaggctgggagtcgcgcctcttcccgtaggggatcggacgcgtctgatttcgatatcagcgagattcagtccgtttgctcagatgtcgagacagtgccgcaaactcaccggccaaccccacgggctgggagccggccgtctacagccaaacctagcaagatccctactccccagcggaagagtccagcctcaaagctcgataagagcagtaagcggtag

SEQ ID NO: 258065 - DNA, 16374 bp, Artificial Sequence
  derived and/or modified sequence
atggcagggtacttgtcaccagcagcctatctgtatgtggaagagcaggagtatctgcaggcatatgaagacgtgctggagaggtacaaggacgagagggataaggtccaaaagaagaccttcactaagtggattaaccagcacctaatgaaagtgcggaagcatgttaatgacctttacgaagatctgcgggacggtcacaacttgatcagtttgctggaggtgcttagtggagacacactccctcgagaaaagggaaggatgaggttccaccgtctccaaaatgtgcaaatcgccttggactatctgaaacggaggcaggtcaagctggtaaatatacggaatgacgacattactgacgggaatcccaagctgaccctagggctgatctggacaattatcttacactttcagattagtgacattcacgttactggcgagtccgaggacatgtctgctaaggaaagactcttgctttggacacagcaagcaactgagggttatgcgggaatcaggtgcgagaatttcacgacatgttggcgcgacggaaaactattcaacgccataatccacaaatatcggccagacctaatagacatgaataccgttgctgttcagtccaatcttgcaaatcttgaacacgccttttatgtcgcagagaaaatcggcgtgataagactgctggatcccgaggacgtggatgtgtcttcaccagatgagaagagcgtgataacctacgtaagctccctgtatgacgcttttccgaaggtgccagaggggggagaaggcattggcgcaaatgatgtggaggtgaagtggatcgagtaccagaacatggtgaactacctgatacagtggatcagacaccatgtcactacaatgagcgaacgcacattcccgaacaatccagtggagctgaaagccctctataatcagtacttacagttcaaggaaactgagataccccctaaggagacagaaaaaagcaaaataaaaagactgtacaaattgctggaaatatggatagaatttggaagaatcaagctgcttcagggttaccatcctaatgacattgagaaggagtgggggaaacttatcatagctatgttagaaagagagaaggccctcaggccagaggtggaacggttggagatgttgcagcagatcgcgaaccgggttcagagagactccgttatctgcgaagacaagttgatactcgccggtaacgcccttcagtctgactcaaaacgcttagaatccggcgtgcagttccaaaacgaagcggagatcgccggttacatcctcgagtgtgaaaatctgcttcggcagcatgtgattgacgtgcaaattctcatcgacggtaaatattatcaggcagatcagttggtacaaagggtcgcaaaacttagggacgagatcatggcattaagaaatgaatgctctagcgtgtacagtaaaggccgtattttaacgaccgaacagacgaaactgatgatcagcggcattactcaaagcttgaatagcgggttcgcccaaacactgcatcccagtctgacaagtggcctgacccagagcctgacccctagcctcacttctagcagcatgactagcgggctgtcttcaggaatgacaagtagactcaccccttccgtcacccctgcctatacccctggatttccatcaggactagttcctaacttttcttctggtgtggagccaaatagccttcaaaccctgaagctaatgcaaataagaaagccactgctcaaatcaagcctcctggaccagaaccttacagaggaggagattaatatgaaatttgtgcaggatttgttgaactgggtggatgaaatgcaggtccagctggatcgaaccgagtggggctcagatttacctagtgtcgagtcccatctagaaaaccacaagaatgtgcatagggccatcgaagagtttgagtcttcccttaaagaagccaaaatcagcgaaatccagatgacggctcccttgaagctgacatatgccgagaaactgcatcgcttagaatctcaatacgcaaagctactgaacactagtcggaaccaggagcgccacctggacacactccacaactttgtttcccgagctacaaacgagttgatctggctcaacgagaaagaggaagaagaagtagcatacgattggagcgagaggaatacaaatatagccaggaaaaaggattatcatgccgaactcatgagggaactcgatcaaaaagaagagaatattaaatctgtgcaagagatcgcagaacagctcctgctcgaaaatcatcccgctcggctgacaatcgaggcttaccgggcagctatgcagacacaatggtcatggatcttgcaactttgtcagtgtgtcgagcaacatattaaggagaacacagcctattttgagttttttaacgacgcaaaggaagctaccgattacctgcgaaatctcaaggacgcaatccagaggaaatactcctgtgatcgctccagctctattcacaaacttgaagacttggtgcaggagagcatggaggagaaggaggagttgctccaatataaaagcacaattgccaacctgatgggtaaagcgaagactataattcagttgaagcccagaaactcagactgtcctctaaagacaagtattcctatcaaggctatctgtgattataggcagatagaaataacaatctataaagatgacgagtgtgtccttgctaataattcgcatcgagccaagtggaaggtgatctcccccactggtaacgaagccatggtgcccagcgtttgcttcaccgtcccaccacctaataaggaagccgtggacctcgctaaccgcatcgagcaacagtaccagaacgtgctcaccctgtggcatgagtcccacattaacatgaagtcagtggtatcctggcattacctcatcaacgaaatcgatcgcatccgtgcttctaacgtggcatctatcaagactatgcttccaggcgagcaccagcaggttctgtccaatttgcagagccgctttgaggactttctcgaggattcacaagaatcccaggttttttctgggtccgacatcactcagctcgagaaagaagtcaatgtgtgcaaacaatattatcaggaattactaaaatcagccgaacgcgaagaacaggaggagtccgtctacaacctgtacatctcagaagttagaaacatccggctccgcttggagaattgtgaggacagactgattcggcagatccgcacccccctggagcgagacgatctgcacgagtccgtgtttcgtattacagagcaggagaagctgaaaaaagaacttgagcggttaaaagacgatttggggacgatcacaaataagtgcgaggagttcttctcccaagccgctgcctcttcgagcgtccccactttacgctctgagctaaatgtggtgctgcaaaatatgaaccaggtttactcaatgagctcaacctatatagataaacttaagacagtgaacctcgtcctcaaaaatacccaggccgcagaggctttggtgaaactgtacgagaccaaactgtgcgaggaagaggctgtgatcgctgacaagaataacattgaaaatttaatctcaaccctcaaacagtggcggtcagaagtcgacgagaagaggcaggtatttcatgctctggaggatgagctgcagaaggccaaagccattagtgatgagatgttcaagacatataaggagcgtgaccttgactttgactggcacaaggagaaggctgaccagctagtggagagatggcaaaatgtgcacgtacaaatagataaccgactaagagatcttgaggggatcggaaagtcccttaagtactaccgcgacacctaccatcccctggatgattggattcagcaggtggagaccacacagcggaaaatacaagaaaaccagcctgagaattccaaaacacttgcgacccagctcaatcagcaaaagatgctggtgtctgaaattgaaatgaaacagtccaaaatggatgaatgccagaaatacgcagagcagtattctgcaaccgtcaaagactatgagttgcagactatgacatatcgggcaatggtggacagccaacagaaatctcccgtcaaacggagacgcatgcaaagttctgcagatttgattatccaggagtttatggatctacggacgagatataccgccctggtgaccttgatgacgcagtacataaaatttgccggtgacagcctgaagagattagaagaggaggaaaagagcctggaagaagagaaaaaagaacacgtggagaaagccaaggagctgcaaaagtgggtctccaacatctccaaaacactcaaagacgctgaaaaggcgggtaagccccctttttctaagcagaagatctcgtcagaggagatcagcactaaaaaggagcagctttcagaagctttgcaaacaattcagttgttcctcgcaaaacacggagataaaatgaccgatgaagagcggaatgagctcgaaaagcaggttaaaaccctccaggagagctacaatctgctgttctctgagtcacttaagcaactccaagaaagtcagacatctggagatgtcaaagtggaggaaaaaattgtggctgagaggcaacaggaatacaaggagaagctgcaagggatttgcgatttgctcactcaaacagagaacaggctcatcggacatcaggaggcctttatgattggggatggaacagtggagctgaaaaagtatcagagcaaacaagaggagctacagaaagatatgcagggctccgcccaggctctggccgaggtcgtgaaaaatactgaaaatttcctgaaagaaaatggcgaaaagctgagccaggaagacaaggcgctgatcgaacagaagttgaacgaagccaaaatcaaatgtgagcaactcaacctgaaggccgaacagtctaaaaaggaactggacaaggtcgtaaccaccgctatcaaggaggagaccgaaaaggtggctgccgtgaagcagttggaggagtctaagaccaagattgaaaatctgttggattggctgtctaatgtagacaaggactccgagagggcgggtacaaaacataagcaagttattgagcaaaatggtactcactttcaggaaggggatggtaaatcggctataggagaggaggacgaagttaacggaaatctgcttgaaaccgatgtagacggacaagtggggactacacaggagaatctgaatcagcagtaccagaaagtcaaagcccagcacgagaagattatcagccaacatcaggctgtgatcattgccactcaatcggcccaagtcctactagaaaaacagggccagtatttgtcaccagaggagaaagagaagctacagaagaatatgaaagagctaaaggtacattacgagaccgctttagctgagtcagagaaaaagatgaaattaacgcattcattgcaggaggaactagaaaagttcgacgccgattatacagaattcgaacactggctccagcagagcgaacaggagcttgagaatctggaggccggagccgacgatataaatggcttgatgactaagctaaagcgtcagaagagcttcagcgaagacgtgatctcacacaagggcgaccttcgttacattaccatctcggggaaccgcgtcctcgaagccgctaagtcctgctcaaagcgggacggcggaaaagttgatacctccgcgacccatcgtgaggttcaaagaaaactggaccatgctacagataggttccggagcctgtactccaagtgcaacgtgctgggtaataacttgaaagacctggtggacaagtaccaacactacgaggatgcatcttgcgggctactggcaggccttcaagcttgtgaagccaccgcatccaagcacctgagcgaacccatagccgtggacccgaagaatcttcagcgccagttggaagagactaaagctctgcagggccagatttcatcacagcaagtggcggtcgagaagcttaagaagacagctgaagtgctcttagacgccagggggagccttcttccagcaaaaaacgacatccagaaaacgctggatgatatcgtaggcaggtatgaggacctgagcaagagtgtgaacgagagaaacgaaaagctgcagatcactctgacccggagtctgagcgtccaggacggacttgacgagatgcttgattggatggggaatgtggaatcttccctgaaagagcagggccaggtgcccttaaattccaccgcgctgcaggatatcatcagtaaaaacattatgcttgagcaggatatcgcgggaagacagagcagcattaacgctatgaatgaaaaggtgaagaagttcatggagaccacagatccatccacagcttccagcctgcaggctaagatgaaagacctctcagcaaggttctcggaggctagccataagcataaggagaccctcgccaagatggaagaattaaaaaccaaagtggagctgttcgagaatttgtctgagaaactgcagacttttctggaaacaaaaacacaggcactcaccgaagtcgacgtgcccggtaaggacgtcacagagctgagtcagtatatgcaggagagtacaagtgaattcctggaacataagaaacatcttgaggttctccattcactccttaaagaaatcagctcacatggcctcccgtccgataaggctctggtgctggagaagacgaacaatctgtccaaaaaattcaaggaaatggaggatacaatcaaggaaaagaaagaagctgtcacgagttgccaggaacagctcgacgcgtttcaagtgctcgtaaaatccctcaagtcctggattaaggaaacgaccaagaaagtgcctatagtgcaacctagcttcggggctgaggaccttggaaaatccctggaagatactaagaaactacaggagaagtggagcctgaagactccagagatccaaaaggtaaacaactccggtatatccttgtgtaatctaatttccgccgttaccacaccagccaaagctatcgctgccgtcaaatccggcggagctgtcctgaatggcgaagggaccgccaccaataccgaagagttctgggctaacaaagggctaacctcaatcaagaaagacatgacagacatttcccatggctacgaggacctgggtctgttgctgaaggataagatcgctgaacttaatactaaattatccaagttgcagaaagcccaagaggagagctcagccatgatgcaatggcttcagaagatgaacaagactgccacaaagtggcaacaaactcccgctccaaccgatactgaggcagtaaagacccaagtggagcaaaacaaatccttcgaagcagaactgaagcaaaatgtcaataaggtgcaggaactgaaagacaagcttacggagctcctggaggagaacccggatacgccggaagccccaaggtggaaacagatgctgactgaaatcgactctaaatggcaggagctcaaccagctcactattgaccgccagcagaagcttgaggaatcttccaataacctgacccagtttcaaacagtggaagcccagctgaaacagtggttggtagagaaagagctaatggtctcagtgcttgggcctttaagtattgatccaaatatgctcaacacccagcgtcagcaagttcagattcttcttcaggaattcgccacaaggaaaccacagtacgagcagttaactgccgctggacaaggtatcctctctcgcccaggcgaagatccatctttacggggaatcgtcaaggagcagctggctgctgtgactcagaagtgggacagtctgactggacagctgagcgacagatgtgactggattgatcaggccattgtgaaaagcacacagtatcaatccctgttgagatctttatcagacaaactgtctgatctggataataagctgtcgtccagtttggcagtaagcacccatcccgacgcgatgaaccagcagctggagacggcccaaaaaatgaagcaagagatacagcaggagaaaaaacagatcaaggtagctcaggctctgtgcgaggatttatccgcactggtcaaggaggaatatttgaaagcagagctgtcacggcagctagaggggattttgaaatccttcaaagacgtcgaacaaaaggccgaaaaccacgtacagcatcttcagagcgcgtgcgcaagctcccatcagttccagcagatgtcccgtgatttccaggcttggttggatacaaaaaaggaagagcagaacaagagtcatcccattagcgctaagctggatgtgctcgagtctttgataaaagaccacaaggactttagcaaaaccctcacagcgcaaagccatatgtatgagaagaccatcgccgagggcgaaaatttgctcctgaagactcaaggctctgagaaggccgctctgcagctccagctgaataccatcaaaacaaactgggatacctttaataagcaagtgaaggagcgggaaaacaagcttaaagagagcttggaaaaggcactgaaatacaaggagcaggtggagacactctggccttggatagataaatgccaaaacaatttagaagagataaagttttgtttggatccagctgagggcgaaaactccatagccaaactgaaatccctacagaaggaaatggaccaacattttggcatggttgaacttttaaacaatactgccaacagtcttctatctgtgtgtgagatcgataaggaagtggtcaccgatgaaaacaaatctcttattcaaaaagtagatatggtcacggaacagctacattcaaaaaagttttgtttagagaatatgacgcagaaatttaaggaatttcaggaggtgtccaaggagagcaagcggcagctgcagtgtgctaaggaacagctcgacatccatgactcattgggtagtcaggcttactccaataaatacctaacgatgctgcagacccagcaaaaatccctgcaggcactgaaacaccaagtggacctcgctaagagactagcccaagacctagtagttgaagcaagtgatagcaagggtacaagtgacgtactgcttcaggtggaaaccatcgcacaggaacactcaacactgtcccagcaagtggatgaaaagtgctccttcctggaaaccaaattgcaaggcatcggacattttcagaacacaatacgggagatgtttagccaattcgctgagttcgacgacgaactagatagtatggcacctgttggcagggacgcagagacactccagaagcagaaggaaacaattaaagcctttcttaagaaactagaggcccttatggcaagcaatgataatgcaaacaagacgtgcaagatgatgctggccaccgaggaaaccagccccgacctggtcggaatcaaacgcgatcttgaggcactctctaagcaatgtaacaaacttctcgaccgcgctcaggccagggaagagcaagtggagggtaccattaagcgccttgaggaattctactccaagctcaaggaatttagtatacttctccagaaagcagaggagcacgaagagtcccagggtcctgtgggaatggagactgaaacgatcaaccagcaactgaacatgttcaaagttttccagaaagaggaaattgaacctttacaggggaaacagcaggatgtcaactggctgggacaaggcctaatacagagtgcagccaagagcacctcaacacagggacttgagcatgacctggatgatgtcaatgcgcgttggaagacactgaacaagaaggtagcacaacgcgcagcacagctgcaggaggctctgctccattgcgggaggtttcaggacgccctggaaagccttctctcctggatggtcgacaccgaggaactggttgccaatcagaaaccaccttcagcagaatttaaggtggtgaaggcacaaattcaggagcagaaacttttgcagaggctgctggatgataggaaatcaaccgtggaggtgatcaaacgagagggagaaaaaatcgccacaacagctgaacctgctgataaggtgaaaatcctcaaacagttgtccctgctggattcgagatgggaggctttgcttaataaggcggagacaaggaaccgccagttagaggggatctctgtggtggcccaacagtttcacgaaaccctagaacctcttaatgagtggctgacaaccatcgaaaagcgattggtgaattgtgagcccatcggcacacaggcttccaagctcgaggaacagatagcccagcataaggcactggaagatgatattattaaccataataaacacctgcatcaggcagttagcataggccaaagtttaaaggtcctatcctcaagagaggacaaagatatggtccagtcgaagctcgacttcagtcaagtgtggtatatagaaatccaggaaaagagccactctagatcagagttgcttcagcaggcgttatgcaatgccaagatctttggcgaggacgaggtagagctcatgaattggctgaatgaggtgcatgacaagctttcgaagttgtcagttcaggactacagtaccgaaggactgtggaagcagcaatcggaactcagggttctccaggaagacattctgctgagaaaacagaacgtggatcaggcgcttctcaatgggctggagctgctgaaacagactactggagatgaggtactgatcattcaggataagttagaagctatcaaggccaggtacaaagacatcacaaagctttccactgacgtggcaaaaacccttgaacaggcattacagctggctcgcaggctgcactctacccacgaagaactgtgcacatggctggacaaggtcgaggtggagcttttgtcttatgagacccaggtattgaaaggggaggaggccagccaggcacagatgaggcccaaggagctgaaaaaggaggctaagaacaataaggcgcttctggactctctgaatgaggtctcctcagcattactcgagcttgttccctggagggccagggagggtctggaaaagatggttgccgaagacaacgagagatataggctagtctcggacaccatcacacagaaggtcgaggagatcgacgcagcaattctccgatcacagcagtttgaccaagctgcagatgctgagctgagctggatcaccgaaacagagaaaaaactgatgagtttgggagacatcagactggaacaggaccagacctccgcccagctccaggtgcagaagacatttaccatggaaatattacggcataaagatattatcgacgatctcgtgaagtctggacacaagatcatgaccgcctgcagcgaggaggagaagcagtcaatgaagaaaaagctggataaagtcctaaagaattatgacactatctgtcagataaactcggagcgctatctccagcttgagcgcgctcaatctttggtgaaccaattttgggagacctacgaagagctttggccctggctcactgagacacagagcataattagtcagctgccagctcccgctttggagtatgagactctgaggcagcaacaggaggaacatcggcagctcagggagttgatagctgaacataagccacacatcgacaaaatgaacaagaccggaccccagttgctcgagctgagtccgggagaaggatttagcattcaggagaagtatgtcgccgcagacaccttatatagtcagatcaaagaggatgtgaaaaagcgggcagttgcgctggacgaggctatttctcagagcacacagttccacgataaaatcgatcagatcctcgaatcactggaacggatcgttgagcgtctgcgccagcccccaagcatttccgctgaggtggagaaaatcaaggagcagattagcgaaaataagaatgtatccgtggacatggaaaaactacagccactctacgagacactgaaacagcgaggcgaggagatgattgcacgcagcggaggaaccgataaggacatcagcgccaaggccgtccaggacaaactagatcagatggttttcatctgggaaaatatacacacactggtggaggaaagggaagctaaacttctagacgttatggaacttgcagagaaattttggtgtgaccatatgagcttgatcgttacaattaaagatacccaagactttatacgtgacttggaagatccaggcatagacccctccgtggtgaaacagcagcaagaagcagccgaaaccattcgggaggaaatcgatgggctacaggaagagctagacattgtgatcaacttgggatctgaattgattgcggcatgtggcgagcccgataagccaatagtaaagaagtctatcgacgagctgaattctgcatgggactccctcaataaagcgtggaaagatcgtatcgacaagctggaagaggcgatgcaggccgcagtgcagtaccaagacggactgcaggccgtcttcgactgggttgacatcgctggtggaaaacttgcctcaatgagccctatcggcaccgatcttgaaacagtcaagcagcagattgaagagttgaaacagtttaagtctgaggcatatcagcagcagatcgaaatggagagactaaaccaccaggccgagttactccttaaaaaagtcaccgaggaaagtgacaaacacaccgtgcaggatccactgatggagttgaagctgatttgggacagcctcgaagagcgcataattaataggcagcacaagctggagggagctctgctcgctctggggcagttccagcatgccctggatgagctgctagcatggttgacgcacactgagggactcctgtctgaacagaaaccagtcgggggtgatccaaaggctatcgagattgagttggccaagcatcatgtcctgcagaacgatgtgctggcccatcagagcacagtcgaagccgtgaataaggccggaaacgatctgattgaatcttctgccggagaggaggcaagtaatttgcagaacaagctggaggtcctcaatcagcgatggcagaatgtgctcgaaaagacagagcagcggaagcaacagcttgatggagccctgagacaggctaagggttttcacggagagatcgaggacctacagcagtggctgacggacactgagcggcatttgttggcgagcaagcccctgggtgggctgcctgagacagcaaaggagcaactgaacgttcatatggaggtgtgcgctgcttttgaagcaaaagaagaaacctataagagcctgatgcagaaagggcagcagatgctggctcgatgcccaaaatccgccgagaccaacattgatcaagatataaataacctgaaagagaagtgggagtcagtcgagacaaagctcaatgaaaggaagacgaaactcgaagaggctctgaaccttgccatggagtttcataacagcctccaggattttatcaattggctgactcaggcagaacagaccctgaacgtggcctccaggccgtctctcatccttgataccgttctgttccagattgacgagcacaaagtgtttgctaacgaagtcaacagccacagggaacaaatcattgaacttgacaaaactggcacccatctgaagtacttcagccagaaacaggatgtcgtcctgatcaaaaatctgctgatcagcgtccagagtaggtgggagaaagtagtgcagcgattggttgagcgtgggcgttccctggatgatgcgaggaaaagggctaagcagtttcacgaggcttggagtaagctcatggagtggttggaggagtcggagaagtctctggactccgaactcgaaatcgccaatgacccagacaaaattaagacccagctggcccagcataaggagtttcagaagtctctgggtgccaagcattcagtgtacgacactaccaaccggacgggaaggtccttgaaagaaaagacatcactagccgatgacaacctcaagcttgatgacatgttgtcggaacttcgagataagtgggacacgatctgtggtaaatccgtcgagcgccagaataaactggaggaggcgttgttattcagcggccagtttacagatgcactgcaggctctcattgactggctgtatcgggtggagccacaattagctgaagatcagccggtgcatggtgatatagatctggtgatgaatttaattgacaaccataaagccttccaaaaggaactgggtaagaggaccagcagcgttcaagctttaaaaaggtctgcgagggaactgattgagggttctcgggacgacagtagctgggttaaggtgcagatgcaggagttgagcaccaggtgggagacagtgtgcgccttgtcgatctccaaacagacccgcctcgaagcagctcttcgccaggccgaagagttccacagtgttgtccatgcgctgctggagtggctggcagaggccgaacagacgctgcgcttccacggcgtcctcccagacgatgaagatgccctaagaacccttattgaccaacataaggagttcatgaagaaactggaggagaaacgtgcggaactgaataaggcaactaccatgggagacaccgtgctggccatctgccatccagattctatcactaccatcaagcattggattactatcatcagggcccgattcgaagaagtactggcttgggcaaaacagcatcagcaacgtcttgccagcgccctggccggactaatcgccaaacaagagcttcttgaagccctgctggcttggttacagtgggcagaaaccacgctgaccgacaaagataaggaggtgatcccacaggagatcgaagaggtcaaggctttgatagctgagcaccagaccttcatggaggagatgacacgcaaacagcccgatgttgataaggtcacgaaaacgtacaagcggagagctgctgatcccagtagcctccagtcacacatccccgtactggacaagggcagagccggtaggaaacgattccccgcttccagtttgtatccctcaggatcccagactcagatcgagaccaaaaatccacgagtgaatttgttgcttcgtgagtttgccaactttgacttcgatatctggcggaagaaatatatgcgttggatgaatcataagaaaagcagggtgatggacttcttccggagaatcgacaaagaccaagacggcaaaatcacaagacaagagttcatcgatggcatcctgagcagcaaatttccgacttctcgcctggagatgagcgctgtcgccgacattttcgatcgtgacggcgatggttatatcgactattacgagttcgtggctgctctccaccctaacaaggatgcatacaagcccatcaccgatgcggataaaatcgaagacgaagtgacccggcaggttgccaagtgcaagtgcgctaaacgattccaggttgagcagatcggcgacaataagtaccgggtatcctttcaaagcaactttggcgattcccaacagctgcgtcttgtacgcatcctgcggtcgacggtaatggtgcgcgtggggggaggctggatggccctcgacgagttcctagttaaaaacgatccctgtcgggtgcatcatcatggctctaaaatgctgcgttctgagtcaaattcctccattactaccactcaacccaccattgctaaagggagaacaaatatggagctgagggaaaaattcatcttggcggatggtgcctcgcagggaatggcggcattcaggcccagagggagacgcagcagaccctcctctaggggcgctagcccgaatagaagcacctccgtgtcaagccaggctgcccaggctgctagcccacaagtccccgctacaaccactcctaaaggaacccctattcagggctccaagcttcgcctgccgggttacctctcagggaagggctttcatagtggtgaagatagcggtctgataacaactgcagcagcccgtgtgagaactcaatttgccgattcaaaaaagactccctctcggccaggatcgcgggctggtagcaaggcaggtagccgcgcaagtagcaggaggggttctgatgcatctgattttgatatcagtgaaatacagtccgtctgttcagatgttgagacggtccctcagacacacaggccaacacccagggctggcagcagacctagcacagccaagccaagcaaaataccgactccacagcggaagtctcctgcatccaagctggacaagagcagcaaaagatac

SEQ ID NO: 258066 - DNA, 16374 bp, Artificial Sequence
  derived and/or modified sequence
atggccggctacctgagccccgccgcctacctgtacgtggaggagcaggagtacctgcaggcctacgaggacgtgctggagagatacaaggacgagagagacaaggtgcagaagaagaccttcaccaagtggatcaaccagcacctgatgaaggtgagaaagcacgtgaacgacctgtacgaggacctgagagacggccacaacctgatcagcctgctggaggtgctgagcggcgacaccctgcccagagagaagggcagaatgagattccacagactgcagaacgtgcagatcgccctggactacctgaagagaagacaggtgaagctggtgaacatcagaaacgacgacatcaccgacggcaaccccaagctgaccctgggcctgatctggaccatcatcctgcacttccagatcagcgacatccacgtgaccggcgagagcgaggacatgagcgccaaggagagactgctgctgtggacccagcaggccaccgagggctacgccggcatcagatgcgagaacttcaccacctgctggagagacggcaagctgttcaacgccatcatccacaagtacagacccgacctgatcgacatgaacaccgtggccgtgcagagcaacctggccaacctggagcacgccttctacgtggccgagaagatcggcgtgatcagactgctggaccccgaggacgtggacgtgagcagccccgacgagaagagcgtgatcacctacgtgagcagcctgtacgacgccttccccaaggtgcccgagggcggcgagggcatcggcgccaacgacgtggaggtgaagtggatcgagtaccagaacatggtgaactacctgatccagtggatcagacaccacgtgaccaccatgagcgagagaaccttccccaacaaccccgtggagctgaaggccctgtacaaccagtacctgcagttcaaggagaccgagatcccccccaaggagaccgagaagagcaagatcaagagactgtacaagctgctggagatctggatcgagttcggcagaatcaagctgctgcagggctaccaccccaacgacatcgagaaggagtggggcaagctgatcatcgccatgctggagagagagaaggccctgagacccgaggtggagagactggagatgctgcagcagatcgccaacagagtgcagagagacagcgtgatctgcgaggacaagctgatcctggccggcaacgccctgcagagcgacagcaagagactggagagcggcgtgcagttccagaacgaggccgagatcgccggctacatcctggagtgcgagaacctgctgagacagcacgtgatcgacgtgcagatcctgatcgacggcaagtactaccaggccgaccagctggtgcagagagtggccaagctgagagacgagatcatggccctgagaaacgagtgcagcagcgtgtacagcaagggcagaatcctgaccaccgagcagaccaagctgatgatcagcggcatcacccagagcctgaacagcggcttcgcccagaccctgcaccccagcctgaccagcggcctgacccagagcctgacccccagcctgaccagcagcagcatgaccagcggcctgagcagcggcatgaccagcagactgacccccagcgtgacccccgcctacacccccggcttccccagcggcctggtgcccaacttcagcagcggcgtggagcccaacagcctgcagaccctgaagctgatgcagatcagaaagcccctgctgaagagcagcctgctggaccagaacctgaccgaggaggagatcaacatgaagttcgtgcaggacctgctgaactgggtggacgagatgcaggtgcagctggacagaaccgagtggggcagcgacctgcccagcgtggagagccacctggagaaccacaagaacgtgcacagagccatcgaggagttcgagagcagcctgaaggaggccaagatcagcgagatccagatgaccgcccccctgaagctgacctacgccgagaagctgcacagactggagagccagtacgccaagctgctgaacaccagcagaaaccaggagagacacctggacaccctgcacaacttcgtgagcagagccaccaacgagctgatctggctgaacgagaaggaggaggaggaggtggcctacgactggagcgagagaaacaccaacatcgccagaaagaaggactaccacgccgagctgatgagagagctggaccagaaggaggagaacatcaagagcgtgcaggagatcgccgagcagctgctgctggagaaccaccccgccagactgaccatcgaggcctacagagccgccatgcagacccagtggagctggatcctgcagctgtgccagtgcgtggagcagcacatcaaggagaacaccgcctacttcgagttcttcaacgacgccaaggaggccaccgactacctgagaaacctgaaggacgccatccagagaaagtacagctgcgacagaagcagcagcatccacaagctggaggacctggtgcaggagagcatggaggagaaggaggagctgctgcagtacaagagcaccatcgccaacctgatgggcaaggccaagaccatcatccagctgaagcccagaaacagcgactgccccctgaagaccagcatccccatcaaggccatctgcgactacagacagatcgagatcaccatctacaaggacgacgagtgcgtgctggccaacaacagccacagagccaagtggaaggtgatcagccccaccggcaacgaggccatggtgcccagcgtgtgcttcaccgtgcccccccccaacaaggaggccgtggacctggccaacagaatcgagcagcagtaccagaacgtgctgaccctgtggcacgagagccacatcaacatgaagagcgtggtgagctggcactacctgatcaacgagatcgacagaatcagagccagcaacgtggccagcatcaagaccatgctgcccggcgagcaccagcaggtgctgagcaacctgcagagcagattcgaggacttcctggaggacagccaggagagccaggtgttcagcggcagcgacatcacccagctggagaaggaggtgaacgtgtgcaagcagtactaccaggagctgctgaagagcgccgagagagaggagcaggaggagagcgtgtacaacctgtacatcagcgaggtgagaaacatcagactgagactggagaactgcgaggacagactgatcagacagatcagaacccccctggagagagacgacctgcacgagagcgtgttcagaatcaccgagcaggagaagctgaagaaggagctggagagactgaaggacgacctgggcaccatcaccaacaagtgcgaggagttcttcagccaggccgccgccagcagcagcgtgcccaccctgagaagcgagctgaacgtggtgctgcagaacatgaaccaggtgtacagcatgagcagcacctacatcgacaagctgaagaccgtgaacctggtgctgaagaacacccaggccgccgaggccctggtgaagctgtacgagaccaagctgtgcgaggaggaggccgtgatcgccgacaagaacaacatcgagaacctgatcagcaccctgaagcagtggagaagcgaggtggacgagaagagacaggtgttccacgccctggaggacgagctgcagaaggccaaggccatcagcgacgagatgttcaagacctacaaggagagagacctggacttcgactggcacaaggagaaggccgaccagctggtggagagatggcagaacgtgcacgtgcagatcgacaacagactgagagacctggagggcatcggcaagagcctgaagtactacagagacacctaccaccccctggacgactggatccagcaggtggagaccacccagagaaagatccaggagaaccagcccgagaacagcaagaccctggccacccagctgaaccagcagaagatgctggtgagcgagatcgagatgaagcagagcaagatggacgagtgccagaagtacgccgagcagtacagcgccaccgtgaaggactacgagctgcagaccatgacctacagagccatggtggacagccagcagaagagccccgtgaagagaagaagaatgcagagcagcgccgacctgatcatccaggagttcatggacctgagaaccagatacaccgccctggtgaccctgatgacccagtacatcaagttcgccggcgacagcctgaagagactggaggaggaggagaagagcctggaggaggagaagaaggagcacgtggagaaggccaaggagctgcagaagtgggtgagcaacatcagcaagaccctgaaggacgccgagaaggccggcaagccccccttcagcaagcagaagatcagcagcgaggagatcagcaccaagaaggagcagctgagcgaggccctgcagaccatccagctgttcctggccaagcacggcgacaagatgaccgacgaggagagaaacgagctggagaagcaggtgaagaccctgcaggagagctacaacctgctgttcagcgagagcctgaagcagctgcaggagagccagaccagcggcgacgtgaaggtggaggagaagatcgtggccgagagacagcaggagtacaaggagaagctgcagggcatctgcgacctgctgacccagaccgagaacagactgatcggccaccaggaggccttcatgatcggcgacggcaccgtggagctgaagaagtaccagagcaagcaggaggagctgcagaaggacatgcagggcagcgcccaggccctggccgaggtggtgaagaacaccgagaacttcctgaaggagaacggcgagaagctgagccaggaggacaaggccctgatcgagcagaagctgaacgaggccaagatcaagtgcgagcagctgaacctgaaggccgagcagagcaagaaggagctggacaaggtggtgaccaccgccatcaaggaggagaccgagaaggtggccgccgtgaagcagctggaggagagcaagaccaagatcgagaacctgctggactggctgagcaacgtggacaaggacagcgagagagccggcaccaagcacaagcaggtgatcgagcagaacggcacccacttccaggagggcgacggcaagagcgccatcggcgaggaggacgaggtgaacggcaacctgctggagaccgacgtggacggccaggtgggcaccacccaggagaacctgaaccagcagtaccagaaggtgaaggcccagcacgagaagatcatcagccagcaccaggccgtgatcatcgccacccagagcgcccaggtgctgctggagaagcagggccagtacctgagccccgaggagaaggagaagctgcagaagaacatgaaggagctgaaggtgcactacgagaccgccctggccgagagcgagaagaagatgaagctgacccacagcctgcaggaggagctggagaagttcgacgccgactacaccgagttcgagcactggctgcagcagagcgagcaggagctggagaacctggaggccggcgccgacgacatcaacggcctgatgaccaagctgaagagacagaagagcttcagcgaggacgtgatcagccacaagggcgacctgagatacatcaccatcagcggcaacagagtgctggaggccgccaagagctgcagcaagagagacggcggcaaggtggacaccagcgccacccacagagaggtgcagagaaagctggaccacgccaccgacagattcagaagcctgtacagcaagtgcaacgtgctgggcaacaacctgaaggacctggtggacaagtaccagcactacgaggacgccagctgcggcctgctggccggcctgcaggcctgcgaggccaccgccagcaagcacctgagcgagcccatcgccgtggaccccaagaacctgcagagacagctggaggagaccaaggccctgcagggccagatcagcagccagcaggtggccgtggagaagctgaagaagaccgccgaggtgctgctggacgccagaggcagcctgctgcccgccaagaacgacatccagaagaccctggacgacatcgtgggcagatacgaggacctgagcaagagcgtgaacgagagaaacgagaagctgcagatcaccctgaccagaagcctgagcgtgcaggacggcctggacgagatgctggactggatgggcaacgtggagagcagcctgaaggagcagggccaggtgcccctgaacagcaccgccctgcaggacatcatcagcaagaacatcatgctggagcaggacatcgccggcagacagagcagcatcaacgccatgaacgagaaggtgaagaagttcatggagaccaccgaccccagcaccgccagcagcctgcaggccaagatgaaggacctgagcgccagattcagcgaggccagccacaagcacaaggagaccctggccaagatggaggagctgaagaccaaggtggagctgttcgagaacctgagcgagaagctgcagaccttcctggagaccaagacccaggccctgaccgaggtggacgtgcccggcaaggacgtgaccgagctgagccagtacatgcaggagagcaccagcgagttcctggagcacaagaagcacctggaggtgctgcacagcctgctgaaggagatcagcagccacggcctgcccagcgacaaggccctggtgctggagaagaccaacaacctgagcaagaagttcaaggagatggaggacaccatcaaggagaagaaggaggccgtgaccagctgccaggagcagctggacgccttccaggtgctggtgaagagcctgaagagctggatcaaggagaccaccaagaaggtgcccatcgtgcagcccagcttcggcgccgaggacctgggcaagagcctggaggacaccaagaagctgcaggagaagtggagcctgaagacccccgagatccagaaggtgaacaacagcggcatcagcctgtgcaacctgatcagcgccgtgaccacccccgccaaggccatcgccgccgtgaagagcggcggcgccgtgctgaacggcgagggcaccgccaccaacaccgaggagttctgggccaacaagggcctgaccagcatcaagaaggacatgaccgacatcagccacggctacgaggacctgggcctgctgctgaaggacaagatcgccgagctgaacaccaagctgagcaagctgcagaaggcccaggaggagagcagcgccatgatgcagtggctgcagaagatgaacaagaccgccaccaagtggcagcagacccccgcccccaccgacaccgaggccgtgaagacccaggtggagcagaacaagagcttcgaggccgagctgaagcagaacgtgaacaaggtgcaggagctgaaggacaagctgaccgagctgctggaggagaaccccgacacccccgaggcccccagatggaagcagatgctgaccgagatcgacagcaagtggcaggagctgaaccagctgaccatcgacagacagcagaagctggaggagagcagcaacaacctgacccagttccagaccgtggaggcccagctgaagcagtggctggtggagaaggagctgatggtgagcgtgctgggccccctgagcatcgaccccaacatgctgaacacccagagacagcaggtgcagatcctgctgcaggagttcgccaccagaaagccccagtacgagcagctgaccgccgccggccagggcatcctgagcagacccggcgaggaccccagcctgagaggcatcgtgaaggagcagctggccgccgtgacccagaagtgggacagcctgaccggccagctgagcgacagatgcgactggatcgaccaggccatcgtgaagagcacccagtaccagagcctgctgagaagcctgagcgacaagctgagcgacctggacaacaagctgagcagcagcctggccgtgagcacccaccccgacgccatgaaccagcagctggagaccgcccagaagatgaagcaggagatccagcaggagaagaagcagatcaaggtggcccaggccctgtgcgaggacctgagcgccctggtgaaggaggagtacctgaaggccgagctgagcagacagctggagggcatcctgaagagcttcaaggacgtggagcagaaggccgagaaccacgtgcagcacctgcagagcgcctgcgccagcagccaccagttccagcagatgagcagagacttccaggcctggctggacaccaagaaggaggagcagaacaagagccaccccatcagcgccaagctggacgtgctggagagcctgatcaaggaccacaaggacttcagcaagaccctgaccgcccagagccacatgtacgagaagaccatcgccgagggcgagaacctgctgctgaagacccagggcagcgagaaggccgccctgcagctgcagctgaacaccatcaagaccaactgggacaccttcaacaagcaggtgaaggagagagagaacaagctgaaggagagcctggagaaggccctgaagtacaaggagcaggtggagaccctgtggccctggatcgacaagtgccagaacaacctggaggagatcaagttctgcctggaccccgccgagggcgagaacagcatcgccaagctgaagagcctgcagaaggagatggaccagcacttcggcatggtggagctgctgaacaacaccgccaacagcctgctgagcgtgtgcgagatcgacaaggaggtggtgaccgacgagaacaagagcctgatccagaaggtggacatggtgaccgagcagctgcacagcaagaagttctgcctggagaacatgacccagaagttcaaggagttccaggaggtgagcaaggagagcaagagacagctgcagtgcgccaaggagcagctggacatccacgacagcctgggcagccaggcctacagcaacaagtacctgaccatgctgcagacccagcagaagagcctgcaggccctgaagcaccaggtggacctggccaagagactggcccaggacctggtggtggaggccagcgacagcaagggcaccagcgacgtgctgctgcaggtggagaccatcgcccaggagcacagcaccctgagccagcaggtggacgagaagtgcagcttcctggagaccaagctgcagggcatcggccacttccagaacaccatcagagagatgttcagccagttcgccgagttcgacgacgagctggacagcatggcccccgtgggcagagacgccgagaccctgcagaagcagaaggagaccatcaaggccttcctgaagaagctggaggccctgatggccagcaacgacaacgccaacaagacctgcaagatgatgctggccaccgaggagaccagccccgacctggtgggcatcaagagagacctggaggccctgagcaagcagtgcaacaagctgctggacagagcccaggccagagaggagcaggtggagggcaccatcaagagactggaggagttctacagcaagctgaaggagttcagcatcctgctgcagaaggccgaggagcacgaggagagccagggccccgtgggcatggagaccgagaccatcaaccagcagctgaacatgttcaaggtgttccagaaggaggagatcgagcccctgcagggcaagcagcaggacgtgaactggctgggccagggcctgatccagagcgccgccaagagcaccagcacccagggcctggagcacgacctggacgacgtgaacgccagatggaagaccctgaacaagaaggtggcccagagagccgcccagctgcaggaggccctgctgcactgcggcagattccaggacgccctggagagcctgctgagctggatggtggacaccgaggagctggtggccaaccagaagccccccagcgccgagttcaaggtggtgaaggcccagatccaggagcagaagctgctgcagagactgctggacgacagaaagagcaccgtggaggtgatcaagagagagggcgagaagatcgccaccaccgccgagcccgccgacaaggtgaagatcctgaagcagctgagcctgctggacagcagatgggaggccctgctgaacaaggccgagaccagaaacagacagctggagggcatcagcgtggtggcccagcagttccacgagaccctggagcccctgaacgagtggctgaccaccatcgagaagagactggtgaactgcgagcccatcggcacccaggccagcaagctggaggagcagatcgcccagcacaaggccctggaggacgacatcatcaaccacaacaagcacctgcaccaggccgtgagcatcggccagagcctgaaggtgctgagcagcagagaggacaaggacatggtgcagagcaagctggacttcagccaggtgtggtacatcgagatccaggagaagagccacagcagaagcgagctgctgcagcaggccctgtgcaacgccaagatcttcggcgaggacgaggtggagctgatgaactggctgaacgaggtgcacgacaagctgagcaagctgagcgtgcaggactacagcaccgagggcctgtggaagcagcagagcgagctgagagtgctgcaggaggacatcctgctgagaaagcagaacgtggaccaggccctgctgaacggcctggagctgctgaagcagaccaccggcgacgaggtgctgatcatccaggacaagctggaggccatcaaggccagatacaaggacatcaccaagctgagcaccgacgtggccaagaccctggagcaggccctgcagctggccagaagactgcacagcacccacgaggagctgtgcacctggctggacaaggtggaggtggagctgctgagctacgagacccaggtgctgaagggcgaggaggccagccaggcccagatgagacccaaggagctgaagaaggaggccaagaacaacaaggccctgctggacagcctgaacgaggtgagcagcgccctgctggagctggtgccctggagagccagagagggcctggagaagatggtggccgaggacaacgagagatacagactggtgagcgacaccatcacccagaaggtggaggagatcgacgccgccatcctgagaagccagcagttcgaccaggccgccgacgccgagctgagctggatcaccgagaccgagaagaagctgatgagcctgggcgacatcagactggagcaggaccagaccagcgcccagctgcaggtgcagaagaccttcaccatggagatcctgagacacaaggacatcatcgacgacctggtgaagagcggccacaagatcatgaccgcctgcagcgaggaggagaagcagagcatgaagaagaagctggacaaggtgctgaagaactacgacaccatctgccagatcaacagcgagagatacctgcagctggagagagcccagagcctggtgaaccagttctgggagacctacgaggagctgtggccctggctgaccgagacccagagcatcatcagccagctgcccgcccccgccctggagtacgagaccctgagacagcagcaggaggagcacagacagctgagagagctgatcgccgagcacaagccccacatcgacaagatgaacaagaccggcccccagctgctggagctgagccccggcgagggcttcagcatccaggagaagtacgtggccgccgacaccctgtacagccagatcaaggaggacgtgaagaagagagccgtggccctggacgaggccatcagccagagcacccagttccacgacaagatcgaccagatcctggagagcctggagagaatcgtggagagactgagacagccccccagcatcagcgccgaggtggagaagatcaaggagcagatcagcgagaacaagaacgtgagcgtggacatggagaagctgcagcccctgtacgagaccctgaagcagagaggcgaggagatgatcgccagaagcggcggcaccgacaaggacatcagcgccaaggccgtgcaggacaagctggaccagatggtgttcatctgggagaacatccacaccctggtggaggagagagaggccaagctgctggacgtgatggagctggccgagaagttctggtgcgaccacatgagcctgatcgtgaccatcaaggacacccaggacttcatcagagacctggaggaccccggcatcgaccccagcgtggtgaagcagcagcaggaggccgccgagaccatcagagaggagatcgacggcctgcaggaggagctggacatcgtgatcaacctgggcagcgagctgatcgccgcctgcggcgagcccgacaagcccatcgtgaagaagagcatcgacgagctgaacagcgcctgggacagcctgaacaaggcctggaaggacagaatcgacaagctggaggaggccatgcaggccgccgtgcagtaccaggacggcctgcaggccgtgttcgactgggtggacatcgccggcggcaagctggccagcatgagccccatcggcaccgacctggagaccgtgaagcagcagatcgaggagctgaagcagttcaagagcgaggcctaccagcagcagatcgagatggagagactgaaccaccaggccgagctgctgctgaagaaggtgaccgaggagagcgacaagcacaccgtgcaggaccccctgatggagctgaagctgatctgggacagcctggaggagagaatcatcaacagacagcacaagctggagggcgccctgctggccctgggccagttccagcacgccctggacgagctgctggcctggctgacccacaccgagggcctgctgagcgagcagaagcccgtgggcggcgaccccaaggccatcgagatcgagctggccaagcaccacgtgctgcagaacgacgtgctggcccaccagagcaccgtggaggccgtgaacaaggccggcaacgacctgatcgagagcagcgccggcgaggaggccagcaacctgcagaacaagctggaggtgctgaaccagagatggcagaacgtgctggagaagaccgagcagagaaagcagcagctggacggcgccctgagacaggccaagggcttccacggcgagatcgaggacctgcagcagtggctgaccgacaccgagagacacctgctggccagcaagcccctgggcggcctgcccgagaccgccaaggagcagctgaacgtgcacatggaggtgtgcgccgccttcgaggccaaggaggagacctacaagagcctgatgcagaagggccagcagatgctggccagatgccccaagagcgccgagaccaacatcgaccaggacatcaacaacctgaaggagaagtgggagagcgtggagaccaagctgaacgagagaaagaccaagctggaggaggccctgaacctggccatggagttccacaacagcctgcaggacttcatcaactggctgacccaggccgagcagaccctgaacgtggccagcagacccagcctgatcctggacaccgtgctgttccagatcgacgagcacaaggtgttcgccaacgaggtgaacagccacagagagcagatcatcgagctggacaagaccggcacccacctgaagtacttcagccagaagcaggacgtggtgctgatcaagaacctgctgatcagcgtgcagagcagatgggagaaggtggtgcagagactggtggagagaggcagaagcctggacgacgccagaaagagagccaagcagttccacgaggcctggagcaagctgatggagtggctggaggagagcgagaagagcctggacagcgagctggagatcgccaacgaccccgacaagatcaagacccagctggcccagcacaaggagttccagaagagcctgggcgccaagcacagcgtgtacgacaccaccaacagaaccggcagaagcctgaaggagaagaccagcctggccgacgacaacctgaagctggacgacatgctgagcgagctgagagacaagtgggacaccatctgcggcaagagcgtggagagacagaacaagctggaggaggccctgctgttcagcggccagttcaccgacgccctgcaggccctgatcgactggctgtacagagtggagccccagctggccgaggaccagcccgtgcacggcgacatcgacctggtgatgaacctgatcgacaaccacaaggccttccagaaggagctgggcaagagaaccagcagcgtgcaggccctgaagagaagcgccagagagctgatcgagggcagcagagacgacagcagctgggtgaaggtgcagatgcaggagctgagcaccagatgggagaccgtgtgcgccctgagcatcagcaagcagaccagactggaggccgccctgagacaggccgaggagttccacagcgtggtgcacgccctgctggagtggctggccgaggccgagcagaccctgagattccacggcgtgctgcccgacgacgaggacgccctgagaaccctgatcgaccagcacaaggagttcatgaagaagctggaggagaagagagccgagctgaacaaggccaccaccatgggcgacaccgtgctggccatctgccaccccgacagcatcaccaccatcaagcactggatcaccatcatcagagccagattcgaggaggtgctggcctgggccaagcagcaccagcagagactggccagcgccctggccggcctgatcgccaagcaggagctgctggaggccctgctggcctggctgcagtgggccgagaccaccctgaccgacaaggacaaggaggtgatcccccaggagatcgaggaggtgaaggccctgatcgccgagcaccagaccttcatggaggagatgaccagaaagcagcccgacgtggacaaggtgaccaagacctacaagagaagagccgccgaccccagcagcctgcagagccacatccccgtgctggacaagggcagagccggcagaaagagattccccgccagcagcctgtaccccagcggcagccagacccagatcgagaccaagaaccccagagtgaacctgctgctgagagagttcgccaacttcgacttcgacatctggagaaagaagtacatgagatggatgaaccacaagaagagcagagtgatggacttcttcagaagaatcgacaaggaccaggacggcaagatcaccagacaggagttcatcgacggcatcctgagcagcaagttccccaccagcagactggagatgagcgccgtggccgacatcttcgacagagacggcgacggctacatcgactactacgagttcgtggccgccctgcaccccaacaaggacgcctacaagcccatcaccgacgccgacaagatcgaggacgaggtgaccagacaggtggccaagtgcaagtgcgccaagagattccaggtggagcagatcggcgacaacaagtacagagtgagcttccagagcaacttcggcgacagccagcagctgagactggtgagaatcctgagaagcaccgtgatggtgagagtgggcggcggctggatggccctggacgagttcctggtgaagaacgacccctgcagagtgcaccaccacggcagcaagatgctgagaagcgagagcaacagcagcatcaccaccacccagcccaccatcgccaagggcagaaccaacatggagctgagagagaagttcatcctggccgacggcgccagccagggcatggccgccttcagacccagaggcagaagaagcagacccagcagcagaggcgccagccccaacagaagcaccagcgtgagcagccaggccgcccaggccgccagcccccaggtgcccgccaccaccacccccaagggcacccccatccagggcagcaagctgagactgcccggctacctgagcggcaagggcttccacagcggcgaggacagcggcctgatcaccaccgccgccgccagagtgagaacccagttcgccgacagcaagaagacccccagcagacccggcagcagagccggcagcaaggccggcagcagagccagcagcagaagaggcagcgacgccagcgacttcgacatcagcgagatccagagcgtgtgcagcgacgtggagaccgtgccccagacccacagacccacccccagagccggcagcagacccagcaccgccaagcccagcaagatccccaccccccagagaaagagccccgccagcaagctggacaagagcagcaagagatag

SEQ ID NO: 258067 - DNA, 17390 bp, Artificial Sequence
  derived and/or modified sequence
atggcgggttacctctcccctgctgcttacctgtacgtggaggagcaggagtatctccaggcctacgaggatgtcctggagaggtacaaagatgaacgggacaaagttcagaagaaaacatttacaaaatggataaatcagcatctcatgaaggttcgaaaacatgtgaatgatctctatgaagacttaagggatggacacaatttgatttctcttttagaggttctttcaggagataccttgcccagagaaaaaggtcggatgcgttttcacagactacagaatgtacaaattgcacttgactatttgaaaagacgccaggtgaaattagtgaatattagaaatgatgacataacagatggaaatcccaaattgactttgggattaatctggacaataattttgcactttcagatatctgatatccatgttactggagagtcagaggatatgtctgcaaaagagagattgctactctggacgcagcaggcaacagagggttatgctggaattcggtgtgaaaatttcactacctgctggagagatggaaaattatttaatgccatcattcataaatacaggccggacctgatagatatgaatactgttgctgttcaaagcaaccttgcaaatttagagcatgctttttacgtagcagaaaaaattggtgttataagacttctggaccctgaagatgtcgatgtctcctcacctgatgaaaaatcagtaataacttacgtgtcatctctctatgatgcatttcctaaagtccctgaaggtggggaaggcattggtgcaaatgatgttgaagtcaaatggattgaataccagaatatggtgaactacctcatccaatggattagacaccatgtgaccacaatgtctgagagaacatttcctaataatcctgtagaactgaaggcactttataatcagtatttacagtttaaagaaacagaaattccaccaaaggagacagaaaaatcaaaaattaaacgtctatataaattattagagatttggatagaatttggacgcatcaagctccttcaaggttatcatccaaatgacatagaaaaagagtgggggaaactcattattgccatgctagagagagagaaggcccttcgtccagaagtagaaaggttagaaatgttgcaacagattgccaacagagttcagagggacagtgtcatctgtgaagacaaactgattcttgctggaaatgctcttcagtctgattctaaaagattagaatcaggagtgcagtttcagaatgaagcagaaattgctgggtatatacttgaatgtgagaaccttttacgccagcatgtaattgatgtacagattcttattgatggaaaatactaccaggcagatcaattggtacagagggttgcaaaactgcgtgacgaaattatggccttaaggaacgaatgttcttctgtgtacagcaaaggacgcatactgacaacagaacagacaaagctcatgatatcaggaatcactcaaagtttaaactcaggatttgcacagaccttacaccctagtctgacctcagggctgacccagagtttaacaccttccctaacctcttctagtatgacttctggcctgtcatcagggatgacttcccgcctgactccatctgtcactccagcttatacacctggtttcccatcaggattagttccaaatttcagttcaggagtagagccaaattcattgcaaactttgaagttgatgcagatccgaaaaccccttctaaagtcttctttgctggatcaaaatttaacagaagaagaaatcaatatgaaatttgttcaggatcttttgaattgggttgatgagatgcaggtacaactggaccgcactgagtggggctcagatttgccaagtgttgaaagccatttagaaaatcataaaaatgttcatagagctattgaagaatttgaatctagtctcaaagaagctaaaatcagtgagattcaaatgacagcacctcttaaactgacttatgcagaaaagttgcacagattagagagtcagtatgcaaaactcttgaatacatccaggaatcaagaacggcaccttgatacactccataattttgtaagtcgtgcgactaatgaacttatttggttgaatgaaaaagaagaggaggaagttgcttatgactggagtgagagaaacaccaacatagctaggaaaaaagattatcatgctgaattaatgagagaacttgatcaaaaggaagaaaatattaaatcagttcaggagatagcagagcagctacttctagaaaatcatccagcccggttaactattgaggcctacagagcggcaatgcagacgcagtggagctggatcttacagctctgccagtgtgtggagcagcacataaaggagaacacagcgtatttcgagtttttcaatgatgccaaagaagctactgattacttaaggaatctaaaagatgccattcagcggaagtacagctgtgatagatcaagcagcattcacaagctagaagaccttgttcaggaatcaatggaagagaaagaagaacttctgcagtacaaaagcactatagcaaacctaatgggaaaagcaaaaacaataattcaactgaagccaaggaattctgactgtccactcaaaacttctattccgatcaaagctatctgtgactacagacaaattgagataaccatttacaaagacgatgaatgtgttttggcgaataactctcatcgtgctaaatggaaggtcattagtcctactgggaatgaggctatggtcccatctgtgtgcttcaccgttcctccaccaaacaaagaagcggtggaccttgccaacagaattgagcaacagtatcagaatgtcctgactctttggcatgagtctcacataaacatgaagagtgtagtatcctggcattatctcatcaatgaaattgatagaattcgagctagcaatgtggcttcaataaagacaatgctacctggtgaacatcagcaagttctaagtaatctacaatctcgttttgaagattttctggaagatagccaggaatcccaagtcttttcaggctcagatataacacaactggaaaaggaggttaatgtatgtaagcagtattatcaagaacttcttaaatctgcagaaagagaggagcaagaggaatcagtttataatctctacatctctgaagttcgaaacattagacttcggttagagaactgtgaagatcggctgattagacagattcgaactcccctggaaagagatgatttgcatgaaagtgtgttcagaatcacagaacaggagaaactaaagaaagagctggaacgacttaaagatgatttgggaacaatcacaaataagtgtgaggagtttttcagtcaagcagcagcctcttcatcagtccctaccctacgatcagagcttaatgtggtccttcagaacatgaaccaagtctattctatgtcttccacttacatagataagttgaaaactgttaacttggtgttaaaaaacactcaagctgcagaagccctcgtaaaactctatgaaactaaactgtgtgaagaagaagcagttatagctgacaagaataatattgagaatctaataagtactttaaagcaatggagatctgaagtagatgaaaagagacaggtattccatgccttagaggatgagttgcagaaagctaaagccatcagtgatgaaatgtttaaaacgtataaagaacgggaccttgattttgactggcacaaagaaaaagcagatcaattagttgaaaggtggcaaaatgttcatgtgcagattgacaacaggttacgggacttagagggcattggcaaatcactgaagtactacagagacacttaccatcctttagatgattggatccagcaggttgaaactactcagagaaagattcaggaaaatcagcctgaaaatagtaaaaccctagccacacagttgaatcaacagaagatgctggtgtccgaaatagaaatgaaacagagcaaaatggacgagtgtcaaaaatatgcagaacagtactcagctacagtgaaggactatgaattacaaacaatgacctaccgggccatggtagattcacaacaaaaatctccagtgaaacgccgaagaatgcagagttcagcagatctcattattcaagagttcatggacctaaggactcgatatactgccctggtcactctcatgacacaatatattaaatttgctggtgattcattgaagaggctggaagaggaggagaagtcactggaagaagaaaagaaagaacatgttgaaaaagccaaagaattgcaaaaatgggtatcaaatatcagcaagacattgaaagatgcagagaaggctggaaaacctcccttctctaagcaaaagatttccagtgaggaaatatcaaccaagaaggaacaattatcggaagcacttcaaactatacagctttttttggcaaaacatggagacaaaatgacagatgaagaaagaaatgaattggaaaaacaagtgaaaactcttcaggaaagttataatttattattcagtgaatctctgaaacagctacaagaatcacaaacctcaggagatgtaaaggtagaggagaagattgtagcagagcgtcagcaggagtataaagagaaactccaagggatatgtgatcttcttacccaaactgaaaaccgcctaattggtcaccaagaagccttcatgattggagatggcacagttgagttaaagaaatatcagtccaagcaagaggaattacagaaagatatgcaaggaagtgcacaggcattggctgaagtagtgaaaaacacagagaacttcttaaaagagaatggtgaaaagctgtcacaggaagataaggctttgattgaacagaaacttaatgaagctaagataaagtgtgaacagcttaatttaaaagcagaacagtctaaaaaggagctggataaagttgtgacaacagcaatcaaggaagaaactgaaaaggtagcagcagtgaagcagctggaagagagcaaaaccaaaatagaaaaccttttggactggttgtcaaatgttgacaaagactcagaaagggcagggacaaaacacaaacaggtaatcgaacagaacgggacccattttcaagaaggtgatggcaagtcagcaattggagaagaggatgaagttaatggtaacctgttggagactgatgttgatgggcaagttggaaccactcaggagaatctgaatcagcaatatcagaaagttaaggcccaacacgagaagatcatctctcagcaccaagcagtgatcatagccactcagtctgcacaagtgttgcttgagaaacagggtcagtatctctctcctgaagaaaaagagaaactgcaaaagaacatgaaggaactgaaagtgcattatgaaactgcactggctgagtcagagaagaaaatgaagttaactcactctctgcaggaagaattagaaaagtttgatgctgactataccgagtttgagcactggctacagcagtcagaacaagaacttgaaaacctggaggcaggtgcagatgacatcaatggtttaatgaccaaattgaagaggcagaagagtttctcagaagacgttatttctcacaaaggtgacttgagatacatcacaatttctggaaacagagtgttggaagctgccaaatcttgcagcaagagagacggtggcaaggttgatacttctgcaacccacagagaagtgcagcgcaagttggatcatgctactgatcggttcaggtctctctactctaagtgcaatgttcttggaaataatcttaaagatctggtggataaatatcaacactatgaagatgcttcatgtggacttcttgctggactccaggcctgtgaggccacagcgagcaaacacttatctgaacctattgcggtggaccccaaaaatcttcaaaggcaattagaagagaccaaggctttgcaaggacagatatcaagtcagcaggttgctgtagagaaactgaagaaaacggctgaagtgcttttagatgccaggggatctttacttccagccaagaatgatatccagaaaacacttgatgacattgttgggagatatgaggatctgtccaagtctgttaatgaacgaaatgaaaaactccagataaccttgacccgttcactgagtgtgcaggatggcttggatgaaatgctggactggatgggaaatgtggaaagttctctgaaagaacaaggtcaagtgcctttaaactctactgctcttcaggatattatcagtaaaaacattatgttggaacaggatattgcaggtcgtcagagcagtataaatgccatgaatgaaaaagtgaagaaatttatggaaacaacagatccatccactgcatcctcactgcaagccaaaatgaaagacttgtctgctcggttttcagaagcaagtcataaacacaaagaaactcttgccaaaatggaggagctaaaaaccaaagtagaactgtttgagaacctctcagaaaagctccagacatttttagaaacaaaaactcaggctcttactgaagtagatgtgccaggaaaagatgttactgaattgtctcagtatatgcaggaatcaacttctgaatttttagaacacaagaaacatcttgaagttttgcatagtctcttgaaggagatatccagccatggcttaccaagtgataaggctttggtccttgaaaaaacaaataatttgtcaaagaaattcaaggaaatggaggataccatcaaagaaaaaaaagaagctgtaacttcttgtcaagaacagttggatgctttccaagttcttgttaaatcattgaagtcatggataaaagaaacaacaaaaaaagttcccattgtacagccttcttttggtgcagaggatttaggaaaatctttggaagacactaagaaattacaagaaaagtggagtttaaaaacaccagagattcagaaagtaaacaacagtgggatctcactatgtaacttaataagtgctgtgaccacccctgcaaaggcaatagcagcagttaaatcaggtggagcagtattaaatggtgaaggaacagccacaaatactgaggaattttgggcaaataaaggtttaacatccattaaaaaggacatgactgacataagtcatggttatgaagatcttggcctcttactcaaggacaaaatagcggaactgaacactaaactctccaaattgcaaaaggctcaggaagaatcaagtgcaatgatgcagtggttacagaaaatgaacaaaactgcaacaaaatggcagcagacacctgcacctacagatactgaagctgtgaagactcaagttgagcagaataagtcgtttgaggcagaactgaagcagaatgtaaacaaagtacaggagttgaaagacaaattgacagagctgttggaggagaacccagatactcctgaggcccccagatggaaacagatgttgacagaaatagattctaagtggcaagaactcaatcaattaacaattgatagacaacaaaaactggaagaatcctccaataatctaacccagttccagactgtagaggcccaattgaaacagtggcttgtggaaaaagaacttatggtcagtgttcttgggcccttgtcaattgacccaaatatgctaaacacacaaaggcagcaggtgcagattttgctgcaagaattcgccactcggaaacctcaatatgaacagctgacagcagctggtcagggcattctgagcaggcctggagaagacccttctttacgtgggattgtgaaagagcaactggcagctgtgacccaaaaatgggatagcctaacagggcaattgagtgacagatgtgactggattgaccaagccattgttaaaagcacacagtatcaaagcctgctgagaagcctttctgataaactgagtgacttggataataaactcagcagcagtctggctgtgagcacgcaccctgatgctatgaaccaacagttggaaacagcccaaaaaatgaagcaggagatacagcaggaaaagaagcagataaaagtggcccaggcactctgtgaggatttgtcagcactggttaaagaagagtacttgaaagcagaacttagtaggcaactagaaggcatcttaaaatcatttaaggatgttgaacagaaagcagagaatcatgtccagcaccttcagtcggcctgtgcaagctctcatcaatttcagcaaatgtctagagattttcaggcttggctggatacaaagaaagaagagcaaaacaaatctcatccaatatctgccaaactcgatgtcttggagtcattaattaaagatcataaagactttagtaaaactttgaccgctcagtctcatatgtatgaaaaaaccattgcagaaggtgaaaatctgttattaaaaacacaagggtctgagaaggcagccttacagttacagcttaatacaattaaaaccaattgggatacatttaataagcaggtgaaagaaagagaaaacaagttaaaagagtcattggaaaaagcccttaagtataaagagcaagtagagactctctggccatggatagacaaatgccaaaacaacctggaggaaataaaattttgcttggatcctgctgaaggagagaattctattgccaagttaaagtctctgcagaaggaaatggaccaacactttggtatggtagaattactgaacaacacagccaatagcttgctcagtgtctgtgagatagataaagaagttgttacagatgagaataagtcactgatccagaaggtggacatggtcactgaacaacttcacagtaagaaattctgtctggagaacatgactcagaagtttaaagaatttcaagaagtttccaaagaatctaaaaggcagcttcagtgtgcaaaggagcagctagatatccatgattcgctgggatcccaggcttacagtaacaaatacctgaccatgttgcaaactcagcagaaatcacttcaggccttgaagcatcaggtagatttggctaaaagacttgcacaggaccttgtggtagaggcctcagactcaaagggaacctctgatgttttattacaagtggaaaccatagctcaagagcatagtacactaagtcagcaggttgatgaaaagtgttctttcttagaaaccaagcttcagggcattgggcatttccagaataccattcgagaaatgttttctcagttcgcagagtttgatgatgaactggatagcatggctccagtggggagagatgcagaaacattgcaaaagcaaaaggaaactataaaagcctttctaaagaaactagaagccctcatggcaagcaatgacaatgccaataaaacctgcaagatgatgttagccacagaagaaacctctcctgaccttgttggaatcaaaagggacttggaggccttaagcaaacaatgcaacaagttactggaccgagcccaagccagagaagagcaggttgaagggacaattaagcgccttgaagaattttacagcaaattgaaagaattttctattctgctccagaaagccgaagaacatgaagagtcacaaggtcctgttggtatggaaacggagacaattaatcagcagcttaacatgttcaaggtattccagaaagaagagattgaacccttgcaaggtaaacagcaagatgtaaactggttaggtcaaggccttattcagagtgctgccaaaagcactagcactcagggcttggagcatgacctggatgatgtcaatgcacggtggaagactctcaataagaaggtggctcagcgagcagcccagctgcaggaggccttgctgcactgtgggaggttccaggatgccctggagtccctgctcagctggatggtggacactgaggagcttgtggccaatcagaagcccccgtcggctgagttcaaagtggtaaaggcccagatacaagaacaaaagcttctccagagattgttggatgaccgaaaatctacggtggaggtaatcaaacgagaaggagaaaaaattgctacaacagcagagcccgcagataaagtgaagattttgaaacagctcagtctcttggatagcagatgggaggcattgcttaataaagctgaaacaaggaatcgtcagttggaaggtatctcggtggtagcacagcaatttcatgaaaccttagaaccactgaacgagtggcttacaaccatagaaaagaggctggtgaattgtgaacccataggaacccaagcatctaaacttgaggaacaaattgcacagcacaaagccttagaagatgacatcatcaatcacaataaacatttacaccaggctgttagcattggccagtccttaaaggttttgagctccagggaggataaagatatggtgcagagtaaattagacttctctcaagtatggtacattgagattcaagagaaaagtcacagcaggtctgagctcctccagcaggccttatgtaatgctaagatttttggggaagatgaagttgaactgatgaactggctgaatgaagtgcatgacaaactgagcaagctctcagtccaggattacagcactgaggggctatggaagcagcagtctgaacttcgggttctgcaagaggacatcttactcaggaaacaaaatgtagatcaggctttactaaatggtttagaactacttaaacaaaccacaggtgatgaagttttaataattcaagataaattggaagccattaaagcaaggtacaaagacattactaaactgagcactgatgtggccaagactctggaacaggcgctgcagcttgcaaggcggctgcactccacacacgaagagctgtgtacctggctggacaaagtggaggtggaattactttcatatgaaactcaggttctgaaaggagaagaagcaagtcaagcacaaatgagaccaaaggaactgaaaaaggaagctaagaacaacaaagccttactggactcccttaatgaagtgagcagtgctttgctggaactggtaccatggagggcaagagaaggacttgagaaaatggtagctgaggacaatgagcgctaccgattagtgagcgacaccatcactcagaaggtggaggagatcgatgcagccattctgcgatcacagcagtttgaccaagcagctgatgctgagttatcctggattactgaaacagaaaaaaaattgatgtctctgggtgacatcaggcttgagcaagaccagacttctgctcagcttcaagttcaaaagacattcaccatggagattttgagacacaaggatattattgatgaccttgttaaatctgggcataaaatcatgaccgcatgcagtgaagaggaaaagcaatcaatgaagaaaaaactggacaaggtactgaagaactatgataccatctgccagattaattcagaaaggtatctgcagctggaacgggcacagtccctggttaaccaattctgggaaacatatgaagaactttggccatggctgacagaaacacaatcaatcatctctcagcttcccgccccagcccttgaatatgaaactctaaggcagcagcaggaagaacatcggcaactgcgtgagttgatagctgaacacaagcctcatatagataagatgaacaaaactgggccacagttactggaattgagccctggggaaggcttttctatccaagagaagtatgtggcagccgacaccctttacagtcaaattaaagaagatgtcaaaaagcgtgctgtggcactggatgaagccatttctcaatcaactcagttccatgacaagatagatcagatccttgagagcctggaacgcatcgtggaacgtctgaggcagccaccctctatctctgcagaggttgagaagatcaaggaacagatcagtgaaaataagaatgtgtcagtagacatggaaaagctacagccgttgtatgaaactcttaaacagaggggagaggaaatgattgctagatctggggggactgataaagacatatctgccaaagctgttcaggataagcttgaccaaatggttttcatttgggagaacatacacacactggtggaagagagggaagccaaactactggatgtgatggagctagcagaaaagttctggtgtgatcacatgtcattgatagttaccattaaagatactcaagatttcatccgggacctggaagatcctggaattgatccttcagtagtaaaacaacagcaagaagcagcagagaccataagggaagaaatagatggactacaggaggagctggatatagttattaacctaggttctgaactcattgcggcatgtggggagcctgataaacccattgtcaagaagagtatagatgagttaaattcagcatgggattctctaaataaagcttggaaagaccggattgacaaacttgaggaggcaatgcaggctgccgttcagtaccaggatggactgcaggcggtatttgactgggtagatattgcaggtggtaaattagcttcaatgtctccaattggaacagatctcgaaactgtcaagcagcagattgaagagctaaagcaatttaagtctgaggcctatcaacagcagatagaaatggaaagactgaatcatcaagcagagcttttgctaaagaaagtaacagaagagagtgacaaacacactgttcaagacccattaatggaactgaaattgatatgggatagcctggaggagagaatcatcaacagacagcataaactggagggtgctctattagccttgggtcagttccaacatgccctggatgagctcctggcatggctgacacacaccgagggcttgctaagtgagcagaaacctgttggaggagaccctaaagccattgaaattgaacttgccaagcatcatgtgctccaaaatgatgtattagcccatcagtccacagtggaagccgttaataaagcaggaaatgatctaattgaatcaagtgcaggagaagaagcaagcaaccttcagaacaagctagaggttttaaatcaacgctggcaaaatgttttggaaaaaacagaacaaaggaagcagcagctggatggtgccttgcgccaggccaaagggttccatggcgaaattgaggatttgcagcagtggctgactgacacggagcgtcatctgttggcatctaaaccgctgggaggtttaccggaaacagccaaggagcagcttaatgtccatatggaagtctgtgctgcctttgaagctaaagaagaaacatataagagtctgatgcagaaaggccagcagatgcttgcaagatgcccaaaatctgcagagacaaatattgaccaagacataaataacttgaaagaaaaatgggaatcggtggaaaccaaactcaatgaaaggaaaactaaactggaagaggctctcaacttggcaatggagttccacaattctctccaagacttcatcaactggcttactcaggctgaacagaccctaaatgtagcttctcggccaagtctcatcttggacacagtcttatttcaaattgacgaacacaaggtttttgccaatgaagtaaattctcatcgtgagcagataatagagctggacaaaactggaacccacctaaaatattttagtcagaaacaagatgttgttctaatcaagaatctacttatcagtgtacaaagtcgatgggaaaaagtggttcaacggttggtagagagaggaagatctttggatgatgcaaggaagagagccaagcagttccatgaagcttggagtaaacttatggagtggctagaagagtcagaaaagtctttggattctgaactggaaatcgcaaatgatccagacaaaataaaaacacaacttgcacaacataaggagtttcagaaatcactcggagccaagcattctgtctacgacaccaccaacaggactggacgttctctgaaggagaaaacctccctggctgatgacaacctgaaactggatgacatgctgagtgaactcagagacaaatgggataccatatgtggaaaatctgtggaaagacaaaacaaattggaggaagccctgttattttctggacaattcacagatgccctacaggctctcattgattggttatatagagttgaaccccagctggcagaagaccagcctgttcatggagacattgatttggtgatgaatctgatcgataatcacaaggccttccaaaaagagttggggaagaggaccagcagtgtgcaggccctgaagcgctcagcccgagaactcatagaaggcagtcgggatgactcctcctgggtcaaggtccagatgcaggaattaagcacacgctgggagaccgtgtgtgcactttctatatcaaagcaaacacggttagaagcagccctgcgtcaggcagaggaattccactcggtggtacatgccctcttggagtggctggctgaggcggagcaaaccctgcgtttccatggtgtcctcccagatgatgaggatgctctccggactctcattgatcagcataaagaattcatgaagaaactggaagaaaagagagctgaactaaataaagccaccactatgggcgacaccgttttggctatctgccaccccgactccatcactaccattaagcactggataacaatcatccgggcgaggtttgaggaggtgctggcctgggcaaagcaacatcagcagagattagcaagtgctctggctgggcttattgccaaacaggaattgttggaagctttgctggcttggttgcaatgggctgaaactacacttactgataaggataaagaagtcatcccccaggagatcgaagaggtgaaagcactcattgcagaacaccagaccttcatggaggaaatgaccagaaaacagcctgatgttgataaagtaacgaagacctataagaggagagctgctgatccttcctcattacaatcccatattccagtcttggataagggacgagcaggaagaaaacgctttccagcatcaagcttgtatccctctgggtcacagacacaaattgaaaccaaaaatcctagggtaaacttactgctgagggaatttgctaactttgattttgatatctggcgcaaaaaatacatgcgatggatgaatcacaagaaatctcgagtgatggacttcttcaggagaattgataaagaccaggatgggaaaataacgcggcaggaatttattgatggaattctttcctcaaagtttccaaccagtcgcttggagatgagcgcagttgcagacatctttgacagagatggcgatggatatattgactactatgaatttgtagcagcccttcacccaaataaagatgcatataaacctatcacagatgccgacaaaatcgaagatgaggtgacaaggcaggtagctaagtgtaaatgtgcaaagcgatttcaagttgagcagattggtgataataaatacagggtaagttttcaaagtaattttggagactcccagcaactgcgactggtccggatcctgcggagtactgtgatggttcgtgttggaggtggatggatggcacttgatgagttcttagtgaaaaatgatccttgcagggttcatcatcatgggagtaaaatgttacgttcggaatcaaactcttcaattactactactcagcctactatagccaaaggaaggacaaacatggaactgcgtgagaagttcattttagcagatggtgccagccagggtatggctgctttccgaccccgaggccgaagatcccggccatcatcacgaggcgcttcacccaacagatccacttctgtgtccagtcaggctgcgcaggcggcctccccacaggtccctgccaccaccacacccaagggaacgccaatacaaggaagcaagcttcgacttccaggatatttatcagggaaaggcttccactctggggaggacagtggcttgataacaactgcagctgccagagtccgaacacagtttgctgattccaagaagactcccagccgaccaggaagtcgagctggaagcaaagctggcagcagggccagcagccgccgaggcagtgatgcatcagactttgacatttcagaaatccagtccgtgtgctcagatgtggaaactgtcccccagacacacagacctacaccccgagcaggttctcggccatccacagcgaagccttcaaaaatccccacgccccagaggaaatcacctgccagcaaattggacaagtcctcaaagagatagtgcaattggttctaccaaggcccttccttgagcatttattatttaagtttgaacgatgtaaaatatggtgtagaaattcttgtgaaatattgcaagaggcgagtttaaaattctgcagatggccttatttgtgtatttgtctttttattttatctgtataattttttttgtcagatattctggggttaaagtcacatcatatgtgaggaggaaaagtttaacatgaactaacatttctgcactgtaacgtgccgggcacacactaaactcagttactgtacctacaggtaagtctacatcctctctgacagccacagcactacatcaatccctgacgttagggatacctcatgacattttcctgtttttatggaaactctgagaagctgaatgatacatgcaggggatattttttgagatgatttaaatgtaaaccaaaagatggaagacaaaaagacaaacacacccacacgcagtctttgcagtatctgacagagaactcacaggaagttacttcaagcacttgccagtactatgatattcaagtaccttgcagcatttctctgccattgctttcaatgaggccagaggcatcctggatattagacctattatactgtaagaatataagtataaagtgcgttcatatacatgtgaggttttcttttgcttgagtggacagtagcacctgtatcattgaactcattttgtatcagagcaattttgcttgcagaaagctatgaaataaaacacgtcccttaactgcattgctatggaattaattttttttccccagggaaaactagtgtatttttttatgagcaatatcaatttggagtgaccaaaagatacttaaaaatgggtttattttgatttctcatctgaaataatcatgttctggtattatatctatctatatttaataaatatatacattttaatttattatgtgtactcacatactatagaaagatattagtatgcatttaataaaacatattcacttgaatatatgg

SEQ ID NO: 258068 - protein, 1977 aa, Artificial Sequence
  derived and/or modified sequence
MAARSAPSCHLRLEWVYGYRGHQCRNNLYYTAAKEIVYFVAGVGVVYSPREHRQKFYRGHSDDIISLALHPERVLVATGQVGKEPYICIWDSYTVQTISVLKDVHTHGIACLAFDLDGQRLVSVGLDSKNAVCVWDWKRGKMLSMAPGHTDRIFDISWDLYQPNKLVSCGVKHIKFWSLCGNALTPKRGVFGKTGDLQTILCLACARDELTYSGALNGDIYVWKGINLIRTIQGAHAAGIFSMNACEEGFATGGRDGCIRLWDLTFKPITVIDLRETDQGYKGLSVRSVCWRGDHILVGTQDSEIFEIVVQERNKPFLIMQGHCEGELWALAVHPTKPLAVTGSDDRSVRIWSLVDHALIARCNMEEPIRCAAVNADGIHLALGMKDGSFTVLRVRDMTEVVHIKDRKEAIHELKYSPDGTYLAVGCNDSSVDIYGVAQRYKKVGECLGSLSFITHLDWSSDSRYLQTNDGNGKRLFYRMPGGKEVTSTEEIKGVHWASWTCVSGLEVNGIWPKYSDINDINSVDGNYIGQVLVTADDYGIIKLFRYPCLRKGAKFRKYIGHSAHVTNVRWSHDYQWVISIGGADHSVFQWKFIPERKLKDAVHIAPQESLADSHSDESDSDLSDVPELDSEIEQETQLTYRRQVYKEDLPQLKEQCKEKQKSATSKRRERAPGNSIRLHFVHGYRGYDCRSNLFYTQIGEIVYHVAAVGVIYNRQQNTQRFYLGHDDDILCLTIHPLKDYVATGQVGRDPSIHIWDTETIKPLSILKGHHQYGVSAVDFSADGKRLASVGIDDSHTVVLWDWKKGEKLSIARGSKDKIFVVKMNPYVPDKLITAGIKHMKFWRKAGGGLIGRKGYIGTLGKNDTMMCAVYGWTEEMAFSGTSTGDVCIWRDIFLVKTVKAHDGPVFSMHALEKGFVTGGKDGIVALWDDSFERCLKTYAIKRAALAPGSKGLLLEDNPSIRAISLGHGHILVGTKNGEILEVDKSGPITLLVQGHMEGEVWGLATHPYLPICATVSDDKTLRIWDLSPSHCMLAVRKLKKGGRCCCFSPDGKALAVGLNDGSFLMANADTLEDLVSFHHRKDMISDIRFSPGSGKYLAVASHDSFIDIYNVMSSKRVGICKGATSYITHIDWDIRGKLLQVNTGAKEQLFFEAPRGKKQTIPSVEVEKIAWASWTSVLGLCCEGIWPVIGEVTDVTASCLTSDKMVLATGDDLGFVKLFRYPTKGKFGKFKRYVAHSTHVTNVRWTYDDSMLVTLGGTDMSLMVWTNEMEGYREKRPCDSEESDIDSEEDGGYDSDVTRENEISYTIRALSTNIRPMLGIKPHLQQKEPSIDERQGVVRGSRPPVSRAPPQPEKLQTNNVGKKKRPIEDLVLELIFGYRGRDCRNNVHYLNDGDDIIYHTASVGILHNVATGSQSFYQEHNDDILCLTVNQHPKFINIVATGQVGDSADMSATAPSIHIWDAMNKQTLSILRCYHSKGVCSVSFSATGKLLLSVGLDPEHTITIWRWQEGAKIASRAGHNQRIFVAEFRPDSDTQFVSVGVKHVKFWTLAGRALLSKKGLLSTLEDARMQTMLAIAFGANNLTFTGTISGDVCVWKDHILCRIVARAHNGPVFAMYTTLRDGLIVTGGKERPSKEGGAVKLWDQELRRCRAFRLETGQATDCVRSVCRGKGKILVGTRNAEIIEVGEKNAACNILVNGHVDGPIWGLATHPSRDFFLSAAEDGTVRLWDIADKKMLNKVNLGHAARTVCYSPEGDMVAIGMKNGEFIILLVSSLKIWGKKRDRRCAIHDIRFSPDSRYLAVGSSENSVDFYDLTLGPTLNRISYCKDIPSFVIQMDFSADSSYLQVSSGCYKRHVYEVPSGKHLMDHAAIDRITWATWTSILGDEVLGIWSRHAEKADVNCACVSHSGISLVTGDDFGMVKLFDFPCPEKFAKHKRFLGHSPHVTNIRFTSGDRHVVSAGGDDCSLFVWKCVHTPH

SEQ ID NO: 258069 - DNA, 5934 bp, Artificial Sequence
  derived and/or modified sequence
atggccgccagaagcgcccccagctgccacctgagactggagtgggtgtacggctacagaggccaccagtgcagaaacaacctgtactacaccgccgccaaggagatcgtgtacttcgtggccggcgtgggcgtggtgtacagccccagagagcacagacagaagttctacagaggccacagcgacgacatcatcagcctggccctgcaccccgagagagtgctggtggccaccggccaggtgggcaaggagccctacatctgcatctgggacagctacaccgtgcagaccatcagcgtgctgaaggacgtgcacacccacggcatcgcctgcctggccttcgacctggacggccagagactggtgagcgtgggcctggacagcaagaacgccgtgtgcgtgtgggactggaagagaggcaagatgctgagcatggcccccggccacaccgacagaatcttcgacatcagctgggacctgtaccagcccaacaagctggtgagctgcggcgtgaagcacatcaagttctggagcctgtgcggcaacgccctgacccccaagagaggcgtgttcggcaagaccggcgacctgcagaccatcctgtgcctggcctgcgccagagacgagctgacctacagcggcgccctgaacggcgacatctacgtgtggaagggcatcaacctgatcagaaccatccagggcgcccacgccgccggcatcttcagcatgaacgcctgcgaggagggcttcgccaccggcggcagagacggctgcatcagactgtgggacctgaccttcaagcccatcaccgtgatcgacctgagagagaccgaccagggctacaagggcctgagcgtgagaagcgtgtgctggagaggcgaccacatcctggtgggcacccaggacagcgagatcttcgagatcgtggtgcaggagagaaacaagcccttcctgatcatgcagggccactgcgagggcgagctgtgggccctggccgtgcaccccaccaagcccctggccgtgaccggcagcgacgacagaagcgtgagaatctggagcctggtggaccacgccctgatcgccagatgcaacatggaggagcccatcagatgcgccgccgtgaacgccgacggcatccacctggccctgggcatgaaggacggcagcttcaccgtgctgagagtgagagacatgaccgaggtggtgcacatcaaggacagaaaggaggccatccacgagctgaagtacagccccgacggcacctacctggccgtgggctgcaacgacagcagcgtggacatctacggcgtggcccagagatacaagaaggtgggcgagtgcctgggcagcctgagcttcatcacccacctggactggagcagcgacagcagatacctgcagaccaacgacggcaacggcaagagactgttctacagaatgcccggcggcaaggaggtgaccagcaccgaggagatcaagggcgtgcactgggccagctggacctgcgtgagcggcctggaggtgaacggcatctggcccaagtacagcgacatcaacgacatcaacagcgtggacggcaactacatcggccaggtgctggtgaccgccgacgactacggcatcatcaagctgttcagatacccctgcctgagaaagggcgccaagttcagaaagtacatcggccacagcgcccacgtgaccaacgtgagatggagccacgactaccagtgggtgatcagcatcggcggcgccgaccacagcgtgttccagtggaagttcatccccgagagaaagctgaaggacgccgtgcacatcgccccccaggagagcctggccgacagccacagcgacgagagcgacagcgacctgagcgacgtgcccgagctggacagcgagatcgagcaggagacccagctgacctacagaagacaggtgtacaaggaggacctgccccagctgaaggagcagtgcaaggagaagcagaagagcgccaccagcaagagaagagagagagcccccggcaacagcatcagactgcacttcgtgcacggctacagaggctacgactgcagaagcaacctgttctacacccagatcggcgagatcgtgtaccacgtggccgccgtgggcgtgatctacaacagacagcagaacacccagagattctacctgggccacgacgacgacatcctgtgcctgaccatccaccccctgaaggactacgtggccaccggccaggtgggcagagaccccagcatccacatctgggacaccgagaccatcaagcccctgagcatcctgaagggccaccaccagtacggcgtgagcgccgtggacttcagcgccgacggcaagagactggccagcgtgggcatcgacgacagccacaccgtggtgctgtgggactggaagaagggcgagaagctgagcatcgccagaggcagcaaggacaagatcttcgtggtgaagatgaacccctacgtgcccgacaagctgatcaccgccggcatcaagcacatgaagttctggagaaaggccggcggcggcctgatcggcagaaagggctacatcggcaccctgggcaagaacgacaccatgatgtgcgccgtgtacggctggaccgaggagatggccttcagcggcaccagcaccggcgacgtgtgcatctggagagacatcttcctggtgaagaccgtgaaggcccacgacggccccgtgttcagcatgcacgccctggagaagggcttcgtgaccggcggcaaggacggcatcgtggccctgtgggacgacagcttcgagagatgcctgaagacctacgccatcaagagagccgccctggcccccggcagcaagggcctgctgctggaggacaaccccagcatcagagccatcagcctgggccacggccacatcctggtgggcaccaagaacggcgagatcctggaggtggacaagagcggccccatcaccctgctggtgcagggccacatggagggcgaggtgtggggcctggccacccacccctacctgcccatctgcgccaccgtgagcgacgacaagaccctgagaatctgggacctgagccccagccactgcatgctggccgtgagaaagctgaagaagggcggcagatgctgctgcttcagccccgacggcaaggccctggccgtgggcctgaacgacggcagcttcctgatggccaacgccgacaccctggaggacctggtgagcttccaccacagaaaggacatgatcagcgacatcagattcagccccggcagcggcaagtacctggccgtggccagccacgacagcttcatcgacatctacaacgtgatgagcagcaagagagtgggcatctgcaagggcgccaccagctacatcacccacatcgactgggacatcagaggcaagctgctgcaggtgaacaccggcgccaaggagcagctgttcttcgaggcccccagaggcaagaagcagaccatccccagcgtggaggtggagaagatcgcctgggccagctggaccagcgtgctgggcctgtgctgcgagggcatctggcccgtgatcggcgaggtgaccgacgtgaccgccagctgcctgaccagcgacaagatggtgctggccaccggcgacgacctgggcttcgtgaagctgttcagataccccaccaagggcaagttcggcaagttcaagagatacgtggcccacagcacccacgtgaccaacgtgagatggacctacgacgacagcatgctggtgaccctgggcggcaccgacatgagcctgatggtgtggaccaacgagatggagggctacagagagaagagaccctgcgacagcgaggagagcgacatcgacagcgaggaggacggcggctacgacagcgacgtgaccagagagaacgagatcagctacaccatcagagccctgagcaccaacatcagacccatgctgggcatcaagccccacctgcagcagaaggagcccagcatcgacgagagacagggcgtggtgagaggcagcagaccccccgtgagcagagcccccccccagcccgagaagctgcagaccaacaacgtgggcaagaagaagagacccatcgaggacctggtgctggagctgatcttcggctacagaggcagagactgcagaaacaacgtgcactacctgaacgacggcgacgacatcatctaccacaccgccagcgtgggcatcctgcacaacgtggccaccggcagccagagcttctaccaggagcacaacgacgacatcctgtgcctgaccgtgaaccagcaccccaagttcatcaacatcgtggccaccggccaggtgggcgacagcgccgacatgagcgccaccgcccccagcatccacatctgggacgccatgaacaagcagaccctgagcatcctgagatgctaccacagcaagggcgtgtgcagcgtgagcttcagcgccaccggcaagctgctgctgagcgtgggcctggaccccgagcacaccatcaccatctggagatggcaggagggcgccaagatcgccagcagagccggccacaaccagagaatcttcgtggccgagttcagacccgacagcgacacccagttcgtgagcgtgggcgtgaagcacgtgaagttctggaccctggccggcagagccctgctgagcaagaagggcctgctgagcaccctggaggacgccagaatgcagaccatgctggccatcgccttcggcgccaacaacctgaccttcaccggcaccatcagcggcgacgtgtgcgtgtggaaggaccacatcctgtgcagaatcgtggccagagcccacaacggccccgtgttcgccatgtacaccaccctgagagacggcctgatcgtgaccggcggcaaggagagacccagcaaggagggcggcgccgtgaagctgtgggaccaggagctgagaagatgcagagccttcagactggagaccggccaggccaccgactgcgtgagaagcgtgtgcagaggcaagggcaagatcctggtgggcaccagaaacgccgagatcatcgaggtgggcgagaagaacgccgcctgcaacatcctggtgaacggccacgtggacggccccatctggggcctggccacccaccccagcagagacttcttcctgagcgccgccgaggacggcaccgtgagactgtgggacatcgccgacaagaagatgctgaacaaggtgaacctgggccacgccgccagaaccgtgtgctacagccccgagggcgacatggtggccatcggcatgaagaacggcgagttcatcatcctgctggtgagcagcctgaagatctggggcaagaagagagacagaagatgcgccatccacgacatcagattcagccccgacagcagatacctggccgtgggcagcagcgagaacagcgtggacttctacgacctgaccctgggccccaccctgaacagaatcagctactgcaaggacatccccagcttcgtgatccagatggacttcagcgccgacagcagctacctgcaggtgagcagcggctgctacaagagacacgtgtacgaggtgcccagcggcaagcacctgatggaccacgccgccatcgacagaatcacctgggccacctggaccagcatcctgggcgacgaggtgctgggcatctggagcagacacgccgagaaggccgacgtgaactgcgcctgcgtgagccacagcggcatcagcctggtgaccggcgacgacttcggcatggtgaagctgttcgacttcccctgccccgagaagttcgccaagcacaagagattcctgggccacagcccccacgtgaccaacatcagattcaccagcggcgacagacacgtggtgagcgccggcggcgacgactgcagcctgttcgtgtggaagtgcgtgcacaccccccactag

SEQ ID NO: 258070 - DNA, 5934 bp, Artificial Sequence
  derived and/or modified sequence
atggcggcaagatctgcaccctcttgccatctgagactggaatgggtttacggctacaggggtcatcaatgccgaaacaatttatactatactgccgccaaagagattgtgtactttgtggcgggcgtaggcgtcgtgtattcacctcgagagcaccgccagaagttttaccgtggccacagcgatgatatcatttctctagccctacatccggaaagagtgctcgtcgctaccggccaagtagggaaagagccttatatttgcatatgggatagttatacagtgcagactatttctgtcctgaaagacgtgcatacacacggtatcgcatgcctcgcatttgatctggacgggcagcgcttagtctccgtgggcctcgattccaagaacgcagtttgcgtctgggactggaaacgtggaaagatgttgtccatggcccctggccacactgatcgcatttttgacatttcttgggacctctaccagcctaacaagctggtttcgtgcggtgtgaaacacattaaattttggagcttatgtggtaatgctctgacccctaaacggggcgtttttggcaaaacgggggacttacagaccatcctgtgcctggcttgtgctcgagacgaattaacttactccggggcattgaatggcgatatctacgtttggaaagggatcaacctaattcgaaccattcagggggctcacgccgccggaatattctccatgaacgcctgtgaagagggcttcgcgaccggcggacgggacgggtgcattcgtctgtgggaccttacgttcaagcctattactgtcattgatctgagagaaaccgaccagggctataaaggtcttagcgtccgaagcgtctgttggaggggagaccatatcctggtcggtacgcaggactctgagatcttcgagattgtcgttcaggaaagaaacaaaccctttcttatcatgcagggtcactgcgagggggagctctgggcccttgccgtccacccaacaaagccccttgctgtgacggggagtgatgatcggtccgttcggatctggtctctggtggaccatgcgttgattgctcggtgtaatatggaggagcccattaggtgcgccgctgtaaatgccgatggaattcatctggccctgggcatgaaggacggatcgttcaccgtgctcagagtccgtgatatgacggaagtagtgcacatcaaggacaggaaggaggctatccacgagttgaaatattcacctgatggcacctatctggccgtcggctgcaatgattcatccgtggatatttatggggtggcgcagagatacaagaaagtgggtgaatgtcttggatctctcagcttcatcacacacttggactggtcttctgatagcagatatctgcagactaatgacgggaatggaaaacgcttattttaccgtatgcctggcggcaaggaggtaaccagcacggaagagatcaagggtgttcattgggccagctggacatgcgtctcaggactggaggttaatggcatctggcccaaatacagtgatatcaatgacatcaattctgtcgatggaaattacattggccaggtgctcgtgacagctgacgactacggtatcattaaactcttcagatatccttgcctgagaaaaggtgcaaagttcaggaagtacatcggtcacagtgcccacgtgacaaatgtaaggtggagtcacgactaccagtgggttatctccatcgggggtgccgatcatagtgtgttccagtggaagttcatcccagaacgaaaactaaaggacgctgtgcacatcgccccccaagagtccctggcagattcccatagcgacgagagcgattctgatctctcagatgtgcccgagctggacagcgagatagagcaggaaacccagctcacttacagacggcaggtgtataaagaagacctgccccaactaaaggagcagtgtaaggaaaaacaaaagtccgcgacatctaagagacgtgaaagagcgcccggcaactccatacgactgcattttgtgcacggttatcgaggctacgattgtagatcaaaccttttttacacccaaattggagaaatagtttatcatgtggcagccgtcggtgttatctataaccgccagcagaatactcagaggttctaccttgggcacgatgatgatatcctttgtctcaccatccatcccttaaaagactacgtggcaacgggacaggtaggcagggatccttctatccacatctgggataccgagaccatcaagcctctctctattctgaagggccatcatcagtatggagtcagcgcagttgattttagcgcagacggcaaaagacttgcctctgtgggcatagacgacagccatacagtggtgctgtgggactggaagaaaggggagaagctgtctattgcacgggggtctaaagataaaatttttgtagtgaagatgaatccgtatgtgcctgataaattaataaccgccggcataaaacacatgaaattttggcggaaagccggcggcgggcttatcgggagaaagggctacattgggaccttgggaaaaaacgataccatgatgtgtgctgtgtacgggtggaccgaggaaatggcctttagcggaaccagcacaggtgacgtgtgtatctggcgtgacatcttccttgtcaaaaccgtgaaagcccacgatgggcctgtgttttctatgcacgccctcgaaaagggctttgtgactggcggcaaagacggtatcgttgcattatgggatgattctttcgagaggtgcctgaagacttatgcgatcaagagagccgcgcttgctccaggaagcaagggactgctgctcgaggataacccgtccattcgggcaatctccctgggccatggacatatactcgtgggaaccaagaacggggagatactcgaagtggataagagcggacccattaccctgcttgtccagggtcacatggaaggcgaagtgtggggcctggcaactcatccatacctccccatatgcgccacagtgtccgatgataagaccttgcggatttgggatctttccccttctcactgcatgctggccgttcgcaagttaaaaaaaggtggacggtgctgttgtttctcccctgacgggaaggccctggctgtaggcctgaatgatggtagctttcttatggcgaatgctgacaccctcgaagatttagtgtcctttcaccatagaaaggacatgatcagtgacatcagattctcgcccggctcaggcaaatacttagccgtcgccagccatgactcctttatcgacatatataatgtgatgtctagcaagagagtcgggatttgtaagggtgctacctcttacatcacgcatattgactgggacattcgaggcaagctgcttcaagtcaatactggggccaaggagcaactgttctttgaggcgcctaggggtaagaaacagaccattcctagcgtcgaagtagaaaagatcgcctgggcgtcctggaccagtgtactcggcctgtgctgcgaaggtatttggcccgtcatcggtgaggtgaccgatgtcacagcgagttgcttgacctccgataagatggtgttggccactggcgatgaccttggctttgtcaagttatttcggtaccctaccaaagggaaattcggaaagttcaaacgctacgttgcacacagcacccacgtaacaaatgtccgctggacatatgacgattcaatgcttgtgacactgggcggcacagatatgtccctgatggtttggacaaacgagatggagggctatcgcgagaagcggccatgtgattcagaagaatccgacattgattctgaggaagatggcggatatgattcagatgtgactcgtgaaaatgagatctcgtatacaattcgggccctcagcacaaacatccggccaatgctggggattaaaccccatttacagcagaaagagcccagtatcgatgagcgccaaggcgtagtacgggggagccgaccccctgtctccagagctccacctcaaccagagaaactccagacaaacaacgtgggcaaaaaaaagagacccattgaagacctggtcctcgagctgatttttggctatagggggcgcgattgtaggaacaacgttcattatctgaatgacggagacgatatcatataccatacggcctcagtgggaatcctgcataatgtcgctaccggctcccagagcttctatcaggaacacaacgatgatatcctgtgtctgaccgtgaaccagcatccgaagtttattaacatcgtcgccacaggccaggtgggcgattccgccgacatgtcagcgaccgctccctccatccacatttgggacgctatgaataaacaaaccctcagcattctccgttgttaccatagtaagggggtctgctcggtgtccttcagtgcaaccggcaagttattattaagtgtcgggctggatccagaacatacaataacgatttggcgatggcaggagggagcaaaaatcgcctccagggccggtcacaaccagaggatctttgttgctgaattccgcccagactcggacacccaatttgttagcgtgggcgttaagcacgtgaagttttggacgcttgccggtcgcgctctgctaagtaaaaaggggctcctatccaccttagaggacgcccgtatgcagactatgctggccatcgcctttggcgccaacaatctcacctttactggcacaatctcaggggacgtctgtgtgtggaaagatcatatcctgtgccgcatcgtggcgcgggcccacaacggcccagtcttcgcaatgtacacaacgctgcgagatgggctgatcgtgactggtggcaaggagcggcccagtaaggagggaggcgcagtaaagctttgggaccaggagctgcgtagatgccgtgcatttagactcgaaactggccaggctacagactgcgttcggtctgtgtgtagggggaagggcaagattttagtggggacaaggaatgctgagatcatagaggtgggcgaaaagaacgcagcctgcaacattcttgtaaacgggcacgttgacgggccaatctggggactcgccacacacccatcaagggatttcttcctcagcgctgccgaagacggtaccgtgcggttgtgggatattgccgacaagaagatgcttaataaagtgaacttgggccacgccgcaagaacagtttgctattcacctgaaggggacatggttgctatcgggatgaagaatggggagtttattatcctgctggtctcttccctgaaaatttgggggaagaagcgggacagaaggtgtgcaattcatgacatcagattctccccagattcacgttacctagccgtgggatcgtcagaaaatagcgttgacttctacgatttaactcttggtcccactctgaatcggatctcctattgtaaagatattccgtcattcgtcatccaaatggacttcagtgcagacagtagctacctacaggtgtcttccggatgttacaaacgccacgtttacgaagtgccatccggtaagcacttgatggaccatgcagccattgataggattacctgggcaacatggacctcaatccttggtgacgaagtgcttgggatctggtccaggcacgccgagaaggccgatgtcaactgcgcgtgcgtatcccattctggtattagcctagtgactggcgatgattttggaatggttaagctgttcgactttccatgccccgagaagttcgccaaacataaacgcttcctgggccatagtccacatgtgacaaatattcggtttaccagtggcgatagacacgtggtgagcgctggcggtgacgattgtagcctcttcgtttggaagtgcgtgcacacaccacactag

SEQ ID NO: 258071 - DNA, 5934 bp, Artificial Sequence
  derived and/or modified sequence
atggccgcccggagcgcccccagctgccacctgcggctggagtgggtgtatggctaccggggccaccagtgcaggaacaacctgtactacacagctgccaaggagatcgtgtactttgtggccggcgtgggcgtggtgtacagcccccgggagcaccggcagaagttctaccggggccacagtgatgacatcatcagcctggccctgcaccctgagcgggtgctggtggccaccggccaggtgggcaaggagccctacatctgcatctgggacagctacacagtgcagaccatctctgtgctgaaggatgtgcacacccatggaattgcctgcctggcctttgacctggatggccagaggctggtgtctgtgggcctggacagcaagaatgctgtgtgtgtgtgggactggaagaggggcaagatgctgtccatggcccctggccacacagaccgcatctttgacatctcctgggacctgtaccagcccaacaagctggtgtcctgtggggtgaagcacatcaagttctggagcctgtgtggaaatgccctgacccccaagaggggcgtgtttgggaagacaggagacctgcagaccatcctgtgcctggcctgtgccagagatgagctgacctacagcggggccctgaatggagacatctacgtgtggaagggcatcaacctgatccgcaccatccagggcgcccatgctgctggcatcttctccatgaatgcctgtgaggagggctttgccaccggcggcagagatggctgcatccggctgtgggacctgaccttcaagcccatcaccgtcatcgacctgcgggagacagaccagggctacaagggcctgtctgtgcgctctgtgtgctggaggggggaccacatcctggtgggcacccaggacagcgagatctttgagatcgtggtgcaggagaggaacaagcccttcctgatcatgcagggccactgtgagggggagctgtgggccctggccgtgcaccccaccaagcccctggccgtgacaggcagtgatgacagatctgtgcgcatctggagcctggtggaccacgccctgattgcccgctgcaacatggaggagcccatccgctgtgccgctgtgaatgctgatggcatccacctggccctgggcatgaaggatggcagcttcaccgtgctgcgggtgcgggacatgacagaggtggtgcacatcaaggacaggaaggaggccatccacgagctgaagtacagcccagatggcacctacctggccgtgggctgcaatgacagctctgtggacatctatggagtggcccagcgctacaagaaggtgggggagtgcctgggcagcctgtccttcatcacccacctggactggagcagtgacagccgctacctgcagaccaatgatggaaatggcaagaggctcttctacaggatgcctgggggcaaggaggtgaccagcacagaggagatcaagggcgtgcactgggcctcctggacctgtgtgtctggcctggaggtgaatggcatctggcccaagtacagcgacatcaatgacatcaacagcgtggatggcaactacatcggccaggtgctggtgacagcagatgattatggcatcatcaagctgttccgctacccctgcctgaggaagggggccaagttcaggaagtacatcggccacagcgcccacgtgaccaacgtgcgctggagccatgactaccagtgggtgatcagcattggaggagctgaccacagcgtcttccagtggaagttcatccctgagaggaagctgaaggatgctgtgcacatcgccccccaggagagcctggccgacagccacagtgatgaaagtgacagcgacctgagtgatgtgcctgagctggacagcgagattgagcaggagacccagctgacctaccgccggcaggtgtacaaggaggacctgccccagctgaaggagcagtgcaaggagaagcagaagagcgccaccagcaagaggcgggagcgggcccctggcaacagcatccggctgcactttgtgcacggctaccggggctatgactgccgcagcaacctcttctacacccagattggagagatcgtgtaccacgtggccgctgtgggcgtcatctacaaccggcagcagaacacccagcgcttctacctgggccatgatgatgacatcctgtgcctgaccatccaccccctgaaggactatgtggccaccggccaggtgggccgggaccccagcatccacatctgggacacagagaccatcaagcccctgagcatcctgaagggccaccaccagtatggagtgtctgctgtggacttcagcgcagatggcaagaggctggcctctgtgggcattgatgacagccacacagtggtgctgtgggactggaagaagggggagaagctgagcatcgcccggggcagcaaggacaagatctttgtggtgaagatgaacccctacgtgcctgacaagctgatcacagctggcatcaagcacatgaagttctggaggaaggccggcggcggcctgattggaaggaagggctacatcggcaccctgggcaagaatgacaccatgatgtgtgctgtgtatggctggacagaggagatggccttcagcggcaccagcactggagatgtgtgcatctggagggacatcttcctggtgaagacagtgaaggcccatgatggccctgtgttctccatgcacgccctggagaagggctttgtgactggaggcaaggatggcatcgtggccctgtgggatgacagctttgagcgctgcctgaagacctacgccatcaagagagctgccctggcccctggcagcaagggcctgctgctggaggacaaccccagcatccgggccatcagcctgggccacggccacatcctggtgggcaccaagaatggagagatcctggaggtggacaagagcggccccatcaccctgctggtgcagggccacatggagggggaggtgtggggcctggccacccacccctacctgcccatctgtgccaccgtgtctgatgacaagaccctgcgcatctgggacctgagccccagccactgcatgctggccgtgaggaagctgaagaagggcggccgctgctgctgcttctccccagatggcaaggccctggccgtgggcctgaatgatggcagcttcctgatggccaatgctgacaccctggaggacctggtgtccttccaccacaggaaggacatgatcagtgacatccgcttcagccctggcagcggcaagtacctggccgtggccagccatgacagcttcatcgacatctacaacgtgatgagcagcaagagggtgggcatctgcaagggggccaccagctacatcacccacatcgactgggacatccggggcaagctgctgcaggtgaacacaggagccaaggagcagctgttctttgaggccccccggggcaagaagcagaccatccccagcgtggaggtggagaagatcgcctgggcctcctggacctctgtgctgggcctgtgctgtgagggcatctggcctgtgattggagaggtgacagatgtgacagccagctgcctgaccagtgacaagatggtgctggccactggagatgacctgggctttgtgaagctgttccgctaccccaccaagggcaagtttgggaagttcaagcgctacgtggcccacagcacccacgtgaccaacgtgcgctggacctatgatgacagcatgctggtgaccctgggcggcacagacatgagcctgatggtgtggaccaatgagatggagggctaccgggagaagaggccctgtgacagcgaggagagtgacatcgacagcgaggaggatggcggctatgacagtgatgtgaccagagaaaatgagatctcctacaccatccgggccctgagcaccaacatccggcccatgctgggcatcaagccccacctgcagcagaaggagcccagcattgatgagcggcagggcgtggtgcggggcagccggccccctgtgtcccgggccccaccccagcctgagaagctgcagaccaacaacgtgggcaagaagaagaggcccatcgaggacctggtgctggagctgatcttcggctaccggggccgggactgcagaaataatgtgcactacctgaatgatggagatgacatcatctaccacacagcctctgtgggcatcctgcacaacgtggccaccggcagccagagcttctaccaggagcacaatgatgacatcctgtgcctgactgtgaaccagcaccccaagttcatcaacatcgtggccaccggccaggtgggggacagcgctgacatgtctgccacagcccccagcatccacatctgggatgccatgaacaagcagaccctgagcatcctgcgctgctaccacagcaagggcgtgtgcagcgtgtccttcagcgccaccgggaagctgctgctgtctgtgggcctggaccctgagcacaccatcaccatctggcgctggcaggagggcgccaagatcgccagccgggccggccacaaccagaggatctttgtggccgagttccggccagacagcgacacccagtttgtgtctgtgggcgtgaagcacgtgaagttctggaccctggccggccgggccctgctgagcaagaagggcctgctgagcaccctggaggatgccaggatgcagaccatgctggccatcgccttcggggccaacaacctgaccttcaccggcaccatctctggagatgtgtgtgtgtggaaggaccacatcctgtgccgcatcgtggcccgggcccacaacggccctgtgtttgccatgtacaccaccctgagagatggcctgattgtgactggaggcaaggagcggcccagcaaggagggcggcgctgtgaagctgtgggaccaggagctgcggcgctgccgggccttccggctggagaccggccaggccacagactgtgtgcgctctgtgtgccggggcaagggcaagatcctggtgggcaccagaaatgctgagatcatcgaggtgggggagaagaatgctgcctgcaacatcctggtgaatggccacgtggatggccccatctggggcctggccacccaccccagccgggacttcttcctgtctgctgctgaagatggcaccgtgcggctgtgggacattgctgacaagaagatgctgaacaaggtgaacctgggccatgctgccaggacagtgtgctacagccctgagggggacatggtggccatcggcatgaagaatggagagttcatcatcctgctggtgagcagcctgaagatctggggcaagaagagggaccggcgctgtgccatccatgacatccgcttctccccagacagccgctacctggccgtgggcagcagcgagaacagcgtggacttctatgacctgaccctgggccccaccctgaaccgcatctcctactgcaaggacatccccagctttgtgatccagatggacttctctgctgacagcagctacctgcaggtgagcagcggctgctacaagagacatgtgtatgaggtgcccagcggcaagcacctgatggaccatgctgccatcgaccgcatcacctgggccacctggaccagcatcctgggagatgaggtgctgggcatctggagcagacatgctgagaaggcagatgtgaactgtgcctgtgtgagccacagcggcatcagcctggtgactggagatgactttggcatggtgaagctgtttgacttcccctgcccagagaagtttgccaagcacaagcgcttcctgggccacagcccccacgtgaccaacatccgcttcaccagcggggacagacatgtggtgtctgctggaggagatgactgcagcctgtttgtgtggaagtgtgtgcacaccccccactag

SEQ ID NO: 258072 - DNA, 5934 bp, Artificial Sequence
  derived and/or modified sequence
atggccgcccggagcgcccccagctgccacctgcggctggagtgggtttatggttatcgtgggcaccagtgccgcaacaatctgtactacactgcggcgaaagagattgtgtacttcgtggccggtgtaggagtcgtgtactcccctcgagagcaccgccagaagttttacagaggccattctgatgacattataagtctggctttgcaccccgaacgcgtcctggtcgcaaccgggcaagttgggaaggaaccatatatttgcatttgggattcctacactgtgcagacaatttccgtgctgaaagacgtgcacacacatgggatcgcatgccttgcctttgatctggacggacagcggttggtgtctgtcggtctggactctaagaacgccgtgtgcgtctgggactggaagagaggaaagatgctatccatggcaccaggccacacagataggatctttgacatttcttgggatctttaccagccaaacaaacttgtatcttgcggcgttaagcacataaagttttggtctttatgtggtaacgcccttacgcccaaacggggggttttcggcaagaccggcgatctgcagactatattatgtctggcttgcgccagagatgaacttacgtactccggcgcactaaacggagacatttatgtgtggaagggaatcaatcttatcagaacgatccagggggcccatgccgcgggcatctttagcatgaatgcctgtgaggaggggttcgctaccggcggaagagatggatgcatccgactatgggacttgacatttaagcccataacagtgatcgacctcagagaaaccgaccagggttacaagggcctgtccgtgcgctccgtatgttggaggggtgaccacatcctggttgggactcaggactctgaaatcttcgagatagtggtccaggaacggaacaagccttttctgatcatgcaggggcattgtgaaggagaactgtgggcactggccgtgcaccccactaaacccctggcagttaccggttcagatgatcgctcagtgcgtatttggtctctggtggaccatgccctgatagcccgttgcaacatggaagagcccatccgctgtgcagccgtcaatgccgacggcatccatctggccctgggcatgaaagatggttccttcactgttttgagagtacgagacatgaccgaagtggtccacatcaaggacagaaaggaggctatccacgagctgaagtacagtcccgatgggacgtatctagccgttggctgtaatgattctagcgttgatatctacggcgtggctcaaaggtataagaaagttggcgagtgtttgggtagcctatcttttatcacacatttagactggtcatcggactcccggtacctgcagacaaacgacgggaatgggaaacgcctcttctaccgcatgcccggcggtaaggaagtgacgagcaccgaggaaatcaagggagtgcactgggcgtcctggacctgtgtcagcggacttgaggtgaacggtatctggcccaaatacagcgacattaacgatataaattctgttgacggaaattatatagggcaagtgcttgtgacggctgacgattacggcattattaaactgtttcggtatccgtgtctccgcaagggcgctaagttccgcaagtatatcgggcatagtgcccacgtgacaaatgtccggtggtcacatgattaccagtgggtgatcagtataggaggcgcggatcactcagtgttccagtggaagttcatcccagagaggaagctgaaggatgccgtccatattgcccctcaggagtccctcgccgactcacattcggatgaaagcgactccgatctgtcagacgtgcccgaattagattctgagattgagcaggagactcaactcacataccgccggcaggtgtacaaggaagatctgcctcaactaaaggagcaatgcaaggagaaacagaagtctgccacttctaagcggcgggaaagggcccccgggaactccatccggctgcactttgtgcacgggtataggggatatgactgtcgatccaacttgttctacacccagataggggagatcgtgtatcatgtagccgcagtgggtgtgatctacaatcgacagcagaacactcagcgattttacttaggacacgatgacgacatcctgtgtctcaccattcaccctctgaaagattacgtggccactggtcaggtgggaagagatccaagcatccatatttgggacaccgagactataaaacccctcagtatcctcaaaggccatcatcagtatggcgtgagtgccgtcgactttagcgccgacggaaagaggctagcctccgtaggcatagacgacagccacacagtagtgctgtgggattggaaaaaaggcgagaagctttctattgcacgtggaagcaaagacaaaatctttgtggtcaagatgaacccctacgttcctgacaaactgattaccgccggcataaagcatatgaagttctggcgaaaggccggtggcggactgatcgggaggaaaggctacatcggcacactgggaaagaacgacacaatgatgtgcgcagtatatgggtggacggaagagatggcattctccggcacctcgaccggggacgtgtgcatatggagggatatcttcttggtgaaaactgtgaaagctcacgacggccctgtgttttccatgcacgctctagagaagggtttcgtcacagggggcaaggacggcatagtggctctctgggacgatagtttcgaacgctgcttaaagacatacgccattaagcgggctgcactggccccagggagtaagggattgctactggaagacaatcctagtatccgggcgattagtttaggccatggacacattctggtcgggacaaaaaacggtgagatcctggaggtcgacaagagtggccccataactttgcttgtgcagggacacatggagggcgaagtgtggggcttagccacccatccctacttaccgatttgtgccaccgtctccgatgacaagacattacgaatttgggacttgagcccctcacactgcatgctggccgttcgcaaattaaagaaaggtggtcggtgctgctgcttctcgcctgatggcaaggctcttgccgttggcctcaatgacggatcttttctgatggcgaacgcggacactctcgaagatttagtgtcattccatcaccggaaagacatgatctctgatattagattttcccccggcagtgggaagtatttggccgttgcaagccacgactcttttattgatatatacaacgtgatgtcaagcaagagggtgggcatttgcaagggcgcgaccagctatataacgcacattgattgggatattaggggcaaacttctgcaggtgaacacgggcgccaaggaacagctgttttttgaggcccctaggggcaaaaaacagacgattcctagcgtagaggtggaaaagatcgcgtgggctagctggacctcagtcctgggtctttgttgtgaagggatctggccggtgattggcgaagtgactgatgtgactgcctcatgtttgacatcggataagatggtactcgctacgggcgacgaccttgggttcgtgaaactgtttaggtatcccacaaaggggaagttcggtaagtttaaacgatacgtggctcacagcactcatgtcaccaacgtcaggtggacctatgatgactcaatgctggtcacactaggcggtacagacatgtctctgatggtctggacgaacgagatggagggttaccgggaaaaacgaccttgtgacagtgaggaatccgacatagatagtgaagaagacggtggctacgacagcgacgttacccgggaaaatgagattagctacaccatcagagccctgagtactaatattcgaccaatgcttggcatcaagcctcacctacaacaaaaggagccctcaatcgatgaacgacagggagtggtgaggggaagtaggccaccggtatctagagctccgccccagcccgaaaagctgcagactaataatgttggaaagaaaaagcgacctatcgaggatctggtcctggagctaatcttcgggtatcggggacgagactgtcgcaacaacgtccactacctgaatgatggcgacgacattatctatcatacggcttcagtgggcatcctccacaatgtagcgactggctcacagtctttttaccaggagcataacgatgatatactgtgtctgacagtgaaccagcaccccaaatttattaacattgtggcaactggccaggtgggggactccgccgatatgagtgcaaccgccccatctatacacatttgggacgccatgaataaacaaaccttgtctattctgagatgctaccactcaaagggcgtttgcagcgtttccttctccgctactggcaaactgctgttaagtgtgggcctggatcctgaacatactattactatttggaggtggcaggaaggagccaagatcgcctcaagggctggccataatcaacgcatctttgtagcagagttccgccccgattctgacactcagtttgtgtccgtaggagtcaagcatgtgaagttctggacgctcgcaggccgggcgctcttgtccaaaaagggtttactgagcactcttgaggatgcgcgcatgcaaaccatgctagccatcgcttttggagctaacaacctcacatttacaggtaccattagcggcgatgtgtgtgtttggaaagatcacatcttgtgtcgaattgtcgcaagggcacacaacggtcctgtttttgctatgtacaccacactccgggacggcctcatagtgaccgggggaaaggaaagaccaagtaaggaaggaggtgctgtgaagctgtgggatcaggaacttagacgctgcagggctttcaggctggagacagggcaggctactgattgcgtgaggtccgtatgccgagggaaaggcaagatactcgttggcacgcggaacgccgaaattatcgaggtgggcgagaaaaacgctgcctgtaacatccttgtcaatggccatgtggatggaccaatttggggacttgcaacgcatccctcccgcgacttttttttatccgccgccgaggacggaaccgttcggctgtgggacattgccgataagaagatgctgaacaaggtgaatctcgggcatgcagctcggaccgtatgttactctcccgaaggagacatggtggccatcggcatgaaaaacggcgagtttataatacttctggtgtcaagtctgaagatctggggtaagaagagggataggaggtgtgccattcacgatatacggttctcccccgattcaagatacctagccgtgggctcatcagagaatagcgtcgatttttacgacctgacactgggcccaaccttgaaccgcatttcctattgtaaagatatcccttcctttgtaatacagatggactttagcgctgactcttcctatcttcaggtgagttctggctgttataagaggcacgtttacgaagtcccctccggcaaacatctcatggatcatgcagccatcgataggattacatgggccacttggaccagtattctgggcgacgaagtgttgggtatctggtctcgacacgccgagaaagcagatgtgaactgcgcttgcgtgagccattctgggattagcttagtgacaggagatgatttcggtatggtgaagctgtttgactttccgtgtcccgagaagtttgctaagcataagaggtttctcgggcattccccccacgtaactaacattagatttaccagcggggaccgccacgtcgtgagtgctgggggcgatgactgcagcctgtttgtgtggaaatgtgtgcatacccctcactag

SEQ ID NO: 258073 - DNA, 5933 bp, Artificial Sequence
  derived and/or modified sequence
atggcggcaagaagtgcacctagttgccacttaagactagaatgggtgtacggctaccgtggccaccagtgccgaaataatctatattacacagccgcaaaggagattgtctacttcgtggctggagtgggcgttgtgtattcccccagggagcatagacagaagttctaccgtggccactccgatgacatcatcagccttgccctccacccagaaagggtgctcgttgccactggccaggtgggaaaggagccctacatctgtatctgggattcttacaccgttcaaacaatctccgtgctgaaggatgtgcacacgcacggaatagcatgtttggccttcgacctggatgggcagaggctggtgtcagtagggctggattcaaaaaatgccgtgtgcgtttgggattggaaaagagggaaaatgctcagtatggccccaggtcacacggacagaatttttgacatatcttgggatctgtatcagcctaacaagttggtctcatgtggtgtgaagcacataaagttctggtcactgtgcggcaacgcactcacccccaagagaggcgtctttggtaagaccggcgatttacaaacgatactttgcttggcatgcgccagggatgagcttacttattccggggctctcaatggcgacatctatgtgtggaagggcatcaacctgatccggaccatccaaggggctcacgcggctgggatcttcagtatgaatgcatgcgaggaaggatttgctacaggagggcgagacggctgcataagattgtgggacctcacttttaagccaataactgtaatcgacctgcgggagacagatcagggatacaaggggctgtctgtccgcagcgtgtgttggagaggtgatcacatccttgtggggacgcaggacagcgaaatatttgagattgtcgtacaggaacgcaacaagcctttcctgataatgcaggggcactgtgagggtgaattatgggccttagcagttcaccctacaaaacctctggctgttaccggttcagatgataggtccgttcgcatttggagcctcgtggaccatgcgctaatcgcacgatgcaacatggaagagcccataagatgtgcagccgtgaatgccgatgggattcacttagccttgggcatgaaagacggttccttcacagtgctcagagttagggatatgacagaggtcgtgcatataaaagacagaaaagaggctatccatgaactcaaatactcccccgacgggacctatctggccgtgggatgcaacgactcctcagtggatatctacggagtggcgcagaggtacaaaaaggtgggcgaatgcctgggatccctgtcttttattacgcacttggactggtcctcggactcacggtacttacaaaccaacgacggaaatggtaagcgcttgttttatcggatgccgggtggaaaggaggtgactagtaccgaggaaatcaaaggcgtacattgggcatcctggacctgcgtcagcgggctggaggtgaatgggatctggccgaaatactcggatattaacgacattaacagcgtagatggcaactatatcggacaagtgcttgtgaccgcagacgattatgggattataaagttgtttcgctacccttgtctccggaaaggagctaaattccggaagtatattggacactcagcccatgtcactaacgttagatggagccacgactatcagtgggttatctctatcgggggagccgatcattcagtattccaatggaagttcattcccgagcgcaagctgaaggacgccgtgcatatcgcccctcaggaatctctggctgacagccattcagacgagtcagactccgatctgagcgatgttcctgaattagactccgagatcgagcaggagactcagctgacatacagacggcaagtatacaaagaagatctgccccagttgaaggaacagtgtaaggaaaagcagaagtccgcgaccagcaaacggagagaacgagcccctggaaattctattcgcctgcattttgtccacggctatcggggttatgactgcagatccaacttgttctacacccagataggcgagatcgtctatcacgttgctgctgtgggcgtaatctataacagacagcagaatacacagagattctatttaggtcatgacgacgacattctctgtttgacaatccacccattaaaggattatgtcgctactggacaggtaggacgcgacccatccattcacatatgggatacagagaccatcaagccactgagcatcctgaagggtcaccaccaatacggagtgtcagccgttgactttagcgcagacggaaagcggcttgcctccgtggggatcgatgatagtcatacggtagtgctttgggattggaaaaagggcgagaaactgtcaatcgctcgcggtagcaaagacaaaatctttgtcgttaagatgaatccatacgtgccagataaactcatcacagcagggataaagcacatgaaattctggaggaaagcaggaggcggactaattgggagaaagggatatatcggcacactggggaaaaacgatacaatgatgtgcgctgtgtatgggtggaccgaagaaatggctttcagcggcacatccacaggggacgtctgtatctggcgagatatatttctggtgaagacagtcaaggcacatgacggacctgttttctcaatgcacgccctggaaaaaggctttgttactgggggaaaagacggaatcgtggcgttgtgggacgacagtttcgagcggtgcctcaagacctacgccatcaagcgtgcggcattggctcccggaagtaagggattactgctcgaagataatccctctatccgggctataagcctgggccacgggcatattctggtgggtactaagaatggggagatcttggaggtcgacaaatccggcccaataactctactggtccagggacacatggaaggcgaggtgtggggtctagcaacacatccttatctacctatttgcgctactgtgtcagacgacaaaacgctgcggatctgggatctcagtcctagtcattgcatgctggccgtgcggaaactcaagaaagggggacgatgctgttgtttcagccccgatggaaaggctcttgcagtcggactgaatgatgggtcattcttgatggctaatgctgacaccctcgaggacctggtttcttttcaccaccgcaaggacatgatttccgacattcgcttctcgccaggcagtgggaagtatcttgccgttgccagtcatgactctttcattgacatctataatgttatgtcaagcaaacgggtgggtatttgtaagggcgcaacctcttatatcacccatatcgactgggatatccgcggtaagttgctgcaggtgaacactggcgcaaaggaacaactctttttcgaagctcctagaggcaagaaacaaacaattccatctgtcgaagtggagaagattgcctgggcgtcatggacgtctgtgctgggcctgtgttgcgagggcatctggcccgtgatcggcgaagtaaccgacgtgactgctagctgcctgacatctgataagatggtgctggcaaccggggacgatctaggctttgtaaagctgtttaggtaccccaccaaaggcaagtttgggaagttcaaacgctacgtggctcactctacacacgtgacaaacgtaaggtggacttacgatgattcgatgctggtaacgctggggggaacagatatgtccctgatggtatggactaacgaaatggaaggctacagagagaagagaccgtgtgattccgaagagtccgacattgacagtgaggaagatggaggttacgattccgatgttactcgggagaatgagatttcatatactatccgggctttgagcaccaacattcggcctatgctgggcataaagcctcatttacaacagaaggaaccaagcattgatgaacggcaaggtgtcgtgaggggaagcaggcccccagtttcccgggctccccctcagcctgagaagctgcagaccaacaatgtgggaaaaaaaaaacggccaatagaagatcttgtgctggaactcattttcggctatagggggcgagactgccgcaacaatgtgcactacctgaacgatggcgacgacattatctatcatactgccagcgtgggaatcctccacaacgttgccacaggtagtcaaagtttctaccaggaacataatgacgacatcctgtgcctgaccgtgaatcagcaccccaaatttattaacatcgtggcgactggccaagttggtgactcagctgacatgagtgccacagccccaagcattcacatttgggatgccatgaataaacagacccttagcattctacggtgttatcattccaaaggcgtgtgcagcgtttctttctcagccacgggtaaactgttgctctccgtgggcctcgatcctgaacacactattacaatctggcgctggcaggagggagcgaagatcgctagcagagctggtcacaaccagcgcatcttcgtggctgagttcaggcccgactccgatactcaatttgtttcggtgggcgtcaaacatgtgaagttttggaccttggccggaagagccctcctaagtaagaagggcttactctccaccctagaggacgccagaatgcaaacgatgctggccatcgctttcggagccaataacttaacattcactggcactatctctggggatgtgtgtgtgtggaaagaccatattctgtgtaggatcgtggcgagagcacataacgggcctgtgttcgccatgtacactaccctcagagatggtttaatcgtaaccggcggaaaggaaaggccaagcaaggagggaggggctgtgaagctgtgggaccaagaactacgcaggtgtcgcgctttccgtttggaaacagggcaagcgaccgactgcgtacgctcagtatgtaggggcaagggtaaaatcttggtgggtacccggaatgccgaaatcatcgaagtgggtgagaaaaatgccgcatgtaatatcctggtcaatggccacgtagacgggccaatctgggggctagcgactcatccctctagggatttttttctgagcgctgcagaggatggcactgtccgcctctgggatattgcagataaaaaaatgttgaataaggtcaatctggggcacgccgctcggacagtctgctactcgcccgagggcgatatggttgccatcggcatgaagaatggtgagtttataattctgttggtgtcatccttgaagatctggggcaagaagagggataggagatgcgcgattcacgacattcgtttttcccctgacagtcgctaccttgccgtgggttcttctgagaattcagtcgatttctatgacctgactctaggtcccacactaaacagaattagttattgcaaggatataccttcgttcgtgatccaaatggacttcagcgccgattcgtcttacctgcaagtatccagcgggtgctacaaacggcacgtatacgaagtaccatctgggaaacatctgatggatcacgcagccatcgatagaatcacctgggcaacctggactagtattctcggcgatgaggtgctgggcatctggtctaggcatgcagaaaaggccgacgtcaactgcgcctgtgtgagccactctgggatttcccttgtcactggcgatgacttcggcatggttaaactgtttgacttcccctgccctgagaagttcgccaagcacaagcgcttcctggggcattctcctcatgtaacgaacatcaggtttacgagcggcgataggcacgttgtctcagccggaggtgatgactgcagcctctttgtgtggaagtgcgtccatacccctcatta

SEQ ID NO: 258074 - DNA, 9570 bp, Artificial Sequence
  derived and/or modified sequence
ctgggcatccacttgacagccggcggcgctcgcggccctcagcatgttccgcgaggcgagggttttcctcccgcctgtgggctgaggcggcggcggcccccgaaacgagatgcacctgacgggcgcggcttagaggacgcggctggcgggaagtcccggcagccagcgggagggctttcgttgccgggccgccgccgcctcccgtcgccgccgcgggcccgagcgggagcggcgggtgggcgccccgacatggcggcccggagcgccccgagctgccacctgcggctcgagtgggtgtacggctaccggggccaccagtgccgcaacaacctctactacactgcggccaaggagatcgtatacttcgtggcgggggtcggcgtggtgtacagcccgcgggagcacaggcagaagttctaccggggccacagcgacgacatcatcagccttgcattgcatcctgaacgagtgttggtagcaacaggacaagttgggaaagagccttatatttgtatttgggattcatacactgtgcagaccatatcagttttaaaggatgttcatacacatggtatagcttgcttggcgtttgacttagatggacagcgcttggtttcagttggacttgattcaaagaatgcagtttgtgtttgggactggaaaaggggaaaaatgttgtctatggctcctggtcatacagatagaatatttgatatttcttgggatttgtaccagccaaataaacttgtcagctgtggtgtaaaacatatcaagttctggagtttatgtggaaatgctctgaccccaaaacgaggtgtctttggtaagacgggtgaccttcagacaatactgtgcctagcctgtgcaagggatgaattaacatattctggtgcactcaatggggatatatatgtttggaaaggaatcaatcttatacgaacaatacaaggagcccatgctgcaggaatttttagcatgaatgcttgtgaagaaggctttgctactggtggcagagatggttgtattcgtctttgggatttaacttttaaaccaattactgtgattgatctcagggaaacagaccagggatacaaaggtttgtctgtaaggagtgtgtgttggcgaggtgaccacattctagttggaacacaggacagtgaaatttttgaaattgtggtgcaagaaagaaataaaccttttctaattatgcaagggcattgtgaaggtgaactttgggcacttgctgtccatcctactaaacctttggctgtgactggaagtgatgatcgttcggtcaggatatggagcctagtagatcatgcattaatagcaaggtgtaatatggaagaaccaattcgttgtgcagctgtcaatgcagatggaatccatcttgcccttggaatgaaggatggctcattcactgtacttagagtaagagatatgacggaagttgtacatattaaagataggaaggaggcaattcatgagttaaaatattcaccagatggaacttaccttgctgttggatgcaatgacagctcggttgatatttatggagttgctcagcgttataaaaaagttggcgagtgtttgggatcccttagtttcatcactcatctggactggtcttcagacagtagatatttgcagacaaatgatggaaatgggaaaagacttttttatagaatgccaggaggaaaggaagtgacaagtacagaagaaataaaaggtgttcattgggcttcatggacatgtgtttcaggccttgaagtaaatggaatttggcccaagtattcagatatcaacgatataaattcagtagatggaaattatattggccaagttttagttacagctgatgactatggaattataaaattattccgatatccatgtttaagaaaaggggccaagtttagaaaatatattggccattcagctcacgtaactaatgtcagatggtcacatgattatcagtgggttatttctattggtggagcagatcactctgtctttcagtggaaatttattcctgaaagaaaactgaaagatgctgttcacatagcaccccaagaaagtctggctgactctcatagtgatgaatcagattcagatctgtctgatgttccagaactggattctgaaattgaacaagagacacagctcacctaccgtcgacaggtttacaaagaagatctacctcagcttaaagaacagtgcaaagagaaacaaaaaagtgctacttctaaaagaagagagcgggctccaggaaatagtattcgattacactttgttcacggttacagaggttatgactgtcgaagtaatctgttttatactcaaattggtgaaattgtgtaccatgtggcagcagtgggtgtcatttataatcgacagcaaaacacacagcgtttttatctgggtcatgatgatgatattctctgcctaactattcatcctttgaaagactacgtggcaacaggccaggttggtagagatccctcaattcatatatgggatacagagaccattaaaccattgtccatattaaagggccaccaccagtatggtgttagtgccgttgatttctcagcggatgggaaacgtttggcatcagttggcatagatgatagccatactgttgtgctctgggactggaagaaaggagagaaactttcaatagcaagaggaagtaaagataagatttttgttgtaaagatgaacccctatgtgcctgataaactaattacagctggaattaaacacatgaaattttggcgtaaagcagggggaggattgattggaagaaaaggctacataggcacactggggaaaaatgacacaatgatgtgtgcagtgtatggatggactgaagagatggctttttctggaacatccacaggagatgtgtgtatctggagagacatctttcttgtaaaaacagtgaaagcgcatgatgggccagtgttcagtatgcatgcattggaaaaagggtttgtaactggaggaaaagatggtatagtagctctttgggatgactcttttgaaagatgtctcaagacctatgctataaaaagagctgcattggccccaggatctaaaggtcttctcttggaagataatccatctatacgtgccatatcattaggacatggtcatattttagttggcacaaagaatggtgaaatactagaagtggataaaagtggcccaataacacttctggttcagggacacatggaaggagaggtgtggggtttagctacacacccttatctgcccatctgtgctactgtaagcgatgataaaaccttaagaatatgggatctctcacctagtcattgtatgttggctgtccggaagctgaaaaagggtgggaggtgttgctgtttttctcctgatggtaaagctttagccgtaggtctcaacgatggaagcttcttaatggcaaatgcggatactctagaggatcttgtgtcttttcatcacagaaaagatatgatttcagatattcgattttcacctggttctgggaaatatcttgctgtagcatcccatgacagctttatagatatatacaatgtaatgagtagtaaacgagtaggaatatgcaaaggagctaccagttacataacccatattgattgggatattagaggaaagcttttacaggtcaacactggtgctaaggaacaattattctttgaagctcccagagggaaaaaacaaaccatccccagcgtggaggtagaaaaaattgcttgggcatcatggacaagtgtacttggtttatgctgtgaaggaatttggccagtaattggagaagttacagatgtaactgcttcttgcctcaccagtgacaaaatggttctagctaccggggacgatttgggatttgtgaagttatttagatatcctactaaagggaaatttggaaagtttaagaggtatgtggcccatagtacacatgtcacaaatgttcgctggacttatgatgacagcatgttggttaccctaggcggtacagatatgtctttaatggtgtggacaaatgagatggaaggctatcgagaaaaaaggccttgtgatagtgaagaatccgacattgattctgaagaagatgggggctatgacagtgatgttacaagggagaatgaaatcagttacaccatcagagccttatcaacaaatattcgcccaatgttaggaatcaagcctcatttacaacaaaaagaaccctcaattgatgaaaggcagggagtagtaagaggttccaggcctccagtgagcagggccccaccacagccagagaaactccagacaaacaatgtaggcaagaaaaagagacctatagaggaccttgtgttggagctcatttttggttatcgaggcagagactgtaggaataatgttcactatttaaatgatggtgatgatataatttatcacactgcatctgttggaattctgcacaatgttgctacaggttctcagagtttttatcaggaacataatgatgatattctgtgcctcacagtaaaccagcaccccaaatttatcaacatagtggcaactggccaagtaggtgattcagcagacatgtcagctacagctccttctattcacatctgggatgcaatgaacaagcagactttatctatcctaagatgctaccattcaaagggagtatgttcagtcagcttcagtgctactggcaaactattgctgtctgtgggactagacccagaacatactattaccatttggagatggcaggaaggtgccaaaattgccagcagagctggtcacaatcaacgtatttttgtggcagaattccgaccagattcagatacccagtttgtctcagtgggagtaaaacatgtgaagttctggaccctggcaggaagagctcttcttagcaaaaaagggctactgagcacactggaagatgcccggatgcagaccatgctcgctattgcatttggtgcaaataacttgacgtttacaggtaccatcagtggtgatgtctgtgtgtggaaagatcacatattgtgtagaatcgtggcgagagctcacaacgggcctgtgtttgccatgtacaccaccctgcgagatggacttatcgtgactgggggaaaggaaaggccgtcaaaagaaggaggagcggttaaactgtgggatcaggaactgaggcggtgccgtgccttcaggcttgagacaggacaagccacagattgtgttcgttctgtgtgcagaggcaaaggcaagatccttgttgggacaaggaatgctgaaataatcgaagttggagagaaaaatgcagcttgtaatattttagttaacggtcatgtggatgggccaatctggggactagcaacacatccttccagggattttttcctttctgctgcagaagatgggacagtgagactttgggatattgctgataaaaagatgttaaacaaagtgaatttgggacatgctgctcgtactgtgtgttacagccctgaaggggacatggtggctattggaatgaaaaatggagaatttatcattttactagtgagttctctaaaaatatggggaaagaagagagacaggagatgtgcaatccatgatatcagatttagtccggattcccggtatctggcagtaggttctagtgagaactcagtggatttttatgacctaacgctgggccccactcttaacagaatcagctactgcaaagacattccaagctttgtcattcaaatggacttctctgcagatagcagttatctccaggtctctagtggctgctataaacggcatgtctatgaagtgccttcaggaaaacatcttatggatcatgccgctattgacagaattacttgggctacatggactagtattctaggagatgaggttttgggaatctggtccagacatgctgagaaagctgatgtcaactgtgcctgtgtatctcattcaggaatcagtcttgttacaggagatgactttggcatggttaagttatttgacttcccatgtccagaaaaatttgcaaaacacaaaaggttcttgggtcattcgccccatgtgacaaatattcgatttaccagtggtgatcgacatgttgttagtgctggaggtgatgactgcagcttatttgtctggaaatgtgtacatacacctcactgagagatgctgagatgactacagaaattaactttgagaccagaattacagagaagaaaaaccaaaacccaaccctgcatggtcaagtggtgctaacccaagactgtaacagggagaaatgcccagaatcatcaaaatagtgaaagactgatctgttcaaaatatttgctatatgcactgggtataatccgtaatccatacactgccagataatgccatttcaaggaaggatcgaatacttgatggtaaaggccaagtccccctgtattgggaagtgtgtgatttcggcagacctgctgggaaaatttagggtagagcactctttacagaagaactcaaaaacccaatttggataattttcattatctttttagcaaaatggtttcttaatgtttatattttattttcaaggttcattgtttaatgaaatattttattcttgcatttccataaggaaagggaaagtcatgatcatcctaaaggatcacagtttttaaaaggcaaacattttccctaaggaaacagacacaagctttcctagagaatatgatgttttttaggcattaataaggtccttttttataaaggacacttttctcctagtagttttgaattcaggaacagatccaaagttagcagtatatggctgctacatttccattttcattttcgagccatcagtttatgttcagatgccatctctgtaatcgcacatttaaaacataactgtagcctcactaatggaaaagtagtatgatgaacaatcattcccaatggtgtacaatgtaagggttttagggagcaacagtatttaactggaagaaagaattgcatatttaatgtagtctaatatatacacatttgtttaacatgtaaacaaaagtgttaaattcacatatacaacattatacaatttaatcactcttggaataaaatttttatagccttttttctattgggaaaatttgtttagatgtgtgccactccataggtttatttccaaaatgaatgagcccaactccatttgtaaaaacttgtcagttagaattcctttttttagtggattagggctgaattcttagatccttatttcttttcactttaaatgctgccaaagatcactactcatcattcaggaattcgctgtctagcctatctgtagtttcctgaagattgaaaattatgtagactgctatttaaaaatatatttttctaagtgtgaggtttaagatgctgtattgaccctatgagtttttaatgtgttaattatctttatagcataatagatcgctttaggttcctggaatcccatttggtctgacaggatatatgaagattcttaatacctattttctgtgtctaatacttggttaatactaaaaatagaaatgactaaattacatcacagaaagcataaccagtgattgaacctggtagttttaaagctctaaatagctgtggctgaaggactgattatggggctaagaagcttgaaacgtaagttggtacttgttcatcagtggattctcctaaattaagccaaattttgaaatacatgactattaagtttctactcatgtatttacagtcagtcaataaattaaaggaggaaaaaaatccctgaacaacctgcccataaaaagaaaaatactctacatttgagcctgctgcagttttaaattttccctctgggtcaagtttgccagcttttggctacagagaaattatatttccattacagtgcaggtagaaactctgtaaccttaagcatgtaaactacatagaataaaactgtttccactgcatttctgtccttcaaagtggccaacctgattaagtcagccttaatcactgctgctgtcagtttcacgactaaaggtcatattgactaagtagtcatcagctgaccacctcgctgtatcagccagcaacgaggggaaggtgaagaaacatgataggccatatagaatctgccctatgtttacttttttaacccagataattatttttgtgtgcagtatctaagctcctgattgtgtaacctgggacttctggcaccttttgttccattcattttatgtataaaatgcatgccaaagcacactgtgccctctggtacccttgcttccaatcgccaaccatgctcatttccttcctttttttgtggtccctttttgtggtgatcattttaaaccacgtcatccaacaaatgttttatggtcaaccttagcttgttcataagccatagcaactgaaagattaaactcttaaatatgtgtctgggcagtggctattaaatagcaaaaaacaatcagattttagtattttattatttccttgtaaaatggctgaactaaattaaacccttgtttcccatttgttctataatttatagtgaaactgagaacaaaactatctttataaatgatagctaaaagtatttccagatatttaaacaatttaaaataaatttcttctgcagagatgcaaagcatctcaacactggaatgaacaaatgccttaaattcaatggagtaaacctttagaatgaagaggaactgtcatttcacccaagccgaagacaacagccttatgcacttgtgtgctctgtctttgctgcttctcgtgtttcaagcctttcctgtgggatcagcacagcaaagtgcaacttaccaaatggtttaatgactggttaattctttcttctcccaatggaaaagcaatggcaacacaacagtagactgctggcttgacaatcttaaacgtgagcctttgcacatgtaggtttatcatcatttgagtatacgactaagcaagtcaatgaactttttttttttttttagcagtttaatttggtcctgagaatgttgcagtctttattaccccttttgcattaatccacttttctaaccaccttttaagctttaatttttaacactatacaccaagtctttgaaatcagtgatctgttatttaactctaaagcatttgacacttcttgccttaacagttttaaaaaccacacacaaaaaaactctgtaagtaatacagtaggccaaaagtttcatcctatctatcttgcagtttacctatctgatctgatctctgtaattatagttctgtcatttaaaatatactatttaaatctaatttttacatttcaaaaattatcttcagtagtaactaagtatattttctgtggattctgagaatgttatttttcagaatgtgagaatatatatgtacatttataatcttgtgactttaaagtctgttttcagatacagtatgtaaatacttgtaaaaaaatttgtataattttgtgataatgtagtttcccaaaaaaattatttagaaggcattatgttattagtaaatgagagcactgta

SEQ ID NO: 258075 - protein, 1274 aa, Artificial Sequence
  derived and/or modified sequence
MLDPSSSEEESDEIVEEESGKEVLGSAPSGARLSPSRTSEGSAGSAGLGGGGAGAGAGVGAGGGGGSGASSGGGAGGLQPSSRAGGGRPSSPSPSVVSEKEKEELERLQKEEEERKKRLQLYVFVMRCIAYPFNAKQPTDMARRQQKISKQQLQTVKDRFQAFLNGETQIMADEAFMNAVQSYYEVFLKSDRVARMVQSGGCSANDSREVFKKHIEKRVRSLPEIDGLSKETVLSSWMAKFDAIYRGEEDPRKQQARMTASAASELILSKEQLYEMFQNILGIKKFEHQLLYNACQLDNPDEQAAQIRRELDGRLQMADQIARERKFPKFVSKEMENMYIEELKSSVNLLMANLESMPVSKGGEFKLQKLKRSHNASIIDMGEESENQLSKSDVVLSFSLEVVIMEVQGLKSLAPNRIVYCTMEVEGGEKLQTDQAEASKPTWGTQGDFSTTHALPAVKVKLFTESTGVLALEDKELGRVILHPTPNSPKQSEWHKMTVSKNCPDQDLKIKLAVRMDKPQNMKHSGYLWAIGKNVWKRWKKRFFVLVQVSQYTFAMCSYREKKAEPQELLQLDGYTVDYTDPQPGLEGGRAFFNAVKEGDTVIFASDDEQDRILWVQAMYRATGQSHKPVPPTQVQKLNAKGGNVPQLDAPISQFYADRAQKHGMDEFISSNPCNFDHASLFEMGWFSPGQVFVLDEYCARNGVRGCHRHLCYLRDLLERAENGAMIDPTLLHYSFAFCASHVHGNRPDGIGTVTVEEKERFEEIKERLRVLLENQITHFRYCFPFGRPEGALKATLSLLERVLMKDIVTPVPQEEVKTVIRKCLEQAALVNYSRLSEYAKIEENVGRLITPAKKLEDTIRLAELVIEVLQQNEEHHAEAFAWWSDLMVEHAETFLSLFAVDMDAALEVQPPDTWDSFPLFQLLNDFLRTDYNLCNGKFHKHLQDLFAPLVVRYVDLMESSIAQSIHRGFERESWEPVNNGSGTSEDLFWKLDALQTFIRDLHWPEEEFGKHLEQRLKLMASDMIESCVKRTRIAFEVKLQKTSRSTDFRVPQSICTMFNVMVDAKAQSTKLCSMEMGQEHQYHSKIDELIEETVKEMITLLVAKFVTILEGVLAKLSRYDEGTLFSSFLSFTVKAASKYVDVPKPGMDVADAYVTFVRHSQDVLRDKVNEEMYIERLFDQWYNSSMNVICTWLTDRMDLQLHIYQLKTLIRMVKKTYRDFRLQGVLDSTLNSKTYETIRNRLTVEEATASVSEGGGLQGISMKDSDEEDEEDD

SEQ ID NO: 258076 - DNA, 3825 bp, Artificial Sequence
  derived and/or modified sequence
atgctagacccgagttcatctgaggaagagtcggacgagattgttgaagaggagtcaggcaaggaggtactgggatcagcacccagcggtgccaggctaagtccttcgagaacaagtgagggcagtgctggctccgctggtttgggcggcggaggcgccggagctggagccggggtgggtgccggtgggggcggagggtcgggagcatctagcggaggaggagccggcggcctacaaccaagttccagggccggtggaggacgtcctagtagtcccagtccttctgtcgtctcagaaaaagagaaagaagagctggaacgtctccaaaaggaggaagaggagaggaagaagaggctgcagttgtacgtgttcgtgatgcgctgtatcgcctaccccttcaacgctaagcaacccacagatatggcccggcgacagcaaaagatcagcaaacagcaactccagactgtaaaagataggttccaggctttcctcaatggtgagactcagatcatggctgacgaggctttcatgaacgccgtgcagagctattacgaagtcttcctgaaatcggatcgggttgcaaggatggtgcagtccggcggatgctcagcaaacgactctcgtgaagtgttcaaaaaacacatcgaaaagcgagtacggagcctgccagaaatagacggccttagtaaggaaaccgttctctcatcttggatggctaaattcgatgctatatatcggggcgaagaggatcctagaaagcagcaagcccgcatgactgcttcagccgcatccgaactgatcctgtcaaaggaacaactatacgagatgttccaaaacattctggggattaagaagtttgaacatcaactcttgtataatgcgtgtcagctggacaaccctgacgagcaggccgcccagattagacgggagcttgacggacgtctgcagatggccgatcaaatcgctcgggaaagaaagtttccaaagttcgtcagtaaggaaatggaaaatatgtatattgaggaacttaagtccagcgtcaaccttctgatggccaatcttgagagtatgcctgtctccaagggcggggagttcaagctccagaaattgaagcggagccacaatgcttcaattattgacatgggcgaggaatctgaaaatcaattatccaaaagcgacgtggtcctttcattctcgctcgaagtcgtaataatggaagttcagggcctgaagagtctcgcaccaaaccgcatagtgtattgcacaatggaagttgagggtggcgagaagttgcagacagaccaggctgaagcaagcaagcctacctgggggacgcaaggggacttttctaccacgcatgcactgcctgcggtgaaggttaaacttttcacagagagcacgggcgttctggcactggaggataaagaacttgggcgggttatcctgcatccgaccccaaatagccccaagcagtccgagtggcacaaaatgacagtgtccaagaattgccctgaccaggaccttaaaatcaaactggcggtccggatggacaaaccccagaacatgaagcattccggttacctctgggccattggtaagaacgtatggaagcgctggaaaaagagatttttcgtgttagttcaggtaagccagtatacttttgctatgtgtagttacagagaaaaaaaagccgaaccccaagagcttctgcagctcgacggatataccgtggactacaccgatccacagccaggcctagaaggggggcgcgctttttttaacgccgtcaaagaaggggacaccgtcatatttgcatctgatgacgaacaggataggatcctgtgggtgcaggccatgtatcgggcgacaggccagagccacaaaccagttcctccaacccaggtgcagaagctgaacgccaaaggggggaacgtgcctcagctagacgctcccatttcccaattttacgcggacagggcccagaaacacggcatggacgaattcatctcaagtaatccctgcaattttgatcacgcatctcttttcgaaatgggatggttctctcccggccaggtgtttgtgttagacgaatattgtgcaaggaatggcgtgcgcggatgccatagacacttgtgttatctgcgtgaccttttggagagagcggaaaacggagctatgatagatccgaccctcttgcattattcatttgccttttgtgcaagccacgtacacggaaaccgccctgacggcattggaaccgttacagtagaggagaaagaacgctttgaagaaattaaggagaggctgcgggtgcttctggagaatcagatcactcacttcaggtactgtttccctttcggccggcctgaaggggctttgaaggcaactttgagcctgctggaaagagttctaatgaaggacatcgtgacacctgttccacaagaagaggtcaagaccgtgatccgcaagtgtctagaacaagctgcattggtgaactactcccggctgtccgagtatgctaagatcgaggagaacgtgggtcgcctgataacccctgctaaaaaacttgaggacaccatcagattagccgaactggtaattgaggtgctacagcagaacgaagagcatcatgccgaggcctttgcttggtggtcagacctgatggtcgagcatgccgaaacctttctatcactgttcgccgtggatatggacgctgccctggaggttcagcccccagatacctgggactcttttcccctattccagctgctgaacgacttcttgcgaaccgattataacctgtgcaatggtaagtttcataaacatctgcaggatctcttcgcaccactggtggtgaggtatgtagatctgatggagagcagcatcgctcagtctatccaccgagggttcgaacgggaatcgtgggaacccgtaaacaacggtagtggaacatccgaagacctattctggaaattggatgcactgcaaacttttatccgtgatctgcactggcctgaggaggaattcggtaaacatctggagcagcgcctcaagctcatggcaagcgacatgatcgagtcatgtgtcaagcgaactcggattgcgttcgaggttaagctgcagaaaactagtcggtcgactgattttagggtgccacagtctatctgtactatgttcaacgtcatggtggacgcaaaggcacagagtactaaactgtgcagcatggaaatgggtcaggaacaccagtaccacagcaagattgacgaactgatcgaagagaccgttaaagagatgatcacactattggtggctaagtttgtgacgatactggagggcgtcttagccaagctgagccgctacgatgagggcacactgttcagctctttccttagctttacagtgaaagctgcatccaagtatgtggatgtgcccaaacctggtatggacgtggctgatgcatacgttacctttgtgaggcattcacaagatgttctccgtgacaaagtgaacgaagagatgtatattgagagactgttcgaccagtggtataacagcagcatgaatgtgatctgtacgtggttgaccgataggatggatctgcaactgcacatttaccagttgaagacactgatccgaatggtcaagaagacctatcgtgattttcggttacaaggcgttctcgatagcaccttaaacagtaaaacatacgagactattaggaatcgactaaccgtcgaagaagccactgcgtccgtcagcgagggcggcggactgcagggaatcagcatgaaggacagcgacgaagaggatgaagaagatgactag

SEQ ID NO: 258077 - DNA, 3825 bp, Artificial Sequence
  derived and/or modified sequence
atgctggaccccagcagcagcgaggaggagagtgatgagatcgtggaggaggagagcggcaaggaggtgctgggcagcgcccccagcggggcccggctgagccccagcaggaccagcgagggcagcgctggcagcgctggcctgggcggcggcggggccggggccggggccggcgtgggcgccggcggcggcggcggcagcggggccagcagcggcggcggggccggcggcctgcagcccagcagccgggccggcggcggccggcccagcagccccagccccagcgtggtgtctgagaaggagaaggaggagctggagcggctgcagaaggaggaggaggagaggaagaagaggctgcagctgtatgtgtttgtgatgcgctgcatcgcctaccccttcaatgccaagcagcccacagacatggcccggcggcagcagaagatcagcaagcagcagctgcagacagtgaaggaccgcttccaggccttcctgaatggagagacccagatcatggctgatgaggccttcatgaatgctgtgcagagctactatgaggtgttcctgaagagtgacagagtggccaggatggtgcagagcggcggctgcagcgccaatgacagccgggaggtgttcaagaagcacatcgagaagagggtgcgcagcctgcctgagattgatggcctgagcaaggagaccgtgctgagctcctggatggccaagtttgatgccatctacagaggagaggaggaccccaggaagcagcaggccaggatgacagccagcgctgccagcgagctgatcctgagcaaggagcagctgtatgagatgttccagaacatcctgggcatcaagaagtttgagcaccagctgctgtacaatgcctgccagctggacaacccagatgagcaggccgcccagatccggcgggagctggatggccgcctgcagatggctgaccagatcgcccgggagaggaagttccccaagtttgtgtccaaggagatggagaacatgtacatcgaggagctgaagagctctgtgaacctgctgatggccaacctggagagcatgcctgtgtccaaaggaggagagttcaagctgcagaagctgaagaggagccacaatgccagcatcatcgacatgggagaggagagcgagaaccagctgagcaagagtgatgtggtgctgtccttcagcctggaggtggtgatcatggaggtgcagggcctgaagagcctggcccccaaccgcatcgtgtactgcaccatggaggtggagggcggggagaagctgcagacagaccaggccgaggccagcaagcccacctggggcacccagggcgacttcagcaccacccacgccctgcctgctgtgaaggtgaagctgttcacagagagcactggagtgctggccctggaggacaaggagctgggccgggtcatcctgcaccccacccccaacagccccaagcagagcgagtggcacaagatgacagtgtccaagaactgcccagaccaggacctgaagatcaagctggccgtgaggatggacaagccccagaacatgaagcacagcggctacctgtgggccatcggcaagaatgtgtggaagcgctggaagaagcgcttctttgtgctggtgcaggtgtcccagtacacctttgccatgtgcagctaccgggagaagaaggccgagccccaggagctgctgcagctggatggctacacagtggactacacagacccccagcccggcctggagggcggccgggccttcttcaatgctgtgaaggagggggacaccgtcatctttgccagtgatgatgagcaggaccgcatcctgtgggtgcaggccatgtaccgggccaccggccagagccacaagcctgtgccccccacccaggtgcagaagctgaatgccaagggcggcaatgtgccccagctggatgcccccatcagccagttctatgctgaccgggcccagaagcacggcatggatgagttcatcagcagcaacccctgcaactttgaccacgccagcctgtttgagatgggctggttcagccctggccaggtgtttgtgctggatgagtactgtgccagaaatggagtgcggggctgccaccgccacctgtgctacctgcgggacctgctggagcgggcagaaaatggagccatgattgaccccaccctgctgcactacagctttgccttctgtgccagccacgtgcacggcaacagaccagatggcattggaacagtgacagtggaggagaaggagagatttgaggagatcaaggagcggctgcgggtgctgctggagaaccagatcacccacttccgctactgcttccccttcggccggcctgagggcgccctgaaggccaccctgagcctgctggagcgggtgctgatgaaggacatcgtgacccctgtgccccaggaggaggtgaagacagtcatcaggaagtgcctggagcaggccgccctggtgaactacagccggctgtctgaatatgccaagattgaggagaatgtgggccgcctcatcaccccagccaagaagctggaggacaccatccggctggccgagctggtgattgaggtgctgcagcagaatgaggagcaccacgccgaggcctttgcctggtggagcgacctgatggtggagcacgccgagaccttcctgagcctgtttgctgtggacatggatgctgccctggaggtgcagcccccagacacctgggacagcttccccctcttccagctgctgaatgacttcctgaggacagactacaacctgtgcaatggcaagttccacaagcacctgcaggacctgtttgcccccctggtggtgcgctacgtggacctgatggagagcagcatcgcccagagcatccaccggggctttgagcgggagagctgggagcctgtgaacaacggcagcggcaccagcgaggacctcttctggaagctggatgccctgcagaccttcatccgggacctgcactggccagaggaggagtttgggaagcacctggagcagaggctgaagctgatggccagtgacatgattgagagctgtgtgaagaggacccgcatcgcctttgaggtgaagctgcagaagaccagccgcagcacagacttccgggtgccccagagcatctgcaccatgttcaacgtgatggtggatgccaaggcccagagcaccaagctgtgcagcatggagatgggccaggagcaccagtaccacagcaagattgatgagctgattgaggagaccgtgaaggagatgatcaccctgctggtggccaagtttgtgaccatcctggagggcgtgctggccaagctgagccgctatgatgagggcaccctcttcagcagcttcctgtccttcaccgtgaaggccgccagcaaatatgtggatgtgcccaagccaggcatggatgtggctgatgcctacgtgacctttgtgcgccacagccaggatgtgctgcgggacaaggtgaatgaggagatgtacatcgagcggctgtttgaccagtggtacaacagctccatgaatgtcatctgcacctggctgacagacaggatggacctgcagctgcacatctaccagctgaagaccctcatccgcatggtgaagaagacctacagagacttccggctgcagggcgtgctggacagcaccctgaacagcaagacctatgagaccatccggaaccggctgactgtggaggaggccacagcctctgtgtctgagggcggcggcctgcagggcatctccatgaaggacagtgatgaagaagatgaggaggatgactag

SEQ ID NO: 258078 - DNA, 3825 bp, Artificial Sequence
  derived and/or modified sequence
atgctggaccccagcagcagcgaggaggagagcgacgagatcgtggaagaagaatcaggcaaggaggtcttaggcagcgctccttccggagccagattgagtccctcacggactagcgaagggagcgcaggctctgccggcctcggcggagggggcgccggggctggagcgggcgtaggcgctggcggcggaggcggatcaggcgcctcatctggcggcggagctggcggacttcagccctcaagccgggccggcgggggaaggccttcatcgccaagcccctcagtggtcagcgagaaagagaaggaggaactagagcggctgcagaaggaagaggaggagcgcaagaagagactccagctgtacgtgttcgttatgcggtgtatagcttatccatttaacgcaaagcagccaacggatatggcacgaaggcagcagaagattagcaaacagcagctgcagaccgttaaggatcgcttccaggctttcctgaatggagagacacaaataatggcggatgaggcctttatgaacgccgtccaatcatactacgaggtctttctgaaatccgacagggttgctcgaatggtccagtcaggcggctgttcagccaacgacagccgagaggtcttcaagaaacacattgagaagcgtgtcaggtccctgcctgagattgatgggcttagcaaggagacagtcctgagctcatggatggcaaaatttgacgccatctataggggggaagaggatcctcggaagcagcaagcccggatgaccgcttctgccgcatctgagctcatactgtcaaaggaacagctgtacgaaatgtttcagaatatcctgggaatcaaaaagttcgagcatcagctgctttataatgcctgccaactggacaatccagatgaacaggcagctcaaattcggagggagctcgatggaaggctgcagatggcagaccagattgcacgggagcgaaagtttccgaagtttgtaagcaaagaaatggagaacatgtacatcgaggaactcaagtcctctgtgaatctcctgatggccaacttggagtccatgccggtgtcaaaagggggcgaatttaaattacaaaaactgaaaagatcccataacgcaagtataatcgacatgggcgaggagtccgagaatcagctgtccaaatcagacgtggtgctctctttcagcctggaggtggttatcatggaagtccaggggttaaagagtctggcccccaatcgaattgtttactgcactatggaagtcgaaggaggtgaaaaattgcagacagatcaggctgaggcttcgaagccaacctgggggacacagggcgatttctccactactcatgcactcccagccgttaaggtgaagctctttactgaatccactggcgtgctcgctctcgaggataaggagctaggcagggtgatcttgcaccccacccccaattcacccaagcagtctgaatggcacaagatgacggtgtcaaaaaattgccctgatcaggacttgaaaattaagctggctgtccgtatggataaacctcagaacatgaaacattccgggtacctttgggcgatcggaaaaaatgtctggaaacggtggaagaagcgcttttttgtgcttgtgcaggtgtcacagtacacattcgctatgtgctcttatagggagaaaaaggccgaacctcaagaacttctgcagttggacggatatactgtggactacactgacccgcaaccagggttagagggcgggagggctttttttaacgcggttaaagagggtgacacagtgatttttgcaagcgacgacgagcaggaccgcattctgtgggttcaggctatgtatcgagcaacaggacagtctcacaaaccagtgcccccaacgcaggtgcagaagctaaacgcaaaggggggaaacgtgcctcagctcgacgcccccatcagccaattctatgcagatagagcacagaagcatggtatggacgaattcattagcagcaatccctgcaattttgaccacgcctcattatttgagatgggatggttcagccctgggcaggtgttcgttctcgacgagtactgcgctcgaaacggggtaagaggatgccaccgtcatctgtgttaccttcgggacctgttagagcgtgcggaaaatggcgcgatgatcgacccaacactgctccattacagcttcgccttttgcgcgtcacacgttcatggaaaccgccctgacgggattggaaccgttaccgtcgaggaaaaagaaagattcgaggaaataaaggaacggctgcgcgtgttgctggagaaccagataactcactttcgttactgttttccctttggccgaccggagggagccctgaaagcaaccctgagcctcctcgaaagagtgctcatgaaagatatcgttacccctgtcccgcaggaggaggtgaagaccgttattcggaaatgcctggagcaggctgcgctcgtcaactatagtaggcttagcgaatacgccaaaatcgaggagaacgtgggacggctaatcaccccggcaaaaaaactggaggacactattaggctggctgagctcgttatcgaagtattgcagcagaatgaggaacatcatgcagaagcgtttgcatggtggagtgacttgatggtcgagcatgccgagacatttctcagtctgtttgctgttgacatggacgcagcattggaggtgcagcccccagacacctgggatagtttcccattgttccaactgctaaatgattttttgagaactgattacaatttgtgcaatggaaagtttcataaacacctacaggatctatttgctccactcgtggtccgatatgttgacctcatggaaagctccatcgcccagagtatccacaggggatttgagcgggagagctgggagcccgttaataatggcagcggcaccagcgaggacctcttctggaaattagacgcactgcagacctttatccgcgatctgcactggcccgaagaggagtttggcaagcatctggagcagcgactgaaacttatggcttccgatatgatcgaatcttgtgttaaacggactcgaattgcatttgaggtgaaactccagaaaacttcacgttcaacagattttagggtacctcagtctatctgtacaatgttcaatgtcatggtcgatgctaaagcacaaagtacaaaactgtgttcaatggaaatgggtcaggagcaccaatatcacagcaaaatcgacgaattgattgaagagaccgttaaggagatgattacccttttggtggccaagttcgtaaccattttagaaggggttctcgctaagctgtcacgatacgatgagggcacactcttttctagctttctgtccttcactgtgaaagcagcaagcaagtacgtggatgttcctaagccagggatggatgtggccgacgcctatgtcacctttgtccgccatagccaggacgtcctcagagacaaggtcaatgaagagatgtacatagagcgactgtttgatcagtggtacaattcatccatgaatgtgatctgcacctggctgaccgacagaatggacttgcagctgcacatctaccagttaaagacactgattcgcatggtcaaaaagacttatagagatttcaggcttcaaggagtgcttgactcaactcttaattccaagacatacgaaactatccggaataggctcacggtggaagaggcaaccgcctctgtgtctgaaggcggtggcttacaggggattagcatgaaggacagcgatgaagaagacgaagaggacgactag

SEQ ID NO: 258079 - DNA, 3825 bp, Artificial Sequence
  derived and/or modified sequence
atgctggatcccagtagctcggaggaggaaagcgacgagatcgttgaagaagagtccgggaaagaggtcctggggtccgccccttctggcgcacgactgagcccgagtcgtactagcgagggcagcgctggttctgccggattaggagggggtggcgcaggggcaggtgcgggtgtaggcgctggtggaggcggagggagtggtgccagttccggaggaggtgccggtgggctgcaaccaagctcccgggcaggcggtgggagaccctcaagccccagtccttcggtggtcagcgaaaaggaaaaagaggagcttgaacgactgcaaaaagaggaggaggaacggaaaaaaagattgcaactgtacgtgtttgtgatgagatgtattgcttaccccttcaacgcaaagcaacctaccgacatggcacgcagacagcagaaaatctcaaagcagcagctacaaactgtgaaggacaggtttcaggcttttctgaatggagaaacgcaaataatggccgatgaggccttcatgaatgccgtgcagtcctattacgaggtgtttctgaaatccgacagagttgcacgtatggttcaatcaggcggatgctctgccaacgactcccgcgaggtatttaaaaagcacattgaaaaacgggtgcggagccttcctgagattgacggtctgtctaaagagactgttctctcctcctggatggccaagttcgacgcgatctatcggggtgaagaggacccaagaaagcagcaggccaggatgactgcctctgcagcaagcgagctgatccttagcaaagagcagctctacgagatgtttcagaacattctgggcattaaaaagttcgagcaccagctgttatacaatgcctgtcaactggacaacccagatgagcaggccgctcagatcagaagggagctggacggacggctccagatggcggaccagatcgcgcgagagcgtaagtttcctaagttcgtttcaaaggagatggaaaatatgtacattgaggagctgaaatcttcagttaacctactgatggccaatctggagtcaatgcctgtaagcaagggcggagagtttaaactccagaaattgaagaggagccacaacgcgtcaattattgacatgggcgaagagtcagagaatcagctatccaagtcagatgtggttctcagtttctccctggaggtcgtcattatggaggtacaaggcctcaagtccctcgcccctaaccggatcgtttattgtaccatggaagttgagggcggagagaaactccagaccgaccaggccgaggcaagcaagcctacctgggggacacagggggattttagcaccacccacgcgcttcccgcagtgaaagtgaaactcttcacggagagcactggtgtgctcgccctggaggacaaggagctcggtcgagtaattttacatcccacccctaactcacctaagcagtctgagtggcacaagatgactgtgtccaaaaattgtccagaccaggacttgaaaataaagctcgcggtccgcatggacaagccacagaatatgaagcattctgggtacctatgggctattggaaaaaatgtgtggaagcgttggaagaagaggttttttgtgcttgtccaagtttcacagtacacctttgccatgtgctcttacagagagaagaaagccgagccccaggagctgttgcaacttgacgggtacaccgtcgattacactgacccacagcctggcttggagggagggagggcattcttcaatgccgtgaaagagggtgataccgtaatttttgcatccgatgacgagcaagacaggatcctgtgggttcaagctatgtaccgggctacgggtcagtcccataagcccgttcccccaacacaagtccagaagctgaatgccaaagggggtaacgtcccacagctagacgctccgatttctcagttctacgccgatcgggctcagaaacacgggatggatgaattcattagttcaaacccctgtaattttgaccatgctagtctgttcgagatgggctggttttccccaggtcaggttttcgtactggatgagtactgtgctaggaatggtgtgcgcggatgtcatcgccacttgtgttacctgcgggatctcctggaacgtgcagagaatggtgccatgatcgatcctacacttttgcattattcttttgccttctgtgcaagccacgtccacggtaatcggccagacggcatcggtacggttaccgtggaagagaaagaacgttttgaagagatcaaggaaaggttacgggtcttactcgaaaatcagattacacactttcgctactgtttcccctttggtagacctgagggcgcacttaaggccactttgtctttgcttgaaagagtgttgatgaaagacatcgtcactcccgtcccccaggaggaagtaaagacagtgattcgcaagtgcctggaacaagctgctctggtgaactattccaggttgagtgaatacgccaagatcgaggaaaacgtaggcagattgatcacacctgctaagaaattagaggacaccattagactggcagagttggtgattgaggttctccagcagaatgaagagcaccatgctgaagccttcgcctggtggtctgacctcatggtagagcatgccgaaactttcctgtcactgttcgctgtggatatggatgccgcactcgaagtacagccccctgacacttgggatagttttcctctctttcagcttcttaacgattttctacgcaccgactacaacctgtgcaatggcaagtttcacaagcatctacaggacctctttgcccctcttgtggtgcgttacgtagaccttatggaatcaagtattgcgcaatctattcacagaggattcgagcgggagtcatgggaacctgtcaataacggatccgggacctctgaggacctgttctggaaactcgacgccctgcagaccttcataagagatctacactggccggaggaggagttcgggaagcatctcgaacaaagattaaagctgatggcatccgatatgatagaaagctgcgttaagcggacgagaatagcgtttgaggtcaaactccagaagacatcccgaagcaccgattttagagtccctcaaagcatttgtactatgtttaatgttatggtggacgccaaagcccagtctacaaaattgtgtagcatggagatgggccaggaacatcagtatcattctaagatcgacgagctcatcgaggagactgtgaaggagatgataaccctgcttgtggccaaatttgtaacaattctcgaaggagttctcgcgaaactcagccgatacgacgagggaaccctcttctcaagcttcctctcatttacggtaaaggctgcttctaagtacgtggacgtcccgaagcctggcatggatgtcgccgatgcttatgtaactttcgtgcgacactcccaggatgtattgcgggacaaggtgaatgaggagatgtatatagagaggctctttgatcagtggtacaatagttctatgaacgttatctgcacgtggctcaccgatcggatggaccttcagctgcacatataccagctgaaaacgcttatcagaatggtcaagaagacttaccgggatttcagactccagggtgtgctggactcgactctcaacagtaagacttacgagactatcaggaatcggttaacggtggaggaggctaccgcctctgtttctgagggcggtggccttcagggcatttctatgaaggatagcgacgaagaggatgaggaggacgattag

SEQ ID NO: 258080 - DNA, 5190 bp, Artificial Sequence
  derived and/or modified sequence
tcagcagccgcagatggcatccggctgcgggctcggggctcgcaattgattctcccccttgcccacctcgagtccacggacgcacctctcccttcccctcctcccttcgcgcttctgggtctgagcccagctcgcgaccgccgggcagaggatcagtcgcggcggccgaggctgagcagcagcgctctcgctccctgacctggggagaagcgcccacccgggagagctgatccccggctgcctccagcgccccccaccttttgcactccaagccgggggctccagagaccccgctccccaggcgccactatgctggacccttcgtccagcgaagaagaatcggatgagatcgtggaggaggagagcggcaaggaggtgctcggctcggccccgtccggcgcgcgcctgtctcccagccgtaccagcgagggctcggccggcagcgccgggctggggggcggcggcgccggcgccggagccggggtgggtgcaggcggcggcgggggcagcggcgcgagcagcggcggcggggccggggggctgcaacccagcagccgcgctggcggcggccggccctccagccccagcccgtcggtggtgagcgagaaggagaaggaagagttggagcggctgcagaaagaggaggaggagaggaagaagaggctgcagctgtatgtgttcgtgatgcgctgcatcgcctacccctttaatgccaagcagcccaccgacatggctcgccggcagcagaagatcagcaaacagcagctgcagacagtcaaggaccggtttcaggctttcctcaatggggaaacccagatcatggctgacgaagccttcatgaacgctgtgcagagttactatgaggtgttcctgaagagcgaccgtgtggcccgcatggttcagagtggaggctgttccgccaacgactcccgggaggtcttcaagaagcacattgagaagagagtgcgcagcctgcctgagattgacggcctcagcaaggagactgtgctgagctcctggatggccaaatttgatgccatctaccgtggagaagaggacccgcggaagcagcaggcccggatgacagccagcgcagcctccgagctgattctgagcaaggagcaactctatgagatgttccagaacattcttgggatcaagaagttcgaacatcagctcctttacaatgcctgccagctggacaatccagatgagcaagcagcccagatcagacgagagctggatggacgtctacaaatggcagaccaaatagccagggaacgcaaatttcccaagtttgtatccaaagaaatggaaaacatgtacattgaggagctgaagtcatctgtcaacctgctcatggccaacttggagagcatgccggtatccaaaggcggggagttcaagctccagaaactcaaacgcagccacaatgcttccatcatcgacatgggcgaggagagtgagaaccagctctccaagtcagatgtcgtgctgtctttctcattggaggtggtaattatggaagtccaaggcctcaaatctttggctccaaatcgcatcgtatattgcacaatggaggtggaaggaggagagaaactacagactgatcaggccgaggcttctaaaccaacctggggcacccagggtgacttctccacaacccatgcactgccagctgtgaaggtgaagctgttcacagagagcacaggcgtcctggcgttggaggacaaggagcttgggcgggttattctccatcccaccccgaacagccccaaacagtcagagtggcacaaaatgacagtctccaaaaactgccccgaccaagatctcaaaatcaaacttgctgtccgaatggataagcctcaaaacatgaagcattctgggtatttatgggccatcggtaagaatgtctggaagagatggaagaaaaggttttttgtattggtgcaggtcagtcagtacacgtttgccatgtgcagttatcgggagaagaaagcggagcctcaggaacttctacaattggatggctacactgtggattacaccgacccccagccaggtttggagggtggccgagccttcttcaatgctgtcaaggagggagacaccgtgatatttgccagtgacgatgaacaagaccgcatcctgtgggtccaggccatgtatcgggccacggggcagtcacacaagcctgtgcccccgacccaagtccagaaactcaacgccaagggaggaaatgtacctcagctggatgcccctatctctcaattttacgcagatagagctcaaaaacatggcatggatgaatttatctcttccaacccctgtaactttgaccacgcttccctctttgagatgggctggttcagtcctggccaggtgtttgtactagacgagtattgcgcccgaaatggagtccgggggtgtcaccgacatctctgctacctcagagacttgcttgaacgggcagaaaatggcgccatgatcgaccccacccttcttcactacagctttgccttctgtgcatcccatgtccatgggaacaggcctgatggaattggaactgtgactgttgaagaaaaggaacgttttgaagaaatcaaagagaggctccgagttctgctagaaaatcagattacacattttaggtattgctttccatttggtcgacctgaaggtgctttgaaagctactctctcactcttggaaagggttttgatgaaagatattgttaccccagtgccacaagaggaggtaaaaacagttatccgtaaatgtctggaacaggctgcgttagtcaactattctcggctctcagagtatgccaaaatcgaagaaaatgtaggccggttaatcactcctgccaaaaagcttgaagatacaatacgtcttgctgaactagtcattgaagttcttcagcaaaatgaggagcaccacgcagaggcctttgcgtggtggtcagatttaatggtggagcatgcggagacgttcctgtcactctttgcagtagacatggatgcagccttagaggtgcaacctccagacacatgggacagttttccactatttcagctgctgaatgattttctccgtactgactataatttgtgcaatggaaaatttcacaaacacctgcaagacctgtttgccccacttgttgttagatatgtggatctgatggagtcctcaattgcacaatccattcacaggggctttgagcgggagtcatgggaaccagtcaataatgggtcaggcacctcagaagatctgttttggaaacttgacgcccttcagaccttcattcgggacctgcactggcctgaagaagagtttggaaagcacctggaacaacggctgaagttgatggcaagtgacatgatcgaatcttgtgtcaaaagaaccaggattgcatttgaagttaagctgcaaaaaaccagtcgatcaacagattttcgagtcccacagtcaatatgcaccatgtttaatgttatggttgatgccaaagctcaatcaacaaaactttgcagcatggaaatgggccaagagcatcaataccattcaaaaatagacgaactaattgaagaaactgttaaagaaatgataacactcttggttgcaaagttcgttactatcttggaaggagtgctggcaaaattatccagatatgacgaagggactttgttttcttcttttctgtcatttaccgtgaaggcagcttccaaatatgtggatgtacctaaacccgggatggacgtggccgacgcctacgtgactttcgtccgccattctcaggatgtcctgcgtgataaggtcaatgaggagatgtacatagaaaggttatttgatcaatggtacaacagctccatgaacgtgatctgcacctggttgacggaccggatggacttacagcttcatatttatcagttgaaaacactaattaggatggtaaagaaaacctacagagatttccgattgcaaggggtcctggactccaccttaaacagcaagacctatgaaacgatccggaaccgtctcactgtggaggaagccacagcatcagtgagtgaaggtgggggactgcagggcatcagcatgaaggacagcgatgaggaagacgaagaagacgattagaccatttggtcctagagtctgctgggacagagtcctgtaatcagtgcatgtccttagtctgttagttaaacccattaggaattttctgtcaactaccatgcccatgagatgtttatcaatacaactgccattttagctatgtggtaccaagattagcaaatgaccttcatatccactgatttcctgatgtccatgtctatatgtttacaagcaatatggagcaccattctttaaatactgttcatggagaatacatagtctaaccactaggcgtgtccctgttatcagcaaagatcaatgatgcttcattcatgtactatgtatgcattggtggtaaatggatgtgagggcaagtacatcaagtacattcactctgtttcacgtatgtggatgccagttaattaaatgagtacgtaaataaattaattaaaacacatagatctgctttgtgtttttatttttattttttgaaaaacaaaaggcaagtctccaacaattaacttttgatgctttctgttcccctaaaaccaaaaaatgaaccccttgtgtcgttgttaacccatcctttcatttactcatataattagccaaaaaaaaaaggatggctacataccaatggattgattctcttaattgccacggcaagggggcgatcctatcatgacttaacatcaagcgcgcagttcaaaactactgtcttctgtcaaagttttctcctcttaaatgttattttgcttttacgtctcaactgtgtatgtaaaaaaaatgaatatttaaattacaaccctagactaaaaatgtgtttataataagatgtggatatttccttcagtagattgtaaccataatttaaattattttgttccacactgttttttatatctgtcatgtacattgcattttgatctgtaactgcacaaccctggggtttgctgcagagctatttctttccatgtaaagtagtggatccatcttgcttttgccttatataaagcctacagttatggaagtgtggaaaactgtggcttctcaataaatattcagatgtcctaagaa

SEQ ID NO: 258081 - DNA, 3825 bp, Artificial Sequence
  derived and/or modified sequence
atgctggaccccagcagcagcgaggaggagagcgacgagatcgtggaggaggagagcggcaaggaggtgctgggcagcgcccccagcggcgccagactgagccccagcagaaccagcgagggcagcgccggcagcgccggcctgggcggcggcggcgccggcgccggcgccggcgtgggcgccggcggcggcggcggcagcggcgccagcagcggcggcggcgccggcggcctgcagcccagcagcagagccggcggcggcagacccagcagccccagccccagcgtggtgagcgagaaggagaaggaggagctggagagactgcagaaggaggaggaggagagaaagaagagactgcagctgtacgtgttcgtgatgagatgcatcgcctaccccttcaacgccaagcagcccaccgacatggccagaagacagcagaagatcagcaagcagcagctgcagaccgtgaaggacagattccaggccttcctgaacggcgagacccagatcatggccgacgaggccttcatgaacgccgtgcagagctactacgaggtgttcctgaagagcgacagagtggccagaatggtgcagagcggcggctgcagcgccaacgacagcagagaggtgttcaagaagcacatcgagaagagagtgagaagcctgcccgagatcgacggcctgagcaaggagaccgtgctgagcagctggatggccaagttcgacgccatctacagaggcgaggaggaccccagaaagcagcaggccagaatgaccgccagcgccgccagcgagctgatcctgagcaaggagcagctgtacgagatgttccagaacatcctgggcatcaagaagttcgagcaccagctgctgtacaacgcctgccagctggacaaccccgacgagcaggccgcccagatcagaagagagctggacggcagactgcagatggccgaccagatcgccagagagagaaagttccccaagttcgtgagcaaggagatggagaacatgtacatcgaggagctgaagagcagcgtgaacctgctgatggccaacctggagagcatgcccgtgagcaagggcggcgagttcaagctgcagaagctgaagagaagccacaacgccagcatcatcgacatgggcgaggagagcgagaaccagctgagcaagagcgacgtggtgctgagcttcagcctggaggtggtgatcatggaggtgcagggcctgaagagcctggcccccaacagaatcgtgtactgcaccatggaggtggagggcggcgagaagctgcagaccgaccaggccgaggccagcaagcccacctggggcacccagggcgacttcagcaccacccacgccctgcccgccgtgaaggtgaagctgttcaccgagagcaccggcgtgctggccctggaggacaaggagctgggcagagtgatcctgcaccccacccccaacagccccaagcagagcgagtggcacaagatgaccgtgagcaagaactgccccgaccaggacctgaagatcaagctggccgtgagaatggacaagccccagaacatgaagcacagcggctacctgtgggccatcggcaagaacgtgtggaagagatggaagaagagattcttcgtgctggtgcaggtgagccagtacaccttcgccatgtgcagctacagagagaagaaggccgagccccaggagctgctgcagctggacggctacaccgtggactacaccgacccccagcccggcctggagggcggcagagccttcttcaacgccgtgaaggagggcgacaccgtgatcttcgccagcgacgacgagcaggacagaatcctgtgggtgcaggccatgtacagagccaccggccagagccacaagcccgtgccccccacccaggtgcagaagctgaacgccaagggcggcaacgtgccccagctggacgcccccatcagccagttctacgccgacagagcccagaagcacggcatggacgagttcatcagcagcaacccctgcaacttcgaccacgccagcctgttcgagatgggctggttcagccccggccaggtgttcgtgctggacgagtactgcgccagaaacggcgtgagaggctgccacagacacctgtgctacctgagagacctgctggagagagccgagaacggcgccatgatcgaccccaccctgctgcactacagcttcgccttctgcgccagccacgtgcacggcaacagacccgacggcatcggcaccgtgaccgtggaggagaaggagagattcgaggagatcaaggagagactgagagtgctgctggagaaccagatcacccacttcagatactgcttccccttcggcagacccgagggcgccctgaaggccaccctgagcctgctggagagagtgctgatgaaggacatcgtgacccccgtgccccaggaggaggtgaagaccgtgatcagaaagtgcctggagcaggccgccctggtgaactacagcagactgagcgagtacgccaagatcgaggagaacgtgggcagactgatcacccccgccaagaagctggaggacaccatcagactggccgagctggtgatcgaggtgctgcagcagaacgaggagcaccacgccgaggccttcgcctggtggagcgacctgatggtggagcacgccgagaccttcctgagcctgttcgccgtggacatggacgccgccctggaggtgcagccccccgacacctgggacagcttccccctgttccagctgctgaacgacttcctgagaaccgactacaacctgtgcaacggcaagttccacaagcacctgcaggacctgttcgcccccctggtggtgagatacgtggacctgatggagagcagcatcgcccagagcatccacagaggcttcgagagagagagctgggagcccgtgaacaacggcagcggcaccagcgaggacctgttctggaagctggacgccctgcagaccttcatcagagacctgcactggcccgaggaggagttcggcaagcacctggagcagagactgaagctgatggccagcgacatgatcgagagctgcgtgaagagaaccagaatcgccttcgaggtgaagctgcagaagaccagcagaagcaccgacttcagagtgccccagagcatctgcaccatgttcaacgtgatggtggacgccaaggcccagagcaccaagctgtgcagcatggagatgggccaggagcaccagtaccacagcaagatcgacgagctgatcgaggagaccgtgaaggagatgatcaccctgctggtggccaagttcgtgaccatcctggagggcgtgctggccaagctgagcagatacgacgagggcaccctgttcagcagcttcctgagcttcaccgtgaaggccgccagcaagtacgtggacgtgcccaagcccggcatggacgtggccgacgcctacgtgaccttcgtgagacacagccaggacgtgctgagagacaaggtgaacgaggagatgtacatcgagagactgttcgaccagtggtacaacagcagcatgaacgtgatctgcacctggctgaccgacagaatggacctgcagctgcacatctaccagctgaagaccctgatcagaatggtgaagaagacctacagagacttcagactgcagggcgtgctggacagcaccctgaacagcaagacctacgagaccatcagaaacagactgaccgtggaggaggccaccgccagcgtgagcgagggcggcggcctgcagggcatcagcatgaaggacagcgacgaggaggacgaggaggacgactag

SEQ ID NO: 258082 - protein, 1314 aa, Artificial Sequence
  derived and/or modified sequence
MLDPSSSEEESDEIVEEESGKEVLGSAPSGARLSPSRTSEGSAGSAGLGGGGAGAGAGVGAGGGGGSGASSGGGAGGLQPSSRAGGGRPSSPSPSVVSEKEKEELERLQKEEEERKKRLQLYVFVMRCIAYPFNAKQPTDMARRQQKISKQQLQTVKDRFQAFLNGETQIMADEAFMNAVQSYYEVFLKSDRVARMVQSGGCSANDSREVFKKHIEKRVRSLPEIDGLSKETVLSSWMAKFDAIYRGEEDPRKQQARMTASAASELILSKEQLYEMFQNILGIKKFEHQLLYNACQLDNPDEQAAQIRRELDGRLQMADQIARERKFPKFVSKEMENMYIEELKSSVNLLMANLESMPVSKGGEFKLQKLKRSHNASIIDMGEESENQLSKSDVVLSFSLEVVIMEVQGLKSLAPNRIVYCTMEVEGGEKLQTDQAEASKPTWGTQGDFSTTHALPAVKVKLFTESTGVLALEDKELGRVILHPTPNSPKQSEWHKMTVSKNCPDQDLKIKLAVRMDKPQNMKHSGYLWAIGKNVWKRWKKRFFVLVQVSQYTFAMCSYREKKAEPQELLQLDGYTVDYTDPQPGLEGGRAFFNAVKEGDTVIFASDDEQDRILWVQAMYRATGQSHKPVPPTQVQKLNAKGGNVPQLDAPISQFYADRAQKHGMDEFISSNPCNFDHASLFEMVQRLTLDHRLNDSYSCLGWFSPGQVFVLDEYCARNGVRGCHRHLCYLRDLLERAENGAMIDPTLLHYSFAFCASHVHGNRPDGIGTVTVEEKERFEEIKERLRVLLENQITHFRYCFPFGRPEGALKATLSLLERVLMKDIVTPVPQEEVKTVIRKCLEQAALVNYSRLSEYAKIEGKKREMYEHPVFCLASQVMDLTIQNVGRLITPAKKLEDTIRLAELVIEVLQQNEEHHAEAFAWWSDLMVEHAETFLSLFAVDMDAALEVQPPDTWDSFPLFQLLNDFLRTDYNLCNGKFHKHLQDLFAPLVVRYVDLMESSIAQSIHRGFERESWEPVNNGSGTSEDLFWKLDALQTFIRDLHWPEEEFGKHLEQRLKLMASDMIESCVKRTRIAFEVKLQKTSRSTDFRVPQSICTMFNVMVDAKAQSTKLCSMEMGQEHQYHSKIDELIEETVKEMITLLVAKFVTILEGVLAKLSRYDEGTLFSSFLSFTVKAASKYVDVPKPGMDVADAYVTFVRHSQDVLRDKVNEEMYIERLFDQWYNSSMNVICTWLTDRMDLQLHIYQLKTLIRMVKKTYRDFRLQGVLDSTLNSKTYETIRNRLTVEEATASVSEGGGLQGISMKDSDEEDEEDD

SEQ ID NO: 258083 - DNA, 3945 bp, Artificial Sequence
  derived and/or modified sequence
atgttggatccttcctcctctgaggaagaaagtgacgagattgttgaagaggagagcggcaaggaagtcttggggagcgcaccttcgggtgctcgcttgagtccctctcgcacaagtgaaggaagcgccggatcggccggcctagggggcggcggtgcaggggccggggcaggtgtcggtgccggcggggggggtggctccggggcctccagcggcggtggcgcaggtggcttgcagccttcctccagagccggtgggggtaggcccagctcaccatcaccgagtgtagtgtcagagaaagaaaaggaggagctggaacgccttcaaaaagaagaggaagaaaggaagaaacgtttacaactgtatgtgttcgtcatgcggtgcattgcatatccgttcaatgccaaacaacccaccgacatggcacgccggcagcaaaagatcagcaaacaacagctgcagacagtcaaggatcgatttcaagcgttcctgaacggtgagacacaaattatggcagacgaggcctttatgaatgccgtgcaaagctattacgaggtattcctgaaatccgacagggtcgccaggatggtccagtcaggcggctgtagcgccaatgattctcgagaggtgtttaagaagcacatagagaagcgggtccgcagtctgcccgagattgacgggctgagcaaggaaaccgtgctaagcagctggatggcaaagtttgacgcaatctatagaggggaagaagatcctcgaaaacagcaggcacgcatgactgcgagtgccgcaagcgagctgatcctatcaaaagagcaattatatgaaatgtttcaaaacatcctgggaattaagaagttcgaacatcagttgctctataatgcttgccagctggacaacccggacgaacaggccgcacagattagacgggaactagacggcagattacaaatggccgatcagatagcccgcgagaggaagtttcccaagtttgttagcaaagaaatggagaatatgtatatcgaagaactcaaatcatctgttaatctgcttatggccaacctggagtctatgccagtctcaaagggtggcgagttcaaactgcaaaagctgaagaggagccacaacgctagtattattgatatgggtgaggaatctgagaaccagctgtccaagagcgacgttgtgctgtccttctccttggaggtggtaatcatggaggtccagggtctgaagtcactggcccccaataggatcgtctattgcactatggaggtggaaggaggcgagaaactgcagactgaccaagctgaggcttccaagcctacctgggggacacaaggtgacttctctacaacacatgccctccctgctgtgaaagtgaagctcttcacagaatcaactggcgtgctcgctctagaggataaggagctggggagagttattctgcatccaactcccaactctccaaagcagtctgagtggcacaaaatgacagttagtaaaaactgccctgaccaggatctgaagatcaaactggctgttcgcatggacaaaccccagaatatgaaacactcggggtatctgtgggcgatcggcaagaacgtctggaagcgctggaaaaagcggtttttcgttctggtgcaagtgtcacagtatactttcgcgatgtgtagttatagggagaagaaggcagaaccccaggaactgctgcagctggacgggtacaccgtagattacactgaccctcagcctggcctggaggggggacgagcgttctttaacgccgttaaggagggagatacggtaatcttcgcatccgacgacgaacaggacagaattctctgggttcaggccatgtacagagcaacagggcagagccataagccagtcccacccactcaagtacagaaattaaacgcgaaggggggaaacgtgccccagctcgacgctcccatctcccagttttacgctgaccgggcccaaaaacacggcatggatgaatttatttcatctaacccttgtaatttcgaccatgcttctctgtttgagatggtccagcgtctaacgctcgatcaccggctgaacgactcctactcttgcctaggatggttctccccaggccaagtttttgttttggacgagtactgcgctagaaatggggttaggggatgtcacagacatctttgttacctccgcgacttgctggaacgggcggagaacggggcaatgattgatcccaccctactgcactatagtttcgccttttgtgccagccatgtccacggtaataggccagacgggatcggtaccgtgactgtggaggagaaagagcgcttcgaggagatcaaggagagactgcgtgtgttgctggaaaaccagattacacactttcgatactgctttccatttggacgtcctgaaggcgctctgaaagccacactatcgctcctggagcgggtactcatgaaagacatcgtgactccagtccctcaagaggaagtcaagacagtcatacgaaagtgcctggaacaggcagctctggtaaactatagtaggctgtccgagtatgctaagattgagggcaaaaagcgcgagatgtacgagcacccagtgttctgtttagctagccaggttatggacctgacgattcaaaatgtgggcaggttgattacaccagctaaaaaacttgaagatacaatacgactcgccgaactcgtcatagaagtcctccagcaaaatgaagagcatcacgccgaggcttttgcttggtggtcagacctgatggtggaacatgctgagactttcctgagtctgttcgccgtggatatggatgctgctctcgaagttcaaccacctgacacgtgggatagtttcccattgttccaactcttaaatgactttctcaggaccgattacaatctatgcaatggcaagttccacaaacacctgcaagacctatttgctcctctcgtcgttcgatacgtggacctcatggaatcatctatcgctcagagcatccatcgtggatttgagcgagaaagttgggagcctgtcaataacggatccggcacatctgaggacctcttttggaagctggacgccctccagacatttatcagagatctgcactggcccgaggaggaattcgggaagcatctggagcagcgtctgaaattgatggcttccgacatgattgagtcctgcgttaagaggaccagaattgcttttgaagtcaaactgcagaaaacctctcggagcacggatttccgggtgcctcagtcgatttgcactatgttcaacgtcatggtggatgcaaaagcgcaatcaactaaactgtgctctatggagatgggccaggagcaccaataccatagtaagattgatgagctgatcgaagaaaccgtgaaagagatgataactttactagtagcaaaatttgttaccatcctggaaggcgtcctcgccaagctcagtaggtacgacgaaggtactctgttcagcagcttcctttcttttactgtgaaagctgcttctaaatatgtagatgtgccaaagccaggaatggacgttgccgatgcatatgtcactttcgtccgccactcgcaggacgtactgcgggacaaagtgaacgaggaaatgtacatcgaacgcctcttcgaccagtggtacaattcgtccatgaatgtgatttgcacttggctgactgaccgcatggacttgcagctccacatctaccagctaaaaacattgatcaggatggtcaagaaaacctatcgagattttaggctacaaggtgttcttgactctactcttaacagcaaaacgtacgagacgattcggaaccggctgactgtagaggaggcaacagccagcgtcagcgaaggcggtggcctccaggggatctcaatgaaggactccgacgaagaggacgaggaggacgactag

SEQ ID NO: 258084 - DNA, 3945 bp, Artificial Sequence
  derived and/or modified sequence
atgctggaccccagcagcagcgaggaggagagtgatgagatcgtggaggaggagagcggcaaggaggtgctgggcagcgcccccagcggggcccggctgagccccagcaggaccagcgagggcagcgctggcagcgctggcctgggcggcggcggggccggggccggggccggcgtgggcgccggcggcggcggcggcagcggggccagcagcggcggcggggccggcggcctgcagcccagcagccgggccggcggcggccggcccagcagccccagccccagcgtggtgtctgagaaggagaaggaggagctggagcggctgcagaaggaggaggaggagaggaagaagaggctgcagctgtatgtgtttgtgatgcgctgcatcgcctaccccttcaatgccaagcagcccacagacatggcccggcggcagcagaagatcagcaagcagcagctgcagacagtgaaggaccgcttccaggccttcctgaatggagagacccagatcatggctgatgaggccttcatgaatgctgtgcagagctactatgaggtgttcctgaagagtgacagagtggccaggatggtgcagagcggcggctgcagcgccaatgacagccgggaggtgttcaagaagcacatcgagaagagggtgcgcagcctgcctgagattgatggcctgagcaaggagaccgtgctgagctcctggatggccaagtttgatgccatctacagaggagaggaggaccccaggaagcagcaggccaggatgacagccagcgctgccagcgagctgatcctgagcaaggagcagctgtatgagatgttccagaacatcctgggcatcaagaagtttgagcaccagctgctgtacaatgcctgccagctggacaacccagatgagcaggccgcccagatccggcgggagctggatggccgcctgcagatggctgaccagatcgcccgggagaggaagttccccaagtttgtgtccaaggagatggagaacatgtacatcgaggagctgaagagctctgtgaacctgctgatggccaacctggagagcatgcctgtgtccaaaggaggagagttcaagctgcagaagctgaagaggagccacaatgccagcatcatcgacatgggagaggagagcgagaaccagctgagcaagagtgatgtggtgctgtccttcagcctggaggtggtgatcatggaggtgcagggcctgaagagcctggcccccaaccgcatcgtgtactgcaccatggaggtggagggcggggagaagctgcagacagaccaggccgaggccagcaagcccacctggggcacccagggcgacttcagcaccacccacgccctgcctgctgtgaaggtgaagctgttcacagagagcactggagtgctggccctggaggacaaggagctgggccgggtcatcctgcaccccacccccaacagccccaagcagagcgagtggcacaagatgacagtgtccaagaactgcccagaccaggacctgaagatcaagctggccgtgaggatggacaagccccagaacatgaagcacagcggctacctgtgggccatcggcaagaatgtgtggaagcgctggaagaagcgcttctttgtgctggtgcaggtgtcccagtacacctttgccatgtgcagctaccgggagaagaaggccgagccccaggagctgctgcagctggatggctacacagtggactacacagacccccagcccggcctggagggcggccgggccttcttcaatgctgtgaaggagggggacaccgtcatctttgccagtgatgatgagcaggaccgcatcctgtgggtgcaggccatgtaccgggccaccggccagagccacaagcctgtgccccccacccaggtgcagaagctgaatgccaagggcggcaatgtgccccagctggatgcccccatcagccagttctatgctgaccgggcccagaagcacggcatggatgagttcatcagcagcaacccctgcaactttgaccacgccagcctgtttgagatggtgcagaggctgaccctggaccaccggctgaatgacagctacagctgcctgggctggttcagccctggccaggtgtttgtgctggatgagtactgtgccagaaatggagtgcggggctgccaccgccacctgtgctacctgcgggacctgctggagcgggcagaaaatggagccatgattgaccccaccctgctgcactacagctttgccttctgtgccagccacgtgcacggcaacagaccagatggcatcggcaccgtgacagtggaggagaaggagagatttgaggagatcaaggagcggctgcgggtgctgctggagaaccagatcacccacttccgctactgcttccccttcggccggcctgagggcgccctgaaggccaccctgagcctgctggagcgggtgctgatgaaggacatcgtgacccctgtgccccaggaggaggtgaagacagtcatcaggaagtgcctggagcaggccgccctggtgaactacagccggctgtctgaatatgccaagattgagggcaagaagcgggagatgtatgagcaccctgtgttctgcctggccagccaggtgatggacctgaccatccagaatgtgggccgcctcatcaccccagccaagaagctggaggacaccatccggctggccgagctggtgattgaggtgctgcagcagaatgaggagcaccacgccgaggcctttgcctggtggagcgacctgatggtggagcacgccgagaccttcctgagcctgtttgctgtggacatggatgctgccctggaggtgcagcccccagacacctgggacagcttccccctcttccagctgctgaatgacttcctgaggacagactacaacctgtgcaatggcaagttccacaagcacctgcaggacctgtttgcccccctggtggtgcgctacgtggacctgatggagagcagcatcgcccagagcatccaccggggctttgagcgggagagctgggagcctgtgaacaacggcagcggcaccagcgaggacctcttctggaagctggatgccctgcagaccttcatccgggacctgcactggccagaggaggagtttgggaagcacctggagcagaggctgaagctgatggccagtgacatgattgagagctgtgtgaagaggacccgcatcgcctttgaggtgaagctgcagaagaccagccgcagcacagacttccgggtgccccagagcatctgcaccatgttcaacgtgatggtggatgccaaggcccagagcaccaagctgtgcagcatggagatgggccaggagcaccagtaccacagcaagattgatgagctgattgaggagaccgtgaaggagatgatcaccctgctggtggccaagtttgtgaccatcctggagggcgtgctggccaagctgagccgctatgatgagggcaccctcttcagcagcttcctgtccttcaccgtgaaggccgccagcaaatatgtggatgtgcccaagccaggcatggatgtggctgatgcctacgtgacctttgtgcgccacagccaggatgtgctgcgggacaaggtgaatgaggagatgtacatcgagcggctgtttgaccagtggtacaacagctccatgaatgtcatctgcacctggctgacagacaggatggacctgcagctgcacatctaccagctgaagaccctcatccgcatggtgaagaagacctacagagacttccggctgcagggcgtgctggacagcaccctgaacagcaagacctatgagaccatccggaaccggctgactgtggaggaggccacagcctctgtgtctgagggcggcggcctgcagggcatctccatgaaggacagtgatgaagaagatgaggaggatgactag

SEQ ID NO: 258085 - DNA, 3945 bp, Artificial Sequence
  derived and/or modified sequence
atgctggaccccagcagcagcgaggaggagagcgacgagatcgtggaagaagagtctggtaaagaggttctgggcagcgcaccatccggcgcaagactgagcccgtcaaggacatctgaaggatcggctggctccgctggtctgggggggggcggcgctggagcaggcgccggtgtgggtgcaggtggcgggggtggatccggcgcttcaagcgggggcggggccgggggactgcagcctagctctcgcgccggtggcgggcgcccctcatcaccctccccaagcgtcgtgtccgaaaaggagaaagaggaactggagcggctccagaaggaggaggaagagcgcaagaagcggcttcaactttacgtctttgtgatgcgctgcatcgcctaccccttcaacgctaagcagcccaccgatatggccaggcgccagcagaagatttcaaagcagcagctgcagaccgtcaaggacaggtttcaggccttccttaacggcgagactcagataatggccgacgaggcctttatgaatgctgtacagtcctactacgaagtcttcctcaagtcagaccgggtggctcggatggtgcaaagcggcggatgtagcgcgaatgattccagagaagtcttcaagaagcacattgagaagagggtcagaagtctaccagagatagatggtctgtccaaggaaaccgttctgagctcgtggatggccaaattcgacgccatttaccgtggtgaagaagacccacggaagcagcaggcccgcatgacagcctctgcagcaagtgaattaattctgagcaaagagcagctgtacgagatgttccagaatatactggggataaaaaaattcgagcatcagttgctgtataatgcatgtcaacttgacaatcccgacgagcaagcggcccaaatccgtagagaactggacggacgccttcagatggcggaccagatcgcccgcgagaggaaattccccaaatttgtaagcaaagaaatggagaatatgtatatcgaggaactcaaaagctccgtcaaccttctaatggccaatttggaatcaatgcccgtgtccaaagggggggaattcaaattgcagaaactcaagcgtagccacaatgcgtccattattgacatgggcgaggagtccgaaaatcagctgagcaaatcagatgtggtgctgtctttcagcctcgaggtagtgatcatggaagtccaggggctcaaatctctggcccccaatcgaatcgtttactgcactatggaagttgaaggcggtgagaagctgcagaccgatcaggccgaagcatctaagccgacttggggcacacagggcgactttagtacaacgcacgcacttcctgcagtgaaggttaaactattcacggagtcaactggagtccttgccttggaagacaaggagttgggtcgagtcattctccatcctactcctaactccccaaaacagtcagagtggcataaaatgacagtgagcaaaaattgtccagaccaggacctgaaaatcaagctggctgtcaggatggacaagccacaaaatatgaagcactcagggtacctgtgggccatcggcaaaaacgtatggaagcgctggaagaagcggttctttgtgctggtgcaggtctctcagtacacattcgctatgtgttcgtaccgggagaaaaaagcagaacctcaggagctcttacagcttgatggttataccgtagactacaccgacccgcagcccggcttagaaggcggccgcgctttctttaacgccgtcaaggaaggggacacagtaatcttcgcctccgacgacgaacaagacaggattctgtgggtccaggctatgtacagagccaccgggcagtcccataagcccgttccgccaacacaggtccagaagctcaatgcaaaggggggcaacgttccccaactggatgctccaatcagccaattctacgcagaccgtgctcagaaacacggcatggatgagttcatttcaagtaatccatgcaattttgaccacgcatccttatttgaaatggtacaaagactgactttggatcaccggctcaatgactcctacagctgtcttggatggttcagcccggggcaggtctttgtcctggatgagtactgcgcccgcaatggcgttagagggtgccaccgccacctgtgttacctgagagacctactggagcgtgccgaaaacggagcgatgattgacccaaccctgctgcactactcctttgccttttgcgcctcacacgttcacgggaatcgccccgatggtatagggacagtgaccgttgaagagaaagaacgattcgaggagatcaaagagcggttacgggtgctgcttgaaaaccagatcacacactttcgatattgctttccattcggtagacccgagggggccttaaaagcaactctatcactcttagagagagtgttgatgaaagacattgtgacaccagtccctcaagaagaggtgaagactgtgatcaggaagtgccttgagcaggctgcgctcgtcaattatagcagactgtctgaatacgccaagatagagggcaaaaagcgtgagatgtatgagcatcctgtgttctgtctcgctagccaagttatggatctgactatccagaatgtcggccgactcatcacacctgcaaaaaagctagaagacacgatccgcctcgccgaactggttatagaagtgctgcaacagaatgaggaacaccacgcagaggcattcgcatggtggtccgacctgatggtagagcacgccgagacattcctgtcattgtttgcagtcgatatggatgccgctttggaggtccaacctcctgacacttgggattcctttcccctcttccagctcctgaacgactttctccgcaccgattacaacctgtgcaacggtaagttccataagcacctccaggacctgttcgcaccactggtggtgcgctacgtggacctcatggaatctagcatcgctcagagcatccatagggggttcgagcgcgaatcatgggaaccagtcaataatggttcgggtacctctgaggacctattttggaagctcgacgccttgcagacttttattagagacctgcactggcctgaagaagagttcgggaaacacctggagcagaggcttaagttgatggcaagtgacatgatcgaaagctgcgtgaaaaggaccaggatcgcctttgaagtcaaactccagaaaacctcccggagcacggacttccgtgtgcctcagtccatctgtaccatgtttaatgttatggtagatgctaaggcgcagagcacgaagctgtgttcgatggaaatgggccaagagcaccagtaccactcgaagatcgacgagctcatcgaagagactgtgaaggaaatgataaccttgttagttgctaagtttgtgactatactggaaggcgttctggccaaattgtcgcgatatgacgaaggtaccctcttcagttctttcctctcttttaccgttaaggcggctagcaaatacgtggatgttcccaagcctgggatggatgtcgctgacgcctatgtgaccttcgtgagacactcacaagacgtgttgagggacaaggtcaacgaggagatgtacattgaaagattatttgaccagtggtacaatagttcaatgaacgtgatctgcacgtggttaactgacagaatggatctacaacttcatatctaccagttgaaaacactgattcgtatggtcaaaaaaacataccgagactttcgactgcagggtgtcctagacagtacccttaattccaagacttatgagacaattagaaataggctcacggttgaggaagccactgctagtgtgtctgagggagggggcttacaaggcatttcgatgaaggacagtgatgaggaggacgaggaagacgactag

SEQ ID NO: 258086 - DNA, 3945 bp, Artificial Sequence
  derived and/or modified sequence
atgttggacccgagttcaagtgaggaagagtcagacgagatagtagaggaggagtcagggaaggaagtgctagggtcagccccttctggggcacgattaagcccgagtaggaccagcgaagggtccgctggctctgctgggctgggcggtggcggtgccggagcaggtgccggagtcggggctggaggtggagggggatccggagcctcttccgggggtggggctggaggactgcaaccctcgtcccgggcaggcggagggaggccatcttccccttccccgagcgtggtgtccgagaaggagaaggaggagttggagcgtctccagaaagaggaggaagaaaggaagaagcgacttcaactgtatgtatttgtcatgagatgtattgcatatcctttcaatgcaaagcagcccaccgatatggcccgtcgacagcaaaagatttccaagcagcagctccagaccgtgaaggacagatttcaagccttcctgaatggtgagacccagattatggccgacgaagccttcatgaacgcagtacaatcctactatgaggtgtttctcaagtcagatagagtcgcgcgtatggtgcagtcaggaggctgctccgccaacgacagtagggaggtgttcaaaaaacacattgagaagagagtcagatcactgcctgagatcgacggcttgtcaaaggagacagtgttgtcttcatggatggccaaatttgacgccatctatcggggtgaagaggatccaaggaagcaacaggcaagaatgaccgctagtgcagccagcgagttgatcctgtctaaggagcagctctatgagatgttccagaacatcctggggattaaaaaatttgagcaccagttactgtacaatgcctgtcaactcgacaaccccgacgaacaggccgctcagatcaggcgtgagctggacggcagactgcagatggccgaccaaatcgcgagagagcgtaaatttcctaaattcgtaagcaaagagatggagaatatgtatatcgaggagcttaaaagtagcgtgaacctgctgatggcaaacctcgagagtatgcctgtcagtaagggaggggagtttaagttgcagaagctgaaaaggagtcacaacgcttctataattgacatgggcgaggaatcagaaaaccagctttcaaagtccgacgtcgtcttatcattttcacttgaggtagtgatcatggaagtacagggactcaagtcactggcacccaacagaatcgtatactgtaccatggaagtagaaggcggagaaaaactgcagactgatcaggcagaggcatctaaaccaacttggggaactcagggtgacttttctacgactcatgccctaccggctgtcaaagtgaaacttttcacggagagcacaggcgtgctggctctggaagataaagaactgggtcgcgtgatcctgcatccaactcctaatagtccgaagcagtctgagtggcacaaaatgacagtaagtaagaattgcccagaccaggacttgaaaataaaactagccgtacgtatggacaaaccacagaacatgaaacacagcgggtacctctgggccatcgggaaaaacgtgtggaagcgctggaaaaaacgttttttcgttctcgtgcaggtgtcccaatacacgtttgccatgtgctcctaccgcgagaagaaggccgagcctcaggagctactacagctagacggctataccgtcgattacactgacccccagcccggactcgaagggggaagagctttctttaatgccgttaaggaaggagacaccgtcatctttgcctccgacgacgaacaggatcgtattctgtgggtgcaggctatgtaccgggcaaccggacagtcccacaagcccgtgcctccaactcaggtgcagaaactcaatgccaagggaggaaatgtgccccagctggacgccccaatctcacagttctacgcggaccgggcacagaagcatggtatggatgaatttatctcttccaacccttgcaattttgaccacgcctcacttttcgagatggttcagcggctcacacttgaccatcgactgaacgattcttatagctgtttaggatggttttctccagggcaggtgttcgtccttgacgaatactgtgcaaggaacggggtgcggggatgtcacagacacctgtgttaccttcgggacctgttggagagagcagagaacggagctatgatcgatcccacactcctgcactattctttcgccttctgtgccagccacgtgcatggaaataggcccgatggcatcggcacagtcactgtggaagaaaaggaaaggttcgaagaaattaaggagcggctgcgggtcctgctggagaaccagataacgcatttccgctactgtttcccgttcgggaggcccgaaggggctcttaaagcgacactttcactcctggaaagagtcctcatgaaggacattgtcacacccgtccctcaggaggaagtaaaaacagtaattcggaaatgccttgagcaagctgctttggtcaattatagtcgcctgagcgagtatgccaaaatcgaagggaaaaagagggagatgtacgagcatccagtattctgcttagcttctcaggtcatggacctgacaatacagaatgtgggcaggcttatcactccagcgaaaaagctggaagataccatccgattggctgagttagtgatcgaagtgctgcagcagaatgaggagcatcatgctgaagcctttgcctggtggagcgacttgatggtggaacatgccgagacatttcttagtttgttcgctgtggatatggatgcggctctagaagttcagcccccagatacttgggattcctttccactattccagctgctgaatgactttctgcgcactgattataacctctgtaatggaaaattccacaagcatttgcaggatctttttgctccattagtggtgagatatgtcgacctgatggagtctagcatcgcccagtctattcatagaggttttgagcgagaaagctgggaaccagtgaacaacggtagcgggacctccgaagatcttttctggaaattagatgctctgcagacttttataagagaccttcactggcccgaagaagaattcggtaaacatctagaacaacgactcaaactgatggccagtgatatgatcgaatcttgcgttaagcgcacccgcatcgcttttgaggtgaaactgcagaagacgtcccgctctaccgatttccgggtcccccaatctatctgcacaatgttcaacgttatggttgatgctaaagcccagagcacaaagctttgcagcatggagatgggccaggagcaccagtaccattcaaaaatcgacgaactgatagaggagaccgtgaaagaaatgataaccctgttggtagccaagttcgtgacaattctggagggagtcctggctaaactctcgcggtatgatgaggggacgctcttttctagctttctctctttcactgtgaaagccgctagtaaatacgtcgacgtccccaagcctggaatggatgtggccgatgcgtatgtgacattcgtgcggcacagccaggacgtactaagagacaaggtcaatgaggaaatgtacatcgaacgcctgttcgatcagtggtacaattcctcaatgaacgttatctgtacgtggttaacagacaggatggacttgcagctgcacatctaccaacttaagacgttaatcaggatggttaaaaaaacctatcgggacttccgcctacagggggtgcttgatagtaccttgaacagtaaaacatatgagacgatccgcaatcggctgaccgtggaagaggccactgcctcagtaagcgagggcggaggactgcagggcatcagtatgaaggattcagacgaggaagacgaggaggacgactag

SEQ ID NO: 258087 - DNA, 4591 bp, Artificial Sequence
  derived and/or modified sequence
ctcctcccttcgcgcttctgggtctgagcccagctcgcgaccgccgggcagaggatcagtcgcggcggccgaggctgagcagcagcgctctcgctccctgacctggggagaagcgcccacccgggagagctgatccccggctgcctccagcgccccccaccttttgcactccaagccgggggctccagagaccccgctccccaggcgccactatgctggacccttcgtccagcgaagaagaatcggatgagatcgtggaggaggagagcggcaaggaggtgctcggctcggccccgtccggcgcgcgcctgtctcccagccgtaccagcgagggctcggccggcagcgccgggctggggggcggcggcgccggcgccggagccggggtgggtgcaggcggcggcgggggcagcggcgcgagcagcggcggcggggccggggggctgcaacccagcagccgcgctggcggcggccggccctccagccccagcccgtcggtggtgagcgagaaggagaaggaagagttggagcggctgcagaaagaggaggaggagaggaagaagaggctgcagctgtatgtgttcgtgatgcgctgcatcgcctacccctttaatgccaagcagcccaccgacatggctcgccggcagcagaagatcagcaaacagcagctgcagacagtcaaggaccggtttcaggctttcctcaatggggaaacccagatcatggctgacgaagccttcatgaacgctgtgcagagttactatgaggtgttcctgaagagcgaccgtgtggcccgcatggttcagagtggaggctgttccgccaacgactcccgggaggtcttcaagaagcacattgagaagagagtgcgcagcctgcctgagattgacggcctcagcaaggagactgtgctgagctcctggatggccaaatttgatgccatctaccgtggagaagaggacccgcggaagcagcaggcccggatgacagccagcgcagcctccgagctgattctgagcaaggagcaactctatgagatgttccagaacattcttgggatcaagaagttcgaacatcagctcctttacaatgcctgccagctggacaatccagatgagcaagcagcccagatcagacgagagctggatggacgtctacaaatggcagaccaaatagccagggaacgcaaatttcccaagtttgtatccaaagaaatggaaaacatgtacattgaggagctgaagtcatctgtcaacctgctcatggccaacttggagagcatgccggtatccaaaggcggggagttcaagctccagaaactcaaacgcagccacaatgcttccatcatcgacatgggcgaggagagtgagaaccagctctccaagtcagatgtcgtgctgtctttctcattggaggtggtaattatggaagtccaaggcctcaaatctttggctccaaatcgcatcgtatattgcacaatggaggtggaaggaggagagaaactacagactgatcaggccgaggcttctaaaccaacctggggcacccagggtgacttctccacaacccatgcactgccagctgtgaaggtgaagctgttcacagagagcacaggcgtcctggcgttggaggacaaggagcttgggcgggttattctccatcccaccccgaacagccccaaacagtcagagtggcacaaaatgacagtctccaaaaactgccccgaccaagatctcaaaatcaaacttgctgtccgaatggataagcctcaaaacatgaagcattctgggtatttatgggccatcggtaagaatgtctggaagagatggaagaaaaggttttttgtattggtgcaggtcagtcagtacacgtttgccatgtgcagttatcgggagaagaaagcggagcctcaggaacttctacaattggatggctacactgtggattacaccgacccccagccaggtttggagggtggccgagccttcttcaatgctgtcaaggagggagacaccgtgatatttgccagtgacgatgaacaagaccgcatcctgtgggtccaggccatgtatcgggccacggggcagtcacacaagcctgtgcccccgacccaagtccagaaactcaacgccaagggaggaaatgtacctcagctggatgcccctatctctcaattttacgcagatagagctcaaaaacatggcatggatgaatttatctcttccaacccctgtaactttgaccacgcttccctctttgagatggtacaacgccttactttggatcacagacttaatgattcctattcttgcctgggctggttcagtcctggccaggtgtttgtactagacgagtattgcgcccgaaatggagtccgggggtgtcaccgacatctctgctacctcagagacttgcttgaacgggcagaaaatggcgccatgatcgaccccacccttcttcactacagctttgccttctgtgcatcccatgtccatgggaacaggcctgatggaattggaactgtgactgttgaagaaaaggaacgttttgaagaaatcaaagagaggctccgagttctgctagaaaatcagattacacattttaggtattgctttccatttggtcgacctgaaggtgctttgaaagctactctctcactcttggaaagggttttgatgaaagatattgttaccccagtgccacaagaggaggtaaaaacagttatccgtaaatgtctggaacaggctgcgttagtcaactattctcggctctcagagtatgccaaaatcgaagggaaaaagagagaaatgtatgagcatcctgtcttctgcttggcctcccaagtgatggatttaaccattcaaaatgtaggccggttaatcactcctgccaaaaagcttgaagatacaatacgtcttgctgaactagtcattgaagttcttcagcaaaatgaggagcaccacgcagaggcctttgcgtggtggtcagatttaatggtggagcatgcggagacgttcctgtcactctttgcagtagacatggatgcagccttagaggtgcaacctccagacacatgggacagttttccactatttcagctgctgaatgattttctccgtactgactataatttgtgcaatggaaaatttcacaaacacctgcaagacctgtttgccccacttgttgttagatatgtggatctgatggagtcctcaattgcacaatccattcacaggggctttgagcgggagtcatgggaaccagtcaataatgggtcaggcacctcagaagatctgttttggaaacttgacgcccttcagaccttcattcgggacctgcactggcctgaagaagagtttggaaagcacctggaacaacggctgaagttgatggcaagtgacatgatcgaatcttgtgtcaaaagaaccaggattgcatttgaagttaagctgcaaaaaaccagtcgatcaacagattttcgagtcccacagtcaatatgcaccatgtttaatgttatggttgatgccaaagctcaatcaacaaaactttgcagcatggaaatgggccaagagcatcaataccattcaaaaatagacgaactaattgaagaaactgttaaagaaatgataacactcttggttgcaaagttcgttactatcttggaaggagtgctggcaaaattatccagatatgacgaagggactttgttttcttcttttctgtcatttaccgtgaaggcagcttccaaatatgtggatgtacctaaacccgggatggacgtggccgacgcctacgtgactttcgtccgccattctcaggatgtcctgcgtgataaggtcaatgaggagatgtacatagaaaggttatttgatcaatggtacaacagctccatgaacgtgatctgcacctggttgacggaccggatggacttacagcttcatatttatcagttgaaaacactaattaggatggtaaagaaaacctacagagatttccgattgcaaggggtcctggactccaccttaaacagcaagacctatgaaacgatccggaaccgtctcactgtggaggaagccacagcatcagtgagtgaaggtgggggactgcagggcatcagcatgaaggacagcgatgaggaagacgaagaagacgattagaccatttggtcctagagtctgctgggacagagtcctgtaatcagtgcatgtccttagtctgttagttaaacccattaggaattttctgtcaactaccatgcccatgagatgtttatcaatacaactgccattttagctatgtggtaccaagattagcaaatgaccttcatatccactgatttcctgatgtccatgtctatatgtttacaagcaatatggagcaccattctttaaatactgttcatggagaatacatagtctaaccactaggcgtgtccctgttatcagcaaagatcaatgatgcttcattcatgtactatgtatgcattggtggtaaatggatgtgagggcaagtacatcaagtacattcactctgtttcacgtatgtggatgccagttaattaaatgagtacgtaaataaattaattaaaaca

SEQ ID NO: 258088 - DNA, 3945 bp, Artificial Sequence
  derived and/or modified sequence
atgctggaccccagcagcagcgaggaggagagcgacgagatcgtggaggaggagagcggcaaggaggtgctgggcagcgcccccagcggcgccagactgagccccagcagaaccagcgagggcagcgccggcagcgccggcctgggcggcggcggcgccggcgccggcgccggcgtgggcgccggcggcggcggcggcagcggcgccagcagcggcggcggcgccggcggcctgcagcccagcagcagagccggcggcggcagacccagcagccccagccccagcgtggtgagcgagaaggagaaggaggagctggagagactgcagaaggaggaggaggagagaaagaagagactgcagctgtacgtgttcgtgatgagatgcatcgcctaccccttcaacgccaagcagcccaccgacatggccagaagacagcagaagatcagcaagcagcagctgcagaccgtgaaggacagattccaggccttcctgaacggcgagacccagatcatggccgacgaggccttcatgaacgccgtgcagagctactacgaggtgttcctgaagagcgacagagtggccagaatggtgcagagcggcggctgcagcgccaacgacagcagagaggtgttcaagaagcacatcgagaagagagtgagaagcctgcccgagatcgacggcctgagcaaggagaccgtgctgagcagctggatggccaagttcgacgccatctacagaggcgaggaggaccccagaaagcagcaggccagaatgaccgccagcgccgccagcgagctgatcctgagcaaggagcagctgtacgagatgttccagaacatcctgggcatcaagaagttcgagcaccagctgctgtacaacgcctgccagctggacaaccccgacgagcaggccgcccagatcagaagagagctggacggcagactgcagatggccgaccagatcgccagagagagaaagttccccaagttcgtgagcaaggagatggagaacatgtacatcgaggagctgaagagcagcgtgaacctgctgatggccaacctggagagcatgcccgtgagcaagggcggcgagttcaagctgcagaagctgaagagaagccacaacgccagcatcatcgacatgggcgaggagagcgagaaccagctgagcaagagcgacgtggtgctgagcttcagcctggaggtggtgatcatggaggtgcagggcctgaagagcctggcccccaacagaatcgtgtactgcaccatggaggtggagggcggcgagaagctgcagaccgaccaggccgaggccagcaagcccacctggggcacccagggcgacttcagcaccacccacgccctgcccgccgtgaaggtgaagctgttcaccgagagcaccggcgtgctggccctggaggacaaggagctgggcagagtgatcctgcaccccacccccaacagccccaagcagagcgagtggcacaagatgaccgtgagcaagaactgccccgaccaggacctgaagatcaagctggccgtgagaatggacaagccccagaacatgaagcacagcggctacctgtgggccatcggcaagaacgtgtggaagagatggaagaagagattcttcgtgctggtgcaggtgagccagtacaccttcgccatgtgcagctacagagagaagaaggccgagccccaggagctgctgcagctggacggctacaccgtggactacaccgacccccagcccggcctggagggcggcagagccttcttcaacgccgtgaaggagggcgacaccgtgatcttcgccagcgacgacgagcaggacagaatcctgtgggtgcaggccatgtacagagccaccggccagagccacaagcccgtgccccccacccaggtgcagaagctgaacgccaagggcggcaacgtgccccagctggacgcccccatcagccagttctacgccgacagagcccagaagcacggcatggacgagttcatcagcagcaacccctgcaacttcgaccacgccagcctgttcgagatggtgcagagactgaccctggaccacagactgaacgacagctacagctgcctgggctggttcagccccggccaggtgttcgtgctggacgagtactgcgccagaaacggcgtgagaggctgccacagacacctgtgctacctgagagacctgctggagagagccgagaacggcgccatgatcgaccccaccctgctgcactacagcttcgccttctgcgccagccacgtgcacggcaacagacccgacggcatcggcaccgtgaccgtggaggagaaggagagattcgaggagatcaaggagagactgagagtgctgctggagaaccagatcacccacttcagatactgcttccccttcggcagacccgagggcgccctgaaggccaccctgagcctgctggagagagtgctgatgaaggacatcgtgacccccgtgccccaggaggaggtgaagaccgtgatcagaaagtgcctggagcaggccgccctggtgaactacagcagactgagcgagtacgccaagatcgagggcaagaagagagagatgtacgagcaccccgtgttctgcctggccagccaggtgatggacctgaccatccagaacgtgggcagactgatcacccccgccaagaagctggaggacaccatcagactggccgagctggtgatcgaggtgctgcagcagaacgaggagcaccacgccgaggccttcgcctggtggagcgacctgatggtggagcacgccgagaccttcctgagcctgttcgccgtggacatggacgccgccctggaggtgcagccccccgacacctgggacagcttccccctgttccagctgctgaacgacttcctgagaaccgactacaacctgtgcaacggcaagttccacaagcacctgcaggacctgttcgcccccctggtggtgagatacgtggacctgatggagagcagcatcgcccagagcatccacagaggcttcgagagagagagctgggagcccgtgaacaacggcagcggcaccagcgaggacctgttctggaagctggacgccctgcagaccttcatcagagacctgcactggcccgaggaggagttcggcaagcacctggagcagagactgaagctgatggccagcgacatgatcgagagctgcgtgaagagaaccagaatcgccttcgaggtgaagctgcagaagaccagcagaagcaccgacttcagagtgccccagagcatctgcaccatgttcaacgtgatggtggacgccaaggcccagagcaccaagctgtgcagcatggagatgggccaggagcaccagtaccacagcaagatcgacgagctgatcgaggagaccgtgaaggagatgatcaccctgctggtggccaagttcgtgaccatcctggagggcgtgctggccaagctgagcagatacgacgagggcaccctgttcagcagcttcctgagcttcaccgtgaaggccgccagcaagtacgtggacgtgcccaagcccggcatggacgtggccgacgcctacgtgaccttcgtgagacacagccaggacgtgctgagagacaaggtgaacgaggagatgtacatcgagagactgttcgaccagtggtacaacagcagcatgaacgtgatctgcacctggctgaccgacagaatggacctgcagctgcacatctaccagctgaagaccctgatcagaatggtgaagaagacctacagagacttcagactgcagggcgtgctggacagcaccctgaacagcaagacctacgagaccatcagaaacagactgaccgtggaggaggccaccgccagcgtgagcgagggcggcggcctgcagggcatcagcatgaaggacagcgacgaggaggacgaggaggacgactag

SEQ ID NO: 258089 - protein, 1014 aa, Artificial Sequence
  derived and/or modified sequence
MFEDKPHAEGAAVVAAAGEALQALCQELNLDEGSAAEALDDFTAIRGNYSLEGEVTHWLACSLYVACRKSIIPTVGKGIMEGNCVSLTRILRSAKLSLIQFFSKMKKWMDMSNLPQEFRERIERLERNFEVSTVIFKKYEPIFLDIFQNPYEEPPKLPRSRKQRRIPCSVKDLFNFCWTLFVYTKGNFRMIGDDLVNSYHLLLCCLDLIFANAIMCPNRQDLLNPSFKGLPSDFHTADFTASEEPPCIIAVLCELHDGLLVEAKGIKEHYFKPYISKLFDRKILKGECLLDLSSFTDNSKAVNKEYEEYVLTVGDFDERIFLGADAEEEIGTPRKFTRDTPLGKLTAQANVEYNLQQHFEKKRSFAPSTPLTGRRYLREKEAVITPVASATQSVSRLQSIVAGLKNAPSDQLINIFESCVRNPVENIMKILKGIGETFCQHYTQSTDEQPGSHIDFAVNRLKLAEILYYKILETVMVQETRRLHGMDMSVLLEQDIFHRSLMACCLEIVLFAYSSPRTFPWIIEVLNLQPFYFYKVIEVVIRSEEGLSRDMVKHLNSIEEQILESLAWSHDSALWEALQVSANKVPTCEEVIFPNNFETGNGGNVQGHLPLMPMSPLMHPRVKEVRTDSGSLRRDMQPLSPISVHERYSSPTAGSAKRRLFGEDPPKEMLMDKIITEGTKLKIAPSSSITAENVSILPGQTLLTMATAPVTGTTGHKVTIPLHGVANDAGEITLIPLSMNTNQESKVKSPVSLTAHSLIGASPKQTNLTKAQEVHSTGINRPKRTGSLALFYRKVYHLASVRLRDLCLKLDVSNELRRKIWTCFEFTLVHCPDLMKDRHLDQLLLCAFYIMAKVTKEERTFQEIMKSYRNQPQANSHVYRSVLLKSIPREVVAYNKNINDDFEMIDCDLEDATKTPDCSSGPVKEERGDLIKFYNTIYVGRVKSFALKYDLANQDHMMDAPPLSPFPHIKQQPGSPRRISQQHSIYISPHKNGSGLTPRSALLYKFNGSPSKVR

SEQ ID NO: 258090 - DNA, 3045 bp, Artificial Sequence
  derived and/or modified sequence
atgttcgaggacaagccccacgccgagggcgccgccgtggtggccgccgccggcgaggccctgcaggccctgtgccaggagctgaacctggacgagggcagcgccgccgaggccctggacgacttcaccgccatcagaggcaactacagcctggagggcgaggtgacccactggctggcctgcagcctgtacgtggcctgcagaaagagcatcatccccaccgtgggcaagggcatcatggagggcaactgcgtgagcctgaccagaatcctgagaagcgccaagctgagcctgatccagttcttcagcaagatgaagaagtggatggacatgagcaacctgccccaggagttcagagagagaatcgagagactggagagaaacttcgaggtgagcaccgtgatcttcaagaagtacgagcccatcttcctggacatcttccagaacccctacgaggagccccccaagctgcccagaagcagaaagcagagaagaatcccctgcagcgtgaaggacctgttcaacttctgctggaccctgttcgtgtacaccaagggcaacttcagaatgatcggcgacgacctggtgaacagctaccacctgctgctgtgctgcctggacctgatcttcgccaacgccatcatgtgccccaacagacaggacctgctgaaccccagcttcaagggcctgcccagcgacttccacaccgccgacttcaccgccagcgaggagcccccctgcatcatcgccgtgctgtgcgagctgcacgacggcctgctggtggaggccaagggcatcaaggagcactacttcaagccctacatcagcaagctgttcgacagaaagatcctgaagggcgagtgcctgctggacctgagcagcttcaccgacaacagcaaggccgtgaacaaggagtacgaggagtacgtgctgaccgtgggcgacttcgacgagagaatcttcctgggcgccgacgccgaggaggagatcggcacccccagaaagttcaccagagacacccccctgggcaagctgaccgcccaggccaacgtggagtacaacctgcagcagcacttcgagaagaagagaagcttcgcccccagcacccccctgaccggcagaagatacctgagagagaaggaggccgtgatcacccccgtggccagcgccacccagagcgtgagcagactgcagagcatcgtggccggcctgaagaacgcccccagcgaccagctgatcaacatcttcgagagctgcgtgagaaaccccgtggagaacatcatgaagatcctgaagggcatcggcgagaccttctgccagcactacacccagagcaccgacgagcagcccggcagccacatcgacttcgccgtgaacagactgaagctggccgagatcctgtactacaagatcctggagaccgtgatggtgcaggagaccagaagactgcacggcatggacatgagcgtgctgctggagcaggacatcttccacagaagcctgatggcctgctgcctggagatcgtgctgttcgcctacagcagccccagaaccttcccctggatcatcgaggtgctgaacctgcagcccttctacttctacaaggtgatcgaggtggtgatcagaagcgaggagggcctgagcagagacatggtgaagcacctgaacagcatcgaggagcagatcctggagagcctggcctggagccacgacagcgccctgtgggaggccctgcaggtgagcgccaacaaggtgcccacctgcgaggaggtgatcttccccaacaacttcgagaccggcaacggcggcaacgtgcagggccacctgcccctgatgcccatgagccccctgatgcaccccagagtgaaggaggtgagaaccgacagcggcagcctgagaagagacatgcagcccctgagccccatcagcgtgcacgagagatacagcagccccaccgccggcagcgccaagagaagactgttcggcgaggacccccccaaggagatgctgatggacaagatcatcaccgagggcaccaagctgaagatcgcccccagcagcagcatcaccgccgagaacgtgagcatcctgcccggccagaccctgctgaccatggccaccgcccccgtgaccggcaccaccggccacaaggtgaccatccccctgcacggcgtggccaacgacgccggcgagatcaccctgatccccctgagcatgaacaccaaccaggagagcaaggtgaagagccccgtgagcctgaccgcccacagcctgatcggcgccagccccaagcagaccaacctgaccaaggcccaggaggtgcacagcaccggcatcaacagacccaagagaaccggcagcctggccctgttctacagaaaggtgtaccacctggccagcgtgagactgagagacctgtgcctgaagctggacgtgagcaacgagctgagaagaaagatctggacctgcttcgagttcaccctggtgcactgccccgacctgatgaaggacagacacctggaccagctgctgctgtgcgccttctacatcatggccaaggtgaccaaggaggagagaaccttccaggagatcatgaagagctacagaaaccagccccaggccaacagccacgtgtacagaagcgtgctgctgaagagcatccccagagaggtggtggcctacaacaagaacatcaacgacgacttcgagatgatcgactgcgacctggaggacgccaccaagacccccgactgcagcagcggccccgtgaaggaggagagaggcgacctgatcaagttctacaacaccatctacgtgggcagagtgaagagcttcgccctgaagtacgacctggccaaccaggaccacatgatggacgccccccccctgagccccttcccccacatcaagcagcagcccggcagccccagaagaatcagccagcagcacagcatctacatcagcccccacaagaacggcagcggcctgacccccagaagcgccctgctgtacaagttcaacggcagccccagcaaggtgagatag

SEQ ID NO: 258091 - DNA, 3045 bp, Artificial Sequence
  derived and/or modified sequence
atgtttgaagacaaacctcacgcagaaggtgcagccgtggttgccgccgcgggggaggctcttcaggcgctgtgccaagaattgaatctggacgaggggtcagcagcagaagccctggatgattttacagcaatacggggaaattattctttggaaggcgaagtcactcactggttagcttgttcgctgtatgtagcttgccgcaaatctatcatccccacagtggggaagggaatcatggagggcaactgtgtctcgctgactcggatcttgaggagcgcaaaattgagtctgatccagttttttagtaaaatgaaaaagtggatggatatgtctaatctgccgcaagaattcagagagcgcatagagcgcctagagcggaatttcgaggttagtaccgttatcttcaagaaatatgaaccgatctttttggatatctttcaaaatccttatgaggagcctcccaagctgcccagaagcaggaaacagcggcgcatcccctgcagtgtgaaagatctgtttaatttttgctggaccctgttcgtctacacaaagggaaattttcggatgataggagatgatctcgtgaacagttaccacctcctgctctgctgtttggacctcatcttcgcaaatgcaattatgtgccctaacagacaggatctgttgaatccgagcttcaagggactccctagtgacttccatacagccgacttcactgcatccgaagagcctccttgtatcatcgcggtgctctgcgagctgcatgacggccttttggttgaggccaagggaataaaggaacattacttcaagccatatattagcaaactgttcgatagaaaaattcttaagggcgagtgccttctagacttatccagctttacggataactctaaagcggtcaataaggagtatgaagagtatgtactgacagtaggtgatttcgacgaacggatatttctgggagcggatgctgaggaagagattgggactcccaggaagttcacgcgtgacacgccgctcggaaagctgacagcccaggcgaatgtggagtataatttacagcagcacttcgagaagaagagatcattcgcgccatcgaccccactgactgggaggcgatatctgagggagaaagaggccgtcataacaccagtggcctccgccactcagtctgtctcccgattgcagtctatcgtggctggtttgaaaaatgccccatctgatcagctgataaacattttcgaatcttgcgtgcgtaaccctgttgagaacatcatgaaaatactgaaagggatcggagaaacattctgccaacactacacccagagcaccgacgaacagcctggctcacacatcgatttcgcagtgaacagacttaagctggccgaaatactgtactacaagatactggagaccgtgatggttcaagagacccgacgtcttcacgggatggatatgtcagtgctgctggaacaggatatttttcatcgcagcttgatggcctgttgtctagagatcgtgctgttcgcttactcatctcccaggaccttcccctggattattgaagttttaaatctacaaccattctacttctacaaggtcattgaggttgtgattcgcagcgaagaaggcctgtctagagatatggtcaagcatcttaactctattgaggagcaaattttggaaagtctggcatggtcgcacgacagcgcgctttgggaagccctgcaggtgtctgccaataaagtgcctacttgcgaagaagtcatctttcctaacaactttgaaacaggcaatggcggaaacgtgcagggtcacctgcctctgatgccgatgagtccacttatgcaccccagagtgaaggaggtgagaaccgattctggatcacttagacgtgacatgcagccactgtcccctataagtgttcacgaaagatatagtagccctacagctggcagcgccaagcgtcggctgttcggcgaagaccccccaaaggaaatgttgatggataaaattattactgaaggcacaaagctcaaaatagccccatcaagctcgataaccgcagagaatgtgtctatccttcctggacaaacccttctgactatggccaccgctcctgtcacaggcacaactggacacaaagttacgattcctctgcatggcgtggccaatgacgcaggagagattacactaatacctctctcaatgaatactaatcaggaatcgaaagtcaagagcccggtctcacttacagcacacagcttgatcggagcctctcctaagcagacaaatctcacaaaggcccaggaggtgcatagcacaggtatcaaccgtccgaaaaggacaggctctcttgccctcttctacaggaaagtctaccatttggcaagcgtgcgactgcgagatctgtgcctgaagttggacgtgtcaaacgagttgcggagaaagatttggacctgtttcgaattcactctcgttcattgtcctgacctaatgaaggatagacacctggatcagctgcttctctgcgccttctatatcatggctaaggttaccaaggaggagcggaccttccaagagattatgaaaagttataggaaccagcctcaggctaattcccatgtgtacaggagtgtccttcttaaatcaatcccccgagaagtggttgcctataacaaaaatatcaacgacgatttcgagatgattgactgtgatctggaggatgctaccaagaccccagactgttcgtccgggccagtgaaggaagaacgcggagacctgattaagttttacaacaccatatacgtaggtcgcgtgaagagctttgctttaaagtacgacttggcgaatcaggaccacatgatggacgctccccctttgagcccttttccacatattaaacagcaacccgggtctccgaggcggatctctcagcagcactccatctacatttcaccccacaaaaatgggtccggtttaaccccacggtccgccctgctgtacaaattcaatgggtccccatcgaaagtgcggtag

SEQ ID NO: 258092 - DNA, 3045 bp, Artificial Sequence
  derived and/or modified sequence
atgtttgaggacaagccccacgccgagggcgctgctgtggtggccgctgctggggaggccctgcaggccctgtgccaggagctgaacctggatgagggcagcgctgctgaggccctggatgacttcaccgccatccggggcaactacagcctggagggggaggtgacccactggctggcctgcagcctgtatgtggcctgcaggaagagcatcatccccaccgtgggcaagggcatcatggagggcaactgtgtgtccctgacccgcatcctgcggagcgccaagctgagcctcatccagttcttcagcaagatgaagaagtggatggacatgagcaacctgccccaggagttccgggagcgcatcgagcggctggagaggaactttgaggtgtccaccgtcatcttcaagaagtatgagcccatcttcctggacatcttccagaacccctatgaggagccccccaagctgcccaggagcaggaagcagaggcgcatcccctgcagcgtgaaggacctcttcaacttctgctggaccctgtttgtgtacaccaagggcaacttcaggatgattggagatgacctggtgaacagctaccacctgctgctgtgctgcctggacctgatctttgccaatgccatcatgtgccccaaccggcaggacctgctgaaccccagcttcaagggcctgcccagcgacttccacacagctgacttcaccgccagcgaggagcccccctgcatcatcgctgtgctgtgtgagctgcatgatggcctgctggtggaggccaagggcatcaaggagcactacttcaagccctacatcagcaagctgtttgacaggaagatcctgaagggagaatgtctgctggacctgagcagcttcacagacaacagcaaggctgtgaacaaggagtatgaggagtatgtgctgactgtgggggactttgatgagcgcatcttcctgggcgcagatgctgaggaggagatcggcacccccaggaagttcacccgggacacccccctgggcaagctgacagcccaggccaacgtggagtacaacctgcagcagcactttgagaagaagaggagctttgcccccagcacccccctgaccggccgccgctacctgcgggagaaggaggccgtcatcacccctgtggccagcgccacccagagcgtgtcccggctgcagagcatcgtggccggcctgaagaatgcccccagcgaccagctgatcaacatctttgagagctgtgtgagaaatcctgtggagaacatcatgaagatcctgaagggcatcggggagaccttctgccagcactacacccagagcacagatgagcagcccggcagccacatcgactttgctgtgaaccggctgaagctggccgagatcctgtactacaagatcctggagaccgtgatggtgcaggagacccggcggctgcacggcatggacatgtctgtgctgctggagcaggacatcttccacaggagcctgatggcctgctgcctggagatcgtgctgtttgcctacagcagccccaggaccttcccctggatcatcgaggtgctgaacctgcagcccttctacttctacaaggtgattgaggtggtgatccgctctgaggagggcctgagccgggacatggtgaagcacctgaacagcattgaggagcagatcctggagagcctggcctggagccatgacagcgccctgtgggaggccctgcaggtgtctgccaacaaggtgcccacctgtgaggaggtgatcttccccaacaactttgaaacaggaaatggaggaaatgtgcagggccacctgcccctgatgcccatgagccccctgatgcacccccgggtgaaggaggtgaggacagattctggcagcctgcggcgggacatgcagcccctgagccccatctctgtgcatgagcgctacagcagccccacagctggcagcgccaagaggcggctgtttggagaagatcctcccaaggagatgctgatggacaagatcatcacagagggcaccaagctgaagatcgcccccagcagcagcatcacagcagaaaatgtgtccatcctgcccggccagaccctgctgaccatggccacagcccctgtgacaggcaccaccggccacaaggtgaccatccccctgcatggagtggccaatgatgctggggagatcaccctcatccccctgtccatgaacaccaaccaggagagcaaggtgaagagccctgtgtccctgacagcccacagcctgattggagccagccccaagcagaccaacctgaccaaggcccaggaggtgcacagcacaggcatcaaccggcccaagaggacaggcagcctggccctcttctacaggaaggtgtaccacctggcctctgtgcggctgcgggacctgtgcctgaagctggatgtgtccaatgagctgcggaggaagatctggacctgctttgagttcaccctggtgcactgcccagacctgatgaaggacagacacctggaccagctgctgctgtgtgccttctacatcatggccaaggtgaccaaggaggagaggaccttccaggagatcatgaagagctacagaaaccagccccaggccaacagccacgtgtacagatctgtgctgctgaagagcatcccccgggaggtggtggcctacaacaagaacatcaatgatgactttgagatgattgactgtgacctggaggatgccaccaagaccccagactgcagcagcggccctgtgaaggaggagcggggggacctgatcaagttctacaacaccatctacgtgggccgggtgaagagctttgccctgaagtatgacctggccaaccaggaccacatgatggatgccccacccctgagccccttcccccacatcaagcagcagcccggcagcccccggcgcatcagccagcagcacagcatctacatcagcccccacaagaatggcagcggcctgacccccaggtctgccctgctgtacaagttcaacggcagccccagcaaggtgaggtag

SEQ ID NO: 258093 - DNA, 3045 bp, Artificial Sequence
  derived and/or modified sequence
atgttcgaggacaagccccacgccgagggcgccgccgtggtggccgccgcaggcgaggccttgcaggccctgtgtcaggagctgaacttggatgaaggtagcgctgcggaggccctggatgattttaccgccattaggggaaattactctttggagggagaggttactcactggcttgcttgttccctgtacgtggcctgtagaaagagcataatccccaccgtgggcaaggggataatggaaggtaattgtgtctctttgacacgcatcctccgcagcgcgaagctttccctcatccagtttttctccaaaatgaagaaatggatggatatgtccaatctgcctcaagagtttagagaacggatcgagagacttgagcgaaactttgaggtgtcgacagtgatcttcaagaagtacgagcccatctttctcgacatatttcaaaacccttacgaggagcctcctaagctgcctaggtctcgcaagcaacggcgcattccctgttcagtgaaagatctgttcaatttttgttggacgctgttcgtctacactaagggaaactttcgcatgataggagacgacttggtcaattcatatcacctgctcctatgttgtctggacctcatctttgcgaatgccattatgtgcccgaatcgacaagatctactgaacccttcttttaaaggattgccctccgatttccatacggctgactttaccgctagcgaagagccgccatgcatcattgctgtgctgtgtgagctgcatgatgggcttctcgtcgaggctaaaggtatcaaagagcactattttaagccctatatctctaaactgttcgatcgcaagattctgaaaggcgagtgccttttagacctctcatcttttactgacaacagcaaggcagtcaacaaggagtatgaagaatatgtcctgacggtcggggactttgacgagcgcatctttttgggtgcagacgccgaagaggaaatcggtaccccgaggaaatttaccagagacacgcctcttggcaagttaacagctcaggcgaacgtggaatacaatctgcaacagcactttgaaaagaagagaagttttgcaccctcaactccactaactgggcgccgatatttgcgagaaaaagaagcagtgataaccccggtggcgtctgctactcagtccgtgagcagactgcaaagcatcgttgcagggttaaagaatgcaccatccgatcaactgattaacatttttgagtcctgcgtacgcaacccagtcgagaatattatgaagattctgaagggcatcggagagacgttctgtcaacattatactcagagtactgatgaacagccggggagccacatagacttcgccgtcaacagattaaagctggcggaaatcctatactacaagatcctggaaaccgtgatggtgcaagaaaccagaagactccacggtatggacatgagtgtgctactcgaacaggacatttttcacagatcactgatggcttgctgccttgagatagtcctgttcgcctatagtagtcctcgtaccttcccttggatcatcgaggtgttgaatctgcagcccttttatttctacaaagtcattgaagtggtaatcaggagtgaggaaggacttagccgcgacatggtgaaacacctgaactcaatcgaggaacagatcttagaatcactggcgtggagccatgattccgccttgtgggaagctctgcaggtcagcgccaataaggttccaacttgcgaggaagtcattttccctaacaactttgagacagggaacggcggaaatgtccagggacacctcccattgatgccaatgtctcctctgatgcatcccagggtgaaagaggtccggacagactctggcagtctgagacgggacatgcagccactatcgccaatcagcgtacatgagaggtacagctcgccaaccgctggaagcgccaagaggaggctgttcggggaggatccacctaaagagatgctgatggacaaaatcatcacggagggcacaaagctaaagatcgccccctcaagctcgatcacagcagagaatgtgtctatcctcccaggacaaacacttttgaccatggccacagccccagtaaccggaactacaggacataaggtgaccataccactgcatggggtggcaaatgacgccggtgagataacgctgatccctctgagcatgaataccaatcaggaaagcaaggtaaagagcccagtgtccctgactgcccatagcctcatcggtgcctcccctaaacagactaatctcaccaaggcccaggaggtccattcaacaggcatcaatcggccaaagaggacagggtcgttggcattgttttatagaaaggtataccatttagccagcgttcgactcagagacctctgtctcaagctcgatgtaagtaacgagcttcggaggaagatctggacttgcttcgagttcacactcgttcactgccccgaccttatgaaggacaggcatctggaccagctgctattatgtgcattttatatcatggccaaagtaaccaaagaggagagaacatttcaggagattatgaagtcctaccgtaaccagccacaggcgaattcacatgtttatcgttctgtgttgctgaagagcattccgagggaagtcgtggcatataacaagaacattaatgacgacttcgagatgattgattgcgaccttgaagacgctacaaagaccccagactgtagctcggggccagtgaaggaggagcgtggagacctgattaaattttataacacaatttatgtgggtagggtcaaaagttttgctcttaagtacgacctggccaaccaggatcatatgatggacgccccaccactgtcccctttcccccatatcaaacagcagccaggcagtcccaggcgcatcagtcagcagcacagtatttacatttctccccacaagaatggaagcgggctaacacctaggagcgcgctgctatataaattcaacggaagcccctccaaagttcggtag

SEQ ID NO: 258094 - DNA, 3045 bp, Artificial Sequence
  derived and/or modified sequence
atgtttgaagataaaccccacgccgagggggcagctgtagtggcggctgctggcgaggccctccaggctttatgccaagaacttaatctagacgagggatcagcagcagaagctctggatgactttacagccattcggggaaattatagcctggaaggcgaagtgactcactggctggcttgttccctgtatgtagcctgccgtaaatccatcataccaaccgtcggtaaaggaattatggaggggaactgcgtatctctgacccgcattctgagatcagcgaaactgtctctcatccagttcttctctaagatgaagaagtggatggatatgagcaatttgccccaggaatttagggaaagaatcgaaagactcgaaaggaacttcgaggtgtcaactgtgatattcaagaagtatgaaccaatctttttggatatcttccagaatccctatgaggaacccccaaaattgccaagatctcgcaagcagcgcaggatcccttgcagcgtgaaagacctttttaacttttgttggacactgttcgtgtataccaagggaaattttagaatgattggggacgacctggtgaacagctaccacctcctcctctgctgtttggacctaatattcgccaacgctattatgtgccccaaccgccaggacctgctgaatccctcgttcaagggacttccgagcgatttccacacagcagactttaccgctagtgaagagcctccgtgtatcattgctgtgctatgcgaactgcatgatggtctgttagtggaggctaagggtattaaggaacattatttcaagccatatatcagcaagctatttgaccgcaaaatcctaaaaggggagtgccttctagacctatctagctttaccgacaactctaaggcggtcaataaagagtacgaagaatatgtgctgacggtgggagacttcgatgagaggatcttcctcggcgctgacgccgaggaagaaatcggcacccccagaaagttcacccgagataccccgctcgggaagctaactgcccaggcaaacgtcgaatacaatctccagcagcactttgaaaaaaaacggagtttcgcaccctctacccctttgactggacggcgatacttgcgagaaaaggaagctgtcattacgccagttgcgtccgcaacacagagcgtctcccgccttcagtccattgtcgcgggattgaagaacgccccatccgaccaactgatcaatatttttgagtcttgtgtgagaaatcccgttgagaacataatgaagatactgaaaggcatcggagagacattctgtcagcactacacacagtctactgatgagcagccgggaagccacattgatttcgctgtcaatcgcctgaagttagctgagatcctgtactacaaaatactcgaaaccgttatggtgcaggaaactagaagattacacggaatggatatgagcgtcctactcgagcaggatattttccacagaagcttaatggcgtgttgtcttgaaatcgtattattcgcctattcctctcctagaacttttccatggatcattgaggtccttaatttgcagcccttttatttctacaaggtgatagaggtggtaattcgcagcgaagaaggcctgtcacgggatatggtgaagcacctaaatagcatcgaggagcagatcctcgaaagccttgcttggtcgcacgatagtgccctatgggaggctctccaagtaagcgcaaacaaggttccaacgtgtgaggaggtcatattccccaacaacttcgaaactggcaacgggggtaacgtgcagggccacctgcctttaatgcccatgtcccctctgatgcacccacgcgtgaaggaggtcaggaccgacagcggttccctgcgccgtgacatgcagcccttgagcccaattagtgtgcacgaacggtattcgtcaccgactgccggaagtgcaaagaggcgactgtttggagaggaccctcccaaggagatgctgatggacaaaataatcactgaagggaccaagctcaaaattgcaccctcaagctccatcactgcggagaatgtgtccattctccctggacagacactgctcactatggccacagccccagttacaggcactaccgggcataaagtgaccatcccactacacggagttgcgaatgacgccggagaaatcacccttatcccgctgagcatgaacactaaccaggaaagtaaggtcaaatctcccgttagcctcactgctcacagcctgataggggcatctccaaagcagaccaatctgactaaagcacaggaagtacactccactgggatcaaccgtccaaagcgtactgggagtcttgccctgttttaccggaaagtttaccatctggcaagcgtgcgtctgcgagacctgtgtctaaaactggacgtcagcaacgagctacggaggaagatctggacctgctttgagtttaccctcgtacactgtcccgatttaatgaaagatcgacacctggaccagctcctgctgtgcgccttctatatcatggccaaagtcactaaggaggagaggacatttcaggagattatgaaaagctatagaaatcagccacaggctaattcccacgtgtaccgatctgtgctgctgaagtcaatccctcgcgaagtggttgcatacaacaaaaatatcaatgacgatttcgagatgatcgattgcgatctagaggatgccaccaaaacccctgactgctcctcagggcctgtaaaagaagagagaggggacttaatcaagttttacaacacaatctatgttggacgcgtgaaatcatttgctttaaagtacgacctggcgaatcaagatcatatgatggacgcacctcctctgtcaccatttccacatataaagcagcagcctggttcccctcgtaggatctcccaacagcattcgatctacatcagtcctcataaaaatggcagtggcctcacaccccgttctgccctcctatacaagttcaatggatctccttcaaaagttcgctag

SEQ ID NO: 258095 - DNA, 3225 bp, Artificial Sequence
  derived and/or modified sequence
cgcgcctgggagggagaaagaagtcgggggccgtggcgcgcagcccgcggggcctgaagggatgttcgaggacaagccccacgctgagggggcggcggtggtcgccgcagccggggaggcgctacaggccctgtgccaggagctgaacctggacgaggggagcgcggccgaagccctggacgactttactgccatccgaggcaactacagcctagagggagaagttacacactggttggcatgttcattatatgttgcatgccgcaaaagcattattcccacggttggaaagggtatcatggaaggcaactgtgtttcacttaccagaatactacgttcagctaaattaagtttaatacaattttttagtaaaatgaagaaatggatggacatgtcaaatctaccacaagaatttcgtgaacgtatagaaaggctagagagaaattttgaggtgtctactgtaatattcaaaaaatatgagccaatttttttagatatatttcaaaatccatatgaagaaccaccaaagttaccacgaagccggaagcagaggaggattccttgcagtgttaaggatctgtttaatttctgttggacactttttgtttatactaagggtaattttcggatgattggggatgacttagtaaactcttatcatttacttctatgctgcttggatctgatttttgccaatgcgattatgtgcccaaatagacaagacttgctaaatccatcatttaaaggtttaccatctgattttcatactgctgactttacggcttctgaagagccaccctgcatcattgctgtactgtgtgaactgcatgatggacttctcgtagaagcaaaaggaataaaggagcactactttaagccatatatttcaaaactctttgacaggaagatattaaaaggagaatgcctcctggacctttcaagttttactgataatagcaaagcagtgaataaggagtatgaagagtatgttctaactgttggtgattttgatgagaggatctttttgggagcagacgcagaagaggaaattggaacacctcgaaagttcactcgtgacaccccattagggaaactgacagcacaggctaatgtggagtataaccttcaacagcactttgaaaaaaaaaggtcatttgcaccttctaccccactgaccggacggagatatttacgagaaaaagaagcagtcattactcctgttgcatcagccacccaaagtgtgagccggttacagagtattgtggctggtctgaaaaatgcaccaagtgaccaacttataaatatttttgaatcttgtgtgcgtaatcctgtggaaaacattatgaaaatactaaaaggaataggagagactttctgtcaacactatactcaatcaacagatgaacagccaggatctcacatagactttgctgtaaacagactaaagctggcagaaattttgtattataaaatactagagactgtaatggttcaggaaacacgaagacttcatggaatggacatgtcagttcttttagagcaagatatatttcatcgttccttgatggcttgttgtttggaaattgtgctctttgcctatagctcacctcgtacttttccttggattattgaagttctcaacttgcaaccattttacttttataaggttattgaggtggtgatccgctcagaagaggggctctcaagggacatggtgaaacacctaaacagcattgaagaacagattttggagagtttagcatggagtcacgattctgcactgtgggaggctctccaggtttctgcaaacaaagttcctacctgtgaagaagttatattcccaaataactttgaaacaggaaatggaggaaatgtgcagggacatcttcccctgatgccaatgtctcctctaatgcacccaagagtcaaggaagttcgaactgacagtgggagtcttcgaagagatatgcaaccattgtctccaatttctgtccatgaacgctacagttctcctaccgcagggagtgctaagagaagactctttggagaggaccccccaaaggaaatgcttatggacaagatcataacagaaggaacaaaattgaaaatcgctccttcttcaagcattactgctgaaaatgtatcaattttacctggtcaaactcttctaacaatggccacagccccagtaacaggaacaacaggacataaagttacaattccattacatggtgtcgcaaatgatgctggagagatcacactgatacctctttccatgaatacaaatcaggagtccaaagtcaagagtcctgtatcacttactgctcattcattaattggtgcttctccaaaacagaccaatctgactaaagcacaagaggtacattcaactggaataaacaggccaaagagaactgggtccttagcactattttacagaaaggtctatcatttggcaagtgtacgcttacgtgatctatgtctaaaactggatgtttcaaatgagttacgaaggaagatatggacgtgttttgaattcactttagttcactgtcctgatctaatgaaagacaggcatttggatcagctcctcctttgtgccttttatatcatggcaaaggtaacaaaagaagaaagaacttttcaagaaattatgaaaagttataggaatcagccccaagctaatagtcacgtatatagaagtgttctgctgaaaagtattccaagagaagttgtggcatataataaaaatataaatgatgactttgaaatgatagattgtgacttagaagatgctacaaaaacacctgactgttccagtggaccagtgaaagaggaaagaggtgatcttataaaattttacaatacaatatatgtaggaagagtgaagtcatttgcactgaaatacgacttggcgaatcaggaccatatgatggatgctccaccactctctccttttccacatattaaacaacagccaggctcaccacgccgcatttcccagcagcactccatttatatttccccgcacaagaatgggtcaggccttacaccaagaagcgctctgctgtacaagttcaatggcagcccttctaaggtaaggtgaataggctaaaagttggatttcagattaacagtcagtaactgttaatcctgcctctttttttttttttcttttttggccaagttactactatactaataaaatatgaaatgttaactatg

SEQ ID NO: 258096 - protein, 1073 aa, Artificial Sequence
  derived and/or modified sequence
MHQPPESTAAAAAAADISARKMAHPAMFPRRGSGSGSASALNAAGTGVGSNATSSEDFPPPSLLQPPPPAASSTSGPQPPPPQSLNLLSQAQLQAQPLAPGGTQMKKKSGFQITSVTPAQISASISSNNSIAEDTESYDDLDESHTEDLSSSEILDVSLSRATDLGEPERSSSEETLNNFQEAETPGAVSPNQPHLPQPHLPHLPQQNVVINGNAHPHHLHHHHQIHHGHHLQHGHHHPSHVAVASASITGGPPSSPVSRKLSTTGSSDSITPVAPTSAVSSSGSPASVMTNMRAPSTTGGIGINSVTGTSTVNNVNITAVGSFNPNVTSSMLGNVNISTSNIPSAAGVSVGPGVTSGVNVNILSGMGNGTISSSAAVSSVPNAAAGMTGGSVSSQQQQPTVNTSRFRVVKLDSSSEPFKKGRWTCTEFYEKENAVPATEGVLINKVVETVKQNPIEVTSERESTSGSSVSSSVSTLSHYTESVGSGEMGAPTVVVQQQQQQQQQQQQQPALQGVTLQQMDFGSTGPQSIPAVSIPQSISQSQISQVQLQSQELSYQQKQGLQPVPLQATMSAATGIQPSPVNVVGVTSALGQQPSISSLAQPQLPYSQAAPPVQTPLPGAPPPQQLQYGQQQPMVSTQMAPGHVKSVTQNPASEYVQQQPILQTAMSSGQPSSAGVGAGTTVIPVAQPQGIQLPVQPTAVPAQPAGASVQPVGQAPAAVSAVPTGSQIANIGQQANIPTAVQQPSTQVPPSVIQQGAPPSSQVVPPAQTGIIHQGVQTSAPSLPQQLVIASQSSLLTVPPQPQGVEPVAQGIVSQQLPAVSSLPSASSISVTSQVSSTGPSGMPSAPTNLVPPQNIAQTPATQNGNLVQSVSQPPLIATNTNLPLAQQIPLSSTQFSAQSLAQAIGSQIEDARRAAEPSLVGLPQTISGDSGGMSAVSDGSSSSLAASASLFPLKVLPLTTPLVDGEDESSSGASVVAIDNKIEQAMDLVKSHLMYAVREEVEVLKEQIKELIEKNSQLEQENNLLKTLASPEQLAQFQAQLQTGSPPATTQPQGTTQPPAQPASQGSGPTA

SEQ ID NO: 258097 - DNA, 3222 bp, Artificial Sequence
  derived and/or modified sequence
atgcaccagccccccgagagcaccgccgccgccgccgccgccgccgacatcagcgccagaaagatggcccaccccgccatgttccccagaagaggcagcggcagcggcagcgccagcgccctgaacgccgccggcaccggcgtgggcagcaacgccaccagcagcgaggacttccccccccccagcctgctgcagccccccccccccgccgccagcagcaccagcggcccccagcccccccccccccagagcctgaacctgctgagccaggcccagctgcaggcccagcccctggcccccggcggcacccagatgaagaagaagagcggcttccagatcaccagcgtgacccccgcccagatcagcgccagcatcagcagcaacaacagcatcgccgaggacaccgagagctacgacgacctggacgagagccacaccgaggacctgagcagcagcgagatcctggacgtgagcctgagcagagccaccgacctgggcgagcccgagagaagcagcagcgaggagaccctgaacaacttccaggaggccgagacccccggcgccgtgagccccaaccagccccacctgccccagccccacctgccccacctgccccagcagaacgtggtgatcaacggcaacgcccacccccaccacctgcaccaccaccaccagatccaccacggccaccacctgcagcacggccaccaccaccccagccacgtggccgtggccagcgccagcatcaccggcggcccccccagcagccccgtgagcagaaagctgagcaccaccggcagcagcgacagcatcacccccgtggcccccaccagcgccgtgagcagcagcggcagccccgccagcgtgatgaccaacatgagagcccccagcaccaccggcggcatcggcatcaacagcgtgaccggcaccagcaccgtgaacaacgtgaacatcaccgccgtgggcagcttcaaccccaacgtgaccagcagcatgctgggcaacgtgaacatcagcaccagcaacatccccagcgccgccggcgtgagcgtgggccccggcgtgaccagcggcgtgaacgtgaacatcctgagcggcatgggcaacggcaccatcagcagcagcgccgccgtgagcagcgtgcccaacgccgccgccggcatgaccggcggcagcgtgagcagccagcagcagcagcccaccgtgaacaccagcagattcagagtggtgaagctggacagcagcagcgagcccttcaagaagggcagatggacctgcaccgagttctacgagaaggagaacgccgtgcccgccaccgagggcgtgctgatcaacaaggtggtggagaccgtgaagcagaaccccatcgaggtgaccagcgagagagagagcaccagcggcagcagcgtgagcagcagcgtgagcaccctgagccactacaccgagagcgtgggcagcggcgagatgggcgcccccaccgtggtggtgcagcagcagcagcagcagcagcagcagcagcagcagcagcccgccctgcagggcgtgaccctgcagcagatggacttcggcagcaccggcccccagagcatccccgccgtgagcatcccccagagcatcagccagagccagatcagccaggtgcagctgcagagccaggagctgagctaccagcagaagcagggcctgcagcccgtgcccctgcaggccaccatgagcgccgccaccggcatccagcccagccccgtgaacgtggtgggcgtgaccagcgccctgggccagcagcccagcatcagcagcctggcccagccccagctgccctacagccaggccgccccccccgtgcagacccccctgcccggcgccccccccccccagcagctgcagtacggccagcagcagcccatggtgagcacccagatggcccccggccacgtgaagagcgtgacccagaaccccgccagcgagtacgtgcagcagcagcccatcctgcagaccgccatgagcagcggccagcccagcagcgccggcgtgggcgccggcaccaccgtgatccccgtggcccagccccagggcatccagctgcccgtgcagcccaccgccgtgcccgcccagcccgccggcgccagcgtgcagcccgtgggccaggcccccgccgccgtgagcgccgtgcccaccggcagccagatcgccaacatcggccagcaggccaacatccccaccgccgtgcagcagcccagcacccaggtgccccccagcgtgatccagcagggcgccccccccagcagccaggtggtgccccccgcccagaccggcatcatccaccagggcgtgcagaccagcgcccccagcctgccccagcagctggtgatcgccagccagagcagcctgctgaccgtgcccccccagccccagggcgtggagcccgtggcccagggcatcgtgagccagcagctgcccgccgtgagcagcctgcccagcgccagcagcatcagcgtgaccagccaggtgagcagcaccggccccagcggcatgcccagcgcccccaccaacctggtgcccccccagaacatcgcccagacccccgccacccagaacggcaacctggtgcagagcgtgagccagccccccctgatcgccaccaacaccaacctgcccctggcccagcagatccccctgagcagcacccagttcagcgcccagagcctggcccaggccatcggcagccagatcgaggacgccagaagagccgccgagcccagcctggtgggcctgccccagaccatcagcggcgacagcggcggcatgagcgccgtgagcgacggcagcagcagcagcctggccgccagcgccagcctgttccccctgaaggtgctgcccctgaccacccccctggtggacggcgaggacgagagcagcagcggcgccagcgtggtggccatcgacaacaagatcgagcaggccatggacctggtgaagagccacctgatgtacgccgtgagagaggaggtggaggtgctgaaggagcagatcaaggagctgatcgagaagaacagccagctggagcaggagaacaacctgctgaagaccctggccagccccgagcagctggcccagttccaggcccagctgcagaccggcagcccccccgccaccacccagccccagggcaccacccagccccccgcccagcccgccagccagggcagcggccccaccgcctag

SEQ ID NO: 258098 - DNA, 3222 bp, Artificial Sequence
  derived and/or modified sequence
atgcaccagccgcctgagtctaccgctgctgccgccgctgccgcggacatttccgcccggaaaatggctcaccccgccatgtttcctcgcagaggaagtggaagtggaagcgcctccgctctgaacgccgccggtaccggggtggggagcaacgcaacatcttcagaagatttccccccaccatcactgttacagcccccgccccctgcggctagctctaccagtggtccccagccgccacctccacagagcttaaatctgctgtctcaggcccagctgcaagcgcagccactcgctcccgggggcacccagatgaagaagaagtccgggttccaaataacgtccgtgacaccggcccagatctccgccagtatctccagtaataatagcatcgcagaggatacggaatcctacgacgacctcgatgagagccatacggaagatctgtcatcttcggagatactggatgtgtcgctatcaagggccaccgacttgggcgagcccgaacggagctcctctgaggaaacacttaacaactttcaggaggccgagactccaggcgcagtctcaccaaaccagccacatctcccgcagccacatcttccccacctgccccagcagaacgtggtgatcaatggaaatgcacatcctcaccatctccatcaccaccaccagattcatcacggacaccaccttcagcatggccaccaccacccctctcatgttgccgtggctagtgcatctattactgggggccccccttcaagtcctgttagcagaaagctcagtaccaccggatccagcgattctatcacccccgtggctccaacgtccgcggtttcgagcagtggaagcccagcatccgtgatgactaatatgagggccccttcaacaaccggagggatcggaattaacagtgttacagggacctccactgttaataatgtcaatattacggcagttggttctttcaaccccaatgtgacatcctccatgcttggtaacgtcaacatttctacatccaacatcccatccgcagcaggcgtcagcgtgggtcctggagtgacctctggcgtaaatgtgaatattctcagcgggatgggcaatggcaccatttcgtcaagtgctgccgtgagctccgtaccaaatgctgcagctgggatgacaggcgggagtgtgtcttcccaacagcaacagccaaccgtcaatactagccggttcagagtcgtcaagttggactcgagctcagaacctttcaagaagggtagatggacctgtactgagttctacgagaaagagaacgctgtgccagctaccgaaggggtgctaattaataaggttgtggaaactgtgaaacagaaccctatcgaagttactagcgagcgggagtcgacctccggaagcagcgtcagcagtagtgtaagtaccctttcacattataccgagagcgttggaagcggagagatgggagctcccaccgtggtcgtccagcaacagcagcagcagcagcagcagcaacagcagcaaccggccttacaaggagttaccctccagcaaatggattttggatcaacaggtcctcagagcattcccgcagtctcaatcccccaaagcatttcccagtcacagatttcacaggtccagctgcaatcccaagagcttagctatcaacagaagcaggggcttcaacccgtgcccctgcaggctacaatgagcgcagccaccgggatccaacccagccccgttaacgttgtgggagtgaccagcgcacttggccagcagccttcaatcagctctctcgcgcagccgcagctgccctattcacaggccgcccctccagtgcaaactccgctgccaggggcacctccaccacagcagttacagtatggtcagcagcagcccatggtgagcacccaaatggcccctgggcatgtcaagagcgttacccagaacccagcttctgagtatgttcaacagcagcctatactacagacagccatgtcaagcgggcagccctctagcgcaggagtgggagccgggactacagtgatccctgtcgcccagccccagggtatccagctgccagtgcaacccactgccgtccctgcgcaacctgctggagcgagcgtacaaccagtgggccaggcacctgctgcagtgtccgcagtccccaccgggagtcaaattgctaatataggccaacaggccaacatacctactgccgtgcagcagccttccacacaagttcctccctccgtgatacagcagggggctcccccctcatctcaagttgtaccacctgctcagacaggaatcatccatcagggtgtgcagacaagcgcccctagtcttccccaacagctggtgatcgcaagtcagagcagcctgctgaccgttcctcctcagccccagggagttgaaccagtggcacaaggcattgtcagtcagcaacttccagctgtgtcatctctcccaagtgcctcctccatttccgtgaccagccaggtctcctccaccgggccctcgggcatgccgagcgctcccacaaaccttgtccccccccagaacatcgcgcaaaccccggcaactcagaacgggaatctggtgcagtccgtgagccaacccccccttatcgccactaatactaacttgcctctcgcccagcaaataccactgagttcaacacagttcagtgctcagagcctggctcaggcaattggctcccagatcgaagatgcccggcgcgccgctgagcccagtctcgtggggttgcctcagacaattagtggagacagcggcggtatgagcgcggtgtccgatggctccagctccagtttggcagcatccgcctccctctttccgctaaaggtgctaccactcactacccctctcgtcgatggagaggacgagtcttccagcggggcgtccgtcgtagccatcgacaataaaatcgaacaggccatggatcttgtcaagtctcatctgatgtacgccgtgcgcgaggaggtcgaagtcctcaaggaacagatcaaggaactgatcgagaagaattcacagcttgaacaggaaaacaacctgctcaagactttggcttcacccgaacagctggctcagttccaggcccagcttcaaaccggaagcccacccgccactacgcagcctcagggcacgacacagcctcccgctcagccagcctctcagggaagtggcccaacagcatag

SEQ ID NO: 258099 - DNA, 3222 bp, Artificial Sequence
  derived and/or modified sequence
atgcaccagcccccagagagcacagctgctgctgctgctgctgctgacatcagcgccaggaagatggcccacccagccatgttcccccggcggggcagcggcagcggcagcgccagcgccctgaatgctgctggcaccggggtgggcagcaatgccaccagcagcgaggacttccccccacccagcctgctgcagcccccacctcctgctgccagcagcaccagcggcccccagcccccaccaccccagagcctgaacctgctgagccaggcccagctgcaggcccagcccctggcccctgggggcacccagatgaagaagaagagcggcttccagatcacctctgtgaccccagcccagatcagcgccagcatcagcagcaacaacagcattgctgaggacacagagagctatgatgacctggatgagagccacacagaggacctgagcagcagcgagatcctggatgtgtccctgagccgggccacagacctgggggagcctgagaggagcagcagcgaggagaccctgaacaacttccaggaggccgagaccccaggagctgtgagccccaaccagccccacctgccccagccccacctgccccacctgccccagcagaatgtggtgatcaatggaaatgcccacccccaccacctgcaccaccaccaccagatccaccacggccaccacctgcagcacggccaccaccaccccagccacgtggccgtggccagcgccagcatcaccggcggcccccccagcagccctgtgtccaggaagctgagcaccaccggcagcagtgacagcatcacccctgtggcccccaccagcgctgtgagcagcagcggcagccctgcctctgtgatgaccaacatgagggcccccagcaccactggaggcatcggcatcaacagcgtgacaggcaccagcacagtgaacaacgtgaacatcacagctgtgggcagcttcaaccccaacgtgaccagctccatgctgggcaatgtgaacatcagcaccagcaacatccccagcgctgctggggtgtctgtgggccctggggtgaccagcggcgtgaatgtgaacatcctgagcggcatgggaaatggcaccatcagcagcagcgctgctgtgtcctctgtgcccaatgctgctgctggcatgactggaggctctgtgagcagccagcagcagcagcccaccgtgaacaccagccgcttccgggtggtgaagctggacagcagcagcgagcccttcaagaagggccgctggacctgcacagagttctatgagaaggaaaatgctgtgcctgccacagaaggagtgctgatcaacaaggtggtggagaccgtgaagcagaaccccatcgaggtgaccagcgagcgggagagcaccagcggcagctctgtgagcagctctgtgtccaccctgagccactacacagaatctgtgggcagcggggagatgggcgcccccaccgtggtggtgcagcagcagcagcagcagcagcagcagcagcagcagcagcctgccctgcagggcgtgaccctgcagcagatggactttggcagcacaggcccccagagcatcccagctgtgtccatcccccagagcatcagccagagccagatcagccaggtgcagctgcagagccaggagctgagctaccagcagaagcagggcctgcagcctgtgcccctgcaggccaccatgtctgctgccaccggcatccagcccagccctgtgaatgtggtgggcgtgaccagcgccctgggccagcagcccagcatcagcagcctggcccagccccagctgccctacagccaggccgcccctcctgtgcagacccccctgcccggggcccccccaccccagcagctgcagtatggccagcagcagcccatggtgtccacccagatggcccctggccacgtgaagtctgtgacccagaacccagcctctgaatatgtgcagcagcagcccatcctgcagacagccatgagcagcggccagcccagcagcgctggggtgggcgccggcaccaccgtcatccctgtggcccagccccagggcatccagctgcctgtgcagcccacagctgtgcctgcccagcctgctggggcctctgtgcagcctgtgggccaggccccagctgctgtgtctgctgtgcccaccggcagccagatcgccaacatcggccagcaggccaacatccccacagctgtgcagcagcccagcacccaggtgccccccagcgtcatccagcagggcgccccacccagcagccaggtggtgcccccagcccagacaggcatcatccaccagggcgtgcagaccagcgcccccagcctgccccagcagctggtgattgccagccagagcagcctgctgactgtgcccccccagccccagggcgtggagcctgtggcccagggcatcgtgtcccagcagctgcctgctgtgagcagcctgcccagcgccagcagcatctctgtgaccagccaggtgagcagcacaggccccagcggcatgcccagcgcccccaccaacctggtgcccccccagaacatcgcccagaccccagccacccagaatggaaacctggtgcagagcgtgtcccagcccccactcatcgccaccaacaccaacctgcccctggcccagcagatccccctgagcagcacccagttcagcgcccagagcctggcccaggccatcggcagccagattgaagatgcccggcgggctgctgagcccagcctggtgggcctgccccagaccatcagcggggacagcggcggcatgtctgctgtgtctgatggcagcagcagcagcctggccgccagcgccagcctcttccccctgaaggtgctgcccctgaccacccccctggtggatggagaagatgagagcagcagcggggcctctgtggtggccatcgacaacaagattgagcaggccatggacctggtgaagagccacctgatgtatgctgtgcgggaggaggtggaggtgctgaaggagcagatcaaggagctgattgagaagaacagccagctggagcaggagaacaacctgctgaagaccctggccagccctgagcagctggcccagttccaggcccagctgcagacaggcagccccccagccaccacccagccccagggcaccacccagcccccagcccagcctgccagccagggcagcggccccacagcctag

SEQ ID NO: 258100 - DNA, 3222 bp, Artificial Sequence
  derived and/or modified sequence
atgcaccagccccccgagagcaccgccgccgccgccgccgccgccgatatctctgcccgcaagatggcacaccctgccatgttcccacgccgcggcagcggtagcggatccgccagcgcactgaacgcagctggcaccggcgtcggctcaaatgcgacctcatctgaggacttcccccccccaagccttctgcagcctccaccccccgcagcctcatccacgagtgggccacagcccccacctccccagagcctaaacctcctatcacaggcacagttgcaggcccagcctctcgcccccgggggaacacaaatgaagaagaagtccggatttcaaattacttcagtgactcctgcccagatatctgcttccattagctccaataattcaattgccgaagacacagagtcatatgatgacttggacgagagccacactgaggatctttctagtagtgagattctggacgtgtcgctgagccgggctactgacctcggggaaccagagcggtctagttcagaagagacacttaataatttccaggaggcagaaaccccaggagccgtttcacccaatcaacctcatttaccgcagccgcatctaccccacctgccccagcagaacgtggtgatcaacggaaatgcccacccacatcacttacatcaccaccatcagatccaccacggacaccacctgcagcacgggcaccaccacccctctcacgtggcagtcgcatcagcctccataaccgggggacctccttcctcccctgtaagccgaaaactgagcaccacaggcagttccgacagcattaccccagtcgcgcctaccagcgcggtgtctagctctggctctcccgctagtgtgatgacaaacatgcgagccccatccactacaggcggaataggtattaactcagtgaccggtacttctaccgtgaacaatgttaatataacagcagtgggatccttcaatcccaatgttacctctagtatgcttgggaatgttaatatatccacgtccaacatcccaagtgctgcaggtgtctcagtgggaccaggcgtgacgtctggagtaaatgtcaatatcctttccgggatgggcaacggaaccattagcagctctgctgccgtgtcctcagtccccaatgctgccgctggaatgaccggaggttccgtatcctctcagcagcagcagccaacagtgaacaccagtcggttcagagtggtgaagctagattcctcaagcgagccttttaaaaaagggagatggacgtgcactgaattttacgagaaggaaaacgccgtacccgctactgagggtgtactgataaacaaagtggtggagaccgttaagcagaacccgatcgaggttacttccgaacgcgaatccacatctggctcaagtgtttcgagctctgtctcaaccctgtcccactacacagaaagcgtagggtccggcgagatgggcgcacccactgtggtggtccagcagcaacagcagcagcagcagcaacaacagcaacagccggccctgcagggggtgacattacaacagatggattttggctcgacaggcccacagagcatccccgctgtgtctatccctcaatcaattagccagtcacagatttcccaggtacagttacagtcccaggagctgagttaccaacaaaagcagggattgcagccagtgcctctacaggccaccatgagcgccgccactgggatccagccaagtcccgttaatgtcgttggggtgacctcagcactcgggcaacagccatctatttcttctctcgcacagccgcagctgccatacagccaggcagccccccccgtgcagacacctttgcccggcgcacctccaccacagcagctacaatacgggcaacagcagccaatggtcagcacccagatggcgcctgggcatgtgaaatccgttactcagaatcccgccagcgaatacgttcagcagcaaccgattcttcagactgcaatgtctagtggtcagccatctagcgccggcgtgggggctggaaccacggtgatcccagtcgcacagccccagggcatccagttgcctgtgcagcctacggctgtgcccgctcagccggcaggggcttctgtacagcctgtgggtcaggcacccgcagccgtaagtgcagtgcctaccggcagccagatcgccaacataggccaacaggctaacattccgacagcagtgcagcagccgtcaacccaggttccacctagtgttattcagcagggagcccccccgagttcccaggtcgtgccacctgcccagactgggattatccatcagggtgtgcagacaagcgcccctagcctgcctcagcagctggtgattgcttctcagtcgtctttactgacagtcccacctcagccccagggagtcgaacccgtagcccagggcatagtcagccaacagttaccagcagtctcaagtctgccaagcgccagctccattagcgtgacatctcaggtcagcagtaccggaccctccggaatgccttccgcccccaccaacctcgtgcctcctcaaaacatcgcgcagactccagctacgcaaaacggaaaccttgtgcagagtgtgagccagccccctctgattgccacaaacaccaaccttcctcttgcccaacagataccactaagttccacccaattctctgctcaatctttggcccaggctatcggcagccaaattgaagatgcccggagggcagcagagccgagtttggtcggactgcctcagaccatcagcggagactccggaggcatgtcagcagttagcgacggctccagcagctctctggccgctagcgccagtttatttcctctaaaagtcctgcctctgacaacacccttggtggatggcgaggacgagtcaagttctggggctagcgtcgtagcaattgataataaaattgagcaagccatggatcttgtgaaaagtcatctgatgtacgcagtgcgcgaggaggtggaagtcctgaaggagcagataaaagaactgattgagaagaactctcagctggagcaggagaacaacctcctcaagacactagctagccctgagcaattagcgcagttccaggcacaactccagaccggatctcctccagcaacgacacaaccccaggggacaacgcagccaccagcccagcccgcttcccaggggtctggcccaactgcctag

SEQ ID NO: 258101 - DNA, 3222 bp, Artificial Sequence
  derived and/or modified sequence
atgcatcagccgccagaaagcactgctgcagcagccgctgctgctgacatctctgctagaaagatggcccaccctgccatgttccccagacggggatccgggtccggatccgcgagtgccctgaatgccgctgggaccggcgtcgggagtaacgctacctctagtgaagatttccctcccccaagtcttttgcagcctccccctccagccgcttcatcgacctctgggccacagcctccgccaccacagagtcttaacttactttcacaggcccagctccaagctcagccacttgcccctgggggtactcaaatgaaaaagaagtcaggtttccaaatcacctccgtgacgccagcacagatcagcgcaagcatttccagcaacaactcaatcgcagaggatacagagagttatgatgatttggacgaaagccacaccgaggatcttagctcgagtgaaatattagacgtgagcctgtcccgggctaccgatctgggcgaacccgaaaggtcctcctccgaagaaaccctaaacaacttccaggaggcagagaccccgggagcagtctcacccaatcagccccatctaccccagccccacctgccccatttaccccagcagaacgtggtaattaacggcaatgcacatccacatcacctccatcatcatcatcagatccatcacggacaccatctccaacacggtcaccatcacccaagccatgtggcagtggccagcgcttcaatcaccgggggaccaccctcatcaccagtgagtcgcaaactttccacaaccggaagcagcgatagtatcacaccagtggcccctaccagcgcagtgtcttcctccggctccccggcaagcgtgatgacgaatatgagggctccgtctactacaggcggtattggcatcaacagcgtgactggtacctccacagtgaataatgtcaatattaccgccgttgggagtttcaatccaaacgttacctccagtatgctgggcaacgttaacataagcacctcaaacataccttctgccgcaggcgtctctgtgggacccggagtcaccagcggtgtgaacgtgaacattctctccggaatgggtaacggcactatctcttcttccgcagctgtgtctagtgttcccaatgctgcagcagggatgactggtggatccgtctcctctcagcagcagcagcctaccgtgaatacgagtcgcttccgagttgtgaagctcgatagctcgtccgagcctttcaagaagggcaggtggacctgtacagagttctatgagaaggaaaatgcagtacccgctaccgagggggtcctaatcaataaagttgttgagacagtgaagcagaatcctattgaagtgacctcagaaagagaatcgacctcaggcagctctgtgagctcttcagtttctaccctgtctcactacacggaaagcgttggatctggcgagatgggagctcctacagtggtggtgcagcagcagcagcaacagcagcaacaacaacagcagcaacctgctctccagggagttaccctacaacagatggattttggtagcaccggccctcaatccatcccagcggtgtctatcccacagagtatttcgcagtcccagatcagccaggtgcagcttcagagccaggagctgtcttatcagcagaaacagggtctgcagcctgtccccctgcaggccaccatgtccgctgccacaggcatacaaccctcacccgtgaacgttgttggagtgacatcagcactcggacaacaaccgagcattagcagtctggcacaaccccagctgccgtactcgcaagcggctccaccagttcagacccccctaccaggggcaccccctccacagcagctacagtacgggcaacagcagcctatggtttccacacagatggctccaggccacgtgaagtctgtcactcagaatccggctagtgagtacgtgcagcagcaaccaattctccagacagccatgagcagtggccagccgtcttcagccggagtaggggcaggaacaaccgtgattcctgttgcccaacctcagggcatccagcttcctgtccaaccgaccgccgtccccgcacagcctgctggggcatcggtgcaacctgtcggccaggctcccgctgccgtctccgctgtgccaacgggcagtcaaattgctaatattggtcaacaagctaatatccccacagccgtgcagcaaccatcaacccaagtcccaccttccgtgattcagcagggtgcccctccttcatctcaggtggtaccccctgctcaaaccgggatcatacatcagggagtgcagacatccgctccctcactgccccagcaacttgtcattgcatcccaaagtagcctcctgactgtacctccacagccacagggtgtcgagcctgtggcacaagggattgtgtctcagcagcttcccgctgtttcaagcctaccctccgcaagctctatctccgtaacaagccaggtgtcatccactggcccttcagggatgccctcagcacccacaaacctcgtcccaccccaaaatatagcccagacccctgcgacccagaacggcaatttagtgcagagcgtgtctcaaccccctttaatagcaactaatacgaacttaccccttgctcagcagattcccctgagctctactcagtttagcgctcagtctctggcccaggccattggcagccagatagaagacgctaggagggccgctgagccatcgcttgtggggctcccacagacgatttcaggcgattctggtggaatgtcagctgtgtccgacggctcaagcagcagcttggcagcctccgcttctctgtttccgctgaaggtgctgcccctgacaacaccacttgttgacggggaggacgagagctccagcggggctagcgtggtggcaattgacaacaagattgaacaggccatggatttggtaaaaagtcaccttatgtacgcggttagagaagaggtggaagttctcaaggaacagatcaaagaactaattgagaagaactcccaactggagcaggaaaacaacttgctcaagacattagcatcgcccgaacagttggctcagttccaggcgcagctgcagacagggtcacctcctgccacaacacaacctcagggtaccactcagcctccggctcagcccgcttctcagggtagcggcccaaccgcttag
